United States Patent Application Publication US 2025/0302929 A1 - sequence listing, part 4

SEQ ID NO: 17645 - protein, 665 aa, Artificial Sequence
  Synthetic polypeptide
PGAVAHTCNPSTLGGRGRWITWGQEFETSLANMVAIKIIDKTQLNPTSLQKLFREVRIMKILNHPNIVKLFEVIETEKTLYLIMEYASGGEVFDYLVAHGRMKEKEARSKFRQIVSAVQYCHQKRIVHRDLKAENLLLDADMNIKIADFGFSNEFTVGGKLDTFCGSPPYAAPELFQGKKYDGPEVDVWSLGVILYTLVSGSLPFDGQNLKELRERVLRGKYRIPFYMSTDCENLLKRFLVLNPIKRGTLEQIMKDRWINAGHEEDELKPFVEPELDISDQKRIDIMVGMGYSQEEIQESLSKMKYDEITATYLLLGRKSSEVRPSSDLNNSTGQSPHHKVQRSVFSSQKQRRYSDHAGPAIPSVVAYPKRSQTSTADSDLKEDGISSRKSSGSAVGGKGIAPASPMLGNASNPNKADIPERKKSSTVPSSNTASGGMTRRNTYVCSERTTADRHSVIQNGKENSTIPDQRTPVASTHSISSAATPDRIRFPRGTASRSTFHGQPRERRTATYNGPPASPSLSHEATPLSQTRSRGSTNLFSKLTSKLTRSRNVSAEQKDENKEAKPRSLRFTWSMKTTSSMDPGDMMREIRKVLDANNCDYEQRERFLLFCVHGDGHAENLVQWEMEVCKLPRLSLNGVRFKRISGTSIAFKNIASKIANELKL

SEQ ID NO: 17646 - protein, 696 aa, Artificial Sequence
  Synthetic polypeptide
PGAVAHTCNPSTLGGRGRWITWGQEFETSLANMVAIKIIDKTQLNPTSLQKLFREVRIMKILNHPNIVKLFEVIETEKTLYLIMEYASGGEVFDYLVAHGRMKEKEARSKFRQIVSAVQYCHQKRIVHRDLKAENLLLDADMNIKIADFGFSNEFTVGGKLDTFCGSPPYAAPELFQGKKYDGPEVDVWSLGVILYTLVSGSLPFDGQNLKELRERVLRGKYRIPFYMSTDCENLLKRFLVLNPIKRGTLEQIMKDRWINAGHEEDELKPFVEPELDISDQKRIDIMVGMGYSQEEIQESLSKMKYDEITATYLLLGRKSSELDASDSSSSSNLSLAKVRPSSDLNNSTGQSPHHKVQRSVFSSQKQRRYSDHAGPAIPSVVAYPKRSQTSTADSDLKEDGISSRKSSGSAVGGKGIAPASPMLGNASNPNKADIPERKKSSTVPSSNTASGGMTRRNTYVCSERTTADRHSVIQNGKENSTIPDQRTPVASTHSISSAATPDRIRFPRGTASRSTFHGQPRERRTATYNGPPASPSLSHEATPLSQTRSRGSTNLFSKLTSKLTRRLPTEYERNGRYEGSSRNVSAEQKDENKEAKPRSLRFTWSMKTTSSMDPGDMMREIRKVLDANNCDYEQRERFLLFCVHGDGHAENLVQWEMEVCKLPRLSLNGVRFKRISGTSIAFKNIASKIANELKL

SEQ ID NO: 17647 - protein, 728 aa, Artificial Sequence
  Synthetic polypeptide
PGAVAHTCNPSTLGGRGRWITWGQEFETSLANMVAIKIIDKTQLNPTSLQKLFREVRIMKILNHPNIVKLFEVIETEKTLYLIMEYASGGEVFDYLVAHGRMKEKEARSKFRQGCQAGQTIKVQVSFDLLSLMFTFIVSAVQYCHQKRIVHRDLKAENLLLDADMNIKIADFGFSNEFTVGGKLDTFCGSPPYAAPELFQGKKYDGPEVDVWSLGVILYTLVSGSLPFDGQNLKELRERVLRGKYRIPFYMSTDCENLLKRFLVLNPIKRGTLEQIMKDRWINAGHEEDELKPFVEPELDISDQKRIDIMVGMGYSQEEIQESLSKMKYDEITATYLLLGRKSSELDASDSSSSSNLSLAKVRPSSDLNNSTGQSPHHKVQRSVFSSQKQRRYSDHAGPAIPSVVAYPKRSQTSTADSDLKEDGISSRKSSGSAVGGKGIAPASPMLGNASNPNKADIPERKKSSTVPSSNTASGGMTRRNTYVCSERTTADRHSVIQNGKENSTIPDQRTPVASTHSISSAATPDRIRFPRGTASRSTFHGQPRERRTATYNGPPASPSLSHEATPLSQTRSRGSTNLFSKLTSKLTRRNMSFRFIKRLPTEYERNGRYEGSSRNVSAEQKDENKEAKPRSLRFTWSMKTTSSMDPGDMMREIRKVLDANNCDYEQRERFLLFCVHGDGHAENLVQWEMEVCKLPRLSLNGVRFKRISGTSIAFKNIASKIANELKL

SEQ ID NO: 17648 - protein, 93 aa, Artificial Sequence
  Synthetic polypeptide
PGAVAHTCNPSTLGGRGRWITWGQEFETSLANMVAIKIIDKTQLNPTSLQKLFREVRIMKILNHPNIVKLFEVIETEKTLYLIMEYASGGKNI

SEQ ID NO: 17649 - protein, 71 aa, Artificial Sequence
  Synthetic polypeptide
AEIAPLHSSLGDREPSTSARKTPSRTSACSSSWPSSRGCALTFQESCFRSSDLAARSSSSTWPMWTPCWSV

SEQ ID NO: 17650 - protein, 62 aa, Artificial Sequence
  Synthetic polypeptide
SQLLRRLRQENHLNPGGRGCSEPRSHHCTPAWATESRLHLHGRRLPAQAPAAAHGPAAAAAH

SEQ ID NO: 17651 - protein, 232 aa, Artificial Sequence
  Synthetic polypeptide
TREAEVAVSRDRTTALQPGRQRAVYICTEDAFPHKRLQQLMAQQPRLRTDVPGELLQKLRFGSQIFIEHVADVDTLLECVNKKVPVLLSRGMARLVVIDSVAAPFRCEFDSQASAPRARHLQSLGATLRELSSAFQSPVLCINQVTEAMEEQGAAHGPLGFWDERVSPALGITWANQLLVRLLADRLREEEAALGCPARTLRVLSAPHLPPSSCSYTISAEGVRGTPGTQSH

SEQ ID NO: 17652 - protein, 985 aa, Artificial Sequence
  Synthetic polypeptide
SQHFGRPRQADHEVGNPRVELTLSELQDMAARQQQQIENQQQMLVAKEQRLHFLKQQERRQQQSISENEKLQKLKERVEAQENKLKKIRAMRGQVDYSKIMNGNLSAEIERFSAMFQEKKQEVQTAILRVDQLSQQLEDLKKGKLNGFQSYNGKLTGPAAVELKRLYQELQIRNQLNQEQNSKLQQQKELLNKRNMEVAMMDKRISELRERLYGKKIQLNRVNGTSSPQSPLSTSGRVAAVGPYIQVPSAGSFPVLGDPIKPQSLSIASNAAHGRSKSANDGNWPTLKQNSSSSVKPVQVAGADWKDPSVEGSVKQGTVSSQPVPFSALGPTEKPGIEIGKVPPPIPGVGKQLPPSYGTYPSPTPLGPGSTSSLERRKEGSLPRPSAGLPSRQRPTLLPATGSTPQPGSSQQIQQRISVPPSPTYPPAGPPAFPAGDSKPELPLTVAIRPFLADKGSRPQSPRKGPQTVNSSSIYSMYLQQATPPKNYQPAAHSALNKSVKAVYGKPVLPSGSTSPSPLPFLHGSLSTGTPQPQPPSESTEKEPEQDGPAAPADGSTVESLPRPLSPTKLTPIVHSPLRYQSDADLEALRRKLANAPRPLKKRSSITEPEGPGGPNIQKLLYQRFNTLAGGMEGTPFYQPSPSQDFMGTLADVDNGNTNANGNLEELPPAQPTAPLPAEPAPSSDANDNELPSPEPEELICPQTTHQTAEPAEDNNNNVATVPTTEQIPSPVAEAPSPGEEQVPPAPLPPASHPPATSTNKRTNLKKPNSERTGHGLRVRFNPLALLLDASLEGEFDLVQRIIYEVEDPSKPNDEGITPLHNAVCAGHHHIVKFLLDFGVNVNAADSDGWTPLHCAASCNSVHLCKQLVESGAAIFASTISDIETAADKCEEMEEGYIQCSQFLYGVQEKLGVMNKGVAYALWDYEAQNSDELSFHEGDALTILRRKDESETEWWWARLGDREGYVPKNLLGLYPRIKPRQRTLA

SEQ ID NO: 17653 - protein, 62 aa, Artificial Sequence
  Synthetic polypeptide
PGAVAHACNPSTLGGQGRQITRLGIHVLNLPSQSSKIWQLGNSSRLKISSRCWLPRNSVYIF

SEQ ID NO: 17654 - protein, 27 aa, Artificial Sequence
  Synthetic polypeptide
RARWLMPVIPALWEAKAGRSRGWESTC

SEQ ID NO: 17655 - protein, 47 aa, Artificial Sequence
  Synthetic polypeptide
SQHFGRPRQADHEVGNPRVELTLSELQDMAARQQQQIENQQQMLVAK

SEQ ID NO: 17656 - protein, 56 aa, Artificial Sequence
  Synthetic polypeptide
PGAVAHACNPSTLGGQGRQITRLGIHVLNLPSQSSKIWQLGNSSRLKISSRCWLPR

SEQ ID NO: 17657 - protein, 1089 aa, Artificial Sequence
  Synthetic polypeptide
NKMILTVFLSNNEQILTEVPITPETTCRDVVEFCKEPGEGSCHLAEVWRGNERPIPFDHMMYEHLQKWGPRREEVKFFLRHEDSPTENSEQGGRQTQEQRTQRNVINVPGEKRTENGVGNPRVELTLSELQDMAARQQQQIENQQQMLVAKEQRLHFLKQQERRQQQSISENEKLQKLKERVEAQENKLKKIRAMRGQVDYSKIMNGNLSAEIERFSAMFQEKKQEVQTAILRVDQLSQQLEDLKKGKLNGFQSYNGKLTGPAAVELKRLYQELQIRNQLNQEQNSKLQQQKELLNKRNMEVAMMDKRISELRERLYGKKIQLNRVNGTSSPQSPLSTSGRVAAVGPYIQVPSAGSFPVLGDPIKPQSLSIASNAAHGRSKSANDGNWPTLKQNSSSSVKPVQVAGADWKDPSVEGSVKQGTVSSQPVPFSALGPTEKPGIEIGKVPPPIPGVGKQLPPSYGTYPSPTPLGPGSTSSLERRKEGSLPRPSAGLPSRQRPTLLPATGSTPQPGSSQQIQQRISVPPSPTYPPAGPPAFPAGDSKPELPLTVAIRPFLADKGSRPQSPRKGPQTVNSSSIYSMYLQQATPPKNYQPAAHSALNKSVKAVYGKPVLPSGSTSPSPLPFLHGSLSTGTPQPQPPSESTEKEPEQDGPAAPADGSTVESLPRPLSPTKLTPIVHSPLRYQSDADLEALRRKLANAPRPLKKRSSITEPEGPGGPNIQKLLYQRFNTLAGGMEGTPFYQPSPSQDFMGTLADVDNGNTNANGNLEELPPAQPTAPLPAEPAPSSDANDNELPSPEPEELICPQTTHQTAEPAEDNNNNVATVPTTEQIPSPVAEAPSPGEEQVPPAPLPPASHPPATSTNKRTNLKKPNSERTGHGLRVRFNPLALLLDASLEGEFDLVQRIIYEVEDPSKPNDEGITPLHNAVCAGHHHIVKFLLDFGVNVNAADSDGWTPLHCAASCNSVHLCKQLVESGAAIFASTISDIETAADKCEEMEEGYIQCSQFLYGVQEKLGVMNKGVAYALWDYEAQNSDELSFHEGDALTILRRKDESETEWWWARLGDREGYVPKNLLGLYPRIKPRQRTLA

SEQ ID NO: 17658 - protein, 12 aa, Artificial Sequence
  Synthetic polypeptide
RSETLSQKNKIK

SEQ ID NO: 17659 - protein, 122 aa, Artificial Sequence
  Synthetic polypeptide
NKMILTVFLSNNEQILTEVPITPETTCRDVVEFCKEPGEGSCHLAEVWRGNERPIPFDHMMYEHLQKWGPRREEVKFFLRHEDSPTENSEQGGRQTQEQRTQRNVINVPGEKRTENGDSYLG

SEQ ID NO: 17660 - protein, 151 aa, Artificial Sequence
  Synthetic polypeptide
NKMILTVFLSNNEQILTEVPITPETTCRDVVEFCKEPGEGSCHLAEVWRGNERPIPFDHMMYEHLQKWGPRREEVKFFLRHEDSPTENSEQGGRQTQEQRTQRNVINVPGEKRTENGVGNPRVELTLSELQDMAARQQQQIENQQQMLVAK

SEQ ID NO: 17661 - protein, 142 aa, Artificial Sequence
  Synthetic polypeptide
NKMILTVFLSNNEQILTEVPITPETTCRDVVEFCKEPGEGSCHLAEVWRGNGFREPSHKTYCTWPGTVAHSCNLNTLGGRERPIPFDHMMYEHLQKWGPRREEVKFFLRHEDSPTENSEQGGRQTQEQRTQRNVINVPGEKR

SEQ ID NO: 17662 - protein, 38 aa, Artificial Sequence
  Synthetic polypeptide
NIIARRGHMESMRMEYGQLGAKTGSHLTAGHSAKGAQK

SEQ ID NO: 17663 - protein, 14 aa, Artificial Sequence
  Synthetic polypeptide
QQVTQPKELRSRVY

SEQ ID NO: 17664 - protein, 1363 aa, Artificial Sequence
  Synthetic polypeptide
SHEPLKAENFLRLESDKFEMRDLKYHCSEGPHGKHENGIWAARSKDWIPLDSRSLSQRSSEVEYINKYRQLEAQELDVCRSVQPTSGPGPRPSLAKLSSVTCIPGTTYKYPDLPISRYKEEVVSLIESNSVVIIHGATGSGKSTQLPQYILDHYVQRSAYCSIVVTQPRKIGASSIARWISKERAWTLGGVVGYQVGLEKIATEDTRLIYMTTGVLLQKIVSAKSLMEFTHIIIDEVHERTEEMDFLLLVVRKLLRTNSRFVKVVLMSATISCKEFADYFAVPVQNKMNPAYIFEVEGKPHSVEEYYLNDLEHIHHSKLSPHLLEEPVITKDIYEVAVSLIQMFDDLDMKESGNKAWSGAQFVLERSSVLVFLPGLGEINYMHELLTSLVHKRLQVYPLHSSVALEEQNNVFLSPVPGYRKIILSTNIAESSVTVPDVKYVIDFCLTRTLVCDEDTNYQSLRLSWASKTSCNQRKGRAGRVSRGYCYRLVHKDFWDNSIPDHVVPEMLRCPLGSTILKVKLLDMGEPRALLATALSPPGLSDIERTILLLKEVGALAVSGQREDENPHDGELTFLGRVLAQLPVNQQLGKLIVLGHVFGCLDECLIIAAALSLKNFFAMPFRQHLDGYRNKVNFSGSSKSDCIALVEAFKTWKACRQTGELRYPKDELNWGRLNYIQIKRIREVAELYEELKTRISQFNMHVDSRRPVMDQEYIYKQRFILQVVLAGAFYPNYFTFGQPDEEMAVRELAGKDPKTTVVLKHIPPYGFLYYKQLQSLFRQCGQVKSIVFDGAKAFVEFSRNPTERFKTLPAVYMAIKMSQLKVSLELSVHSAEEIEGKVQGMNVSKLRNTRVNVDFQKQTVDPMQVSFNTSDRSQTVTDLLLTIDVTEVVEVGHFWGYRIDENNSEILKKLTAEINQLTLVPLPTHPHPDLVCLAPFADFDKQRYFRAQVLYVSGNSAEVFFVDYGNKSHVDLHLLMEIPCQFLELPFQALEFKICKMRPSAKSLVCGKHWSDGASQWFASLVSGCTLLVKVFSVVHSVLHVDVYQYSGVQDAINIRDVLIQQGYAELTEESYESKQSHEVLKGLFSKSVENMTDGSVPFPMKDDEKYLIRILLESFSTNKLGTPNCKAELHGPFNPYELKCHSLTRISKFRCVWIEKESINSVIISDAPEDLHQRMLVAASLSINATGSTMLLRETSLMPHIPGLPALLSMLFAPVIELRIDQNGKYYTGVLCGLGWNPATGASILPEHDMELAFDVQFSVEDVVEVNILRAAINKLVCDGPNGCKCLGPERVAQLQDIARQKLLGLFCQSKPREKIVPKWHEKPYEWNQVDPKLVMEQADRESSRGKNTFLYQLHKLVVLGT

SEQ ID NO: 17665 - protein, 1172 aa, Artificial Sequence
  Synthetic polypeptide
SHEPLKAENFLRLESDKFEMRDLKYHCSEGPHGKHENGIWAARSKDWIPLDSRSLSQRSSEVEYINKYRQLEAQELDVCRSVQPTSGPGPRPSLAKLSSVTCIPGTTYKYPDLPISRYKEEVVSLIESNSVVIIHGATGSGKSTQLPQYILDHYVQRSAYCSIVVTQPRKIGASSIARWISKERAWTLGGVVGYQVGLEKIATEDTRLIYMTTGVLLQKIVSAKSLMEFTHIIIDEVHERTEEMDFLLLVVRKLLRTNSRFVKVVLMSATISCKEFADYFAVPVQNKMNPAYIFEVEGKPHSVEEYYLNDLEHIHHSKLSPHLLEEPVITKDIYEVAVSLIQMFDDLDMKESGNKAWSGAQFVLERSSVLVFLPGLGEINYMHELLTSLVHKRLQVYPLHSSVALEEQNNVFLSPVPGYRKIILSTNIAESSVTVPDVKYVIDFCLTRTLVCDEDTNYQSLRLSWASKTSCNQRKGRAGRVSRGYCYRLVHKDFWDNSIPDHVVPEMLRCPLGSTILKVKLLDMGEPRALLATALSPPGLSDIERTILLLKEVGALAVSGQREDENPHDGELTFLGRVLAQLPVNQQLGKLIVLGHVFGCLDECLIIAAALSLKNFFAMPFRQHLDGYRNKVNFSGSSKSDCIALVEAFKTWKACRQTGELRYPKDELNWGRLNYIQIKRIREVAELYEELKTRISQFNMHVDSRRPVMDQEYIYKQRFILQVVLAGAFYPNYFTFGQPDEEMAVRELAGKDPKTTVVLKHIPPYGFLYYKQLQSLFRQCGQVKSIVFDGAKAFVEFSRNPTERFKTLPAVYMAIKMSQLKVSLELSVHSAEEIEGKVQGMNVSKLRNTRVNVDFQKQTVDPMQVSFNTSDRSQTVTDLLLTIDVTEVVEVGHFWGYRIDENNSEILKKLTAEINQLTLVPLPTHPHPDLVCLAPFADFDKQRYFRAQVLYVSGNSAEVFFVDYGNKSHVDLHLLMEIPCQFLELPFQALEFKICKMRPSAKSLVCGKHWSDGASQWFASLVSGCTLLVKVFSVVHSVLHVDVYQYSGVQDAINIRDVLIQQGYAELTEESYESKVNILRAAINKLVCDGPNGCKCLGPERVAQLQDIARQKLLGLFCQSKPREKIVPKWHEKPYEWNQVDPKLVMEQADRESSRGKNTFLYQLHKLVVLGT

SEQ ID NO: 17666 - protein, 13 aa, Artificial Sequence
  Synthetic polypeptide
TQEVEAGLVLERA

SEQ ID NO: 17667 - protein, 49 aa, Artificial Sequence
  Synthetic polypeptide
NPVSKNTKISQARWHVPVIPATRKAEAGESLEPRRWRPALCWKEHDVGM

SEQ ID NO: 17668 - protein, 31 aa, Artificial Sequence
  Synthetic polypeptide
SQLLGRPRQENHLNPGGGGRPCAGKSMMWAC

SEQ ID NO: 17669 - protein, 5792 aa, Artificial Sequence
  Synthetic polypeptide
LGSCPSSTPTGWVPLVSGRQLQPGEPGAETEDDHSVTEGPADEGIRPRPQGSSPVYEYTTEAADFGLQEDAPGRQGSAGRRRSWWKRDSGDSRTFFRMSRPEAVQEATEVTLKTEVEAGASGYSVTGGGDQGIFVKQVLKDSSAAKLFNLREGDQLLSTTVFFENIKYEDALKILQYSEPYKVQFKIRRQLPAPQDEEWASSDAQHGPQGKEKEDTDVADGCRETPTKTLEGDGDQERLISKPRVGRGRQSQRERLSWPKFQSIKSKRGPGPQRSHSSSEAYEPRDAHDVSPTSTDTEAQLTVERQEQKAGPGSQRRRKFLNLRFRTGSGQGPSSTGQPGRGFQSGVGRAGVLEELGPWGDSLEETGAATGSRREERAEQDREVMPAQSMPLPTELGDPRLCEGTPQEGGLRAARLHGKTLEGQAQETAVAQRKPRAQPTPGMSREGEGEGLQSLEIGIARLSLRDTTEGGTQIGPPEIRVRVHDLKTPKFAFSTEKEPERERRLSTPQRGKRQDASSKAGTGLKGEEVEGAGWMPGREPTTHAEAQGDEGDGEEGLQRTRITEEQDKGREDTEGQIRMPKFKIPSLGWSPSKHTKTGREKATEDTEQGREGEATATADRREQRRTEEGLKDKEDSDSMTNTTKIQLIHDEKRLKKEQILTEKEVATKDSKFKMPKFKMPLFGASAPGKSMEASVDVSAPKVEADVSLLSMQGDLKTTDLSVQTPSADLEVQDGQVDVKLPEGPLPEGASLKGHLPKVQRPSLKMPKVDLKGPKLDLKGPKAEVTAPDVKMSLSSMEVDVQAPRAKLDGARLEGDLSLADKEVTAKDSKFKMPKFKMPSFGVSAPGKSMEDSVDVSAPKVEADVSLSSMQGDLKATDLSIQPPSADLEVQAGQVDVKLPEGPVPEGAGPKVHLPKVEMPSFKMPKVDLKGPQIDVKGPKLDLKGPKAEVTAPDGEVSLPSMEVDVQAQKAKLDGAWLEGDLSLADKDVTAKDSKFKMPKFKMPSFGVSAPGKSIKALVDVSAPKVEADLSLPSMQGDLKTTDLSIQPASTDLKVQADQVDVKLPEGHLPEGAGLKGHLPKVEMPSFKMPKVALKGPQVDVKGPKLDLKSPKAEVTAPDVEVSLPSVEVDVEAPGAKLDSARLEGELSLADKDVTAKDSRFKMPKFKMPSFGASAPGKSIEASVDVSAPKVEADVSLPSMQGDLKTTDLSIQPPSADLEVHAGQVDVKLLEGHVPEGAGFKGHLPKVQMPSLKMPKVDLKGPQVEVRGPKLDLKGHKAEVTAHEVAVSLPSVEVDMQAPGAKLDGAQLDGDLSLADKDVTAKDSKFKMPKFKMPSFGVSAPGKSIEASVDLSAPKVEADMSLPSMQGDLKTTDLSIQPPSTDLELQAGQLDVKLPEGPVPEGAGLKGHLPKLQMPSFKVPKVDLKGPEIDIKGPKLDLKDPKVEVTAPDVEVSLPSVEVDVEAPGAKLDGGRLEEDMSLADKDLTTKDSKFKMPKFKMPSFGVSAPGKSIEASVDVSAPKVEADVSLPSMQGDLKATDLSIQPPSADLEVQAGQVDVKLPEGPVSEGAGLKGHLPKVQMPSFKMPKVDLKGPQIDVKGPKLDLKGPKVEVTAPDVKMSLSSMEVDVQAPRAKLDGAQLEGDLSLADKAVTAKDSKFKMPKFKMPSFGVSAPGKSIEASVDVSEPKVEADVSLPSMQGDLKTTDLSIQSPSADLEVQAGQVNVKLPEGPLPEGAGFKGHLPKVQMPSLKMPKVALKGPQMDVKGPKLDLKGPKAEVMAPDVEVSLPSVEVDVEAPGAKLDSVRLEGDLSLADKDVTAKDSKFKMPKFKMPSFGVSAPGKSIEASVDVSAPKVEAEVSLPSMQGDLKTTDLCIPLPSADLVVQAGQVDMKLPEGQVPEGAGLKGHLPKVDMPSFKMPKVDLKGPQTDVKGAKLDLKGPKAEVTAPDVEVSLPSMEVDVQAQKAKLDGARLEGDLSLADKDMTAKDSKFKMPKFKMPSFGVSAPGRSIEASVDVPAPKVEADVSLPSMQGDLKTTDLSIQPPSADLKVQTGQVDVKLPEGHVPEGAGLKGHLPKVEMPSLKMPKVDLKGPQVDIKGPKLDLKDPKVEMRVPDVEVSLPSMEVDVQAPRAKLDSAHLQGDLTLANKDLTTKDSKFKMPKFKMPSFGVSAPGKSIEASVDVSPPKVEADMSLPSMQGDLKTTDLSIQPLSADVKVQAGQVDVKLLEGPVPEEVGLKGHLPKLQMPSFKVPKVDLKGPEIDIKGPKLDLKDPKVEVTAPDVEVSLPSVEVDVKAPGAKLDGARLEGDMSLADKDVTAKDSKFKMPKFKMLSFGVSALGKSIEASADVSALKVEADVSLPSMQGDLKTTDLSVQPPSADLEVQAGQVDVKLPEGPVPEGAGLKGHLPKLQMPSFKMPKVDLKGPQIDVKGPKLDLKGPKTDVMAPDVEVSQPSVEVDVEAPGAKLDGAWLEGDLSVADKDVTTKDSRFKIPKFKMPSFGVSAPGKSIEASVDVSAPKVEADGSLSSMQGDLKATDLSIQPPSADLEVQAGQVDVKLPEGPVPEGAGLKGHLPKVQMPSFKMPEMDLKGPQLDVKGPKLDLKGPKAEVTAPDVEMSLSSMEVDVQAPRAKLDGARLEGDLSLADKGVTAKDSKFKMPKFKMPSFRVSAPGESIEALVDVSELKVEADMSLPSMQGDLKTTDISIQPPSAQLEVQAGQVDVKLPEGHVPEGAGLKGHLPKLQMPSFKMPEVDLKGPQIDVKGPNVDLKGPKAEVTAPDVKMSLSSMEVDVQAPRAKLDGARLEGDLSLADKGMTAKDSKFKMPKFKMPSFGVSAPGKSIEASVDVSELKVEADGSFPSMQGDLKTTDIRIQPPSAQLEVQAGQVDVKLPEGHVPEGAGLKGHLPKVQMPSFKMPKVDLKGPQIDVKGPKLDLKGPKAEVTAPDVEVSLPSVEVDVEAPRAKLDGARLEGDLSLADKDVTAKDSKFKMPKFKMPSFGVSAPGKSIEVSVDVSAPKVEAEVSLPSMQGDLKTTDISIEPPSAQLEVQAGQVDLKLPEGHVPEGAGLKGHLPKLQMPSFKMPKVDRKGPQIDVKGPKLDLKGPKTDVTAPDVEVSQPGMEVDVEAPGAKLDGARLEGDLSLADKDVTAKDSKFKMPKFKMPSFGVSAPGKSIEVLVDVSAPKVEADLSLPSMQGDLKNTDISIEPPSAQLEVQAGQVDVKLPEGHVLEGAGLKGHLPKLQMPSFKMPKVDRKGPQIDIKGPKLDLKGPKMDVTAPDVEVSQPSMEVDVEAPGAKLDGARLEGDLSLADKDVTAKDSKFKMPKFKMPSYRASAPGKSIQASVDVSAPKAEADVSLPSMQGDLKTTDLSIQLPSVDLEVQAGQVDVKLPEGHVPEGAGLKGHLPKVEMPSFKMPKVDLKSPQVDIKGPKLDLKVPKAEVTVPDVEVSLPSVEVDVQAPRAKLDGARLEGDLSLAEKDVTAKDSKFKMPKFKMPSFGVSAPGRSIEASLDVSAPKVEADVSLSSMQGDLKATDLSIQPPSADLEVQAVQVDVELLEGPVPEGAGLKGHLPKVEMPSLKTPKVDLKGPQIDVKGPKLDLKGPKAEVRVPDVEVSLPSVEVDVQAPKAKLDAGRLEGDLSLADKDVTAKDSKFKMPKFKMPSFRVSAPGKSMEASVDVSAPKVEADVSLPSMQGDLKTTDLSIQPPSADLKVQAGQMDVKLPEGQVPEGAGLKEHLPKVEMPSLKMPKVDLKGPQVDIKGPKLDLKVSKAEVTAPDVEVSLPSVEVDVQAPRAKLDSAQLEGDLSLADKDVTAKDSKFKMPKFKMPSFGVSAPGKSIEASVHVSAPKVEADVSLPSMQGDLKTTDLSIQPHSADLTVQARQVDMKLLEGHVPEEAGLKGHLPKVQMPSFKMPKVDLKGPEIDIKGPKLDLKDPKVEVTAPDVEVSLPSVEVDVEAPGAKLDGARLEGDLSLADKDMTAKDSKFKMPKFKMPSFGVSAPGKSMEASVDVTAPKVEADVSLPSMQGDLKATDLSVQPPSADLEVQAGQVDVKLPEGPVPEGASLKGHLPKVQMPSFKMPKVDLKGPQIDVKGPKLDLKGPKAEVTAPDVKMSLSSMEVDVQAPRAKLDGVQLEGDLSLADKDVTAKDSKFKMPKFKMPSFGVSAPGKSMEASVDVSELKAKADVSLPSMQGDLKTTDLSIQSPSADLEVQAGQVDVKLPEGPLPKGAGLKGHLPKVQMPCLKMPKVALKGPQVDVKGPKLDLKGPKADVMTPVVEVSLPSMEVDVEAPGAKLDSVRLEGDLSLADKDMTAKDSKFKMPKFKMPSFGVSAPGKSIEASLDVSALKVEADVSLPSMQGDLKTTHLSIQPPSADLEVQAGQEDVKLPEGPVHEGAGLKGHLPKLQMPSFKVPKVDLKGPQIDVNVPKLDLKGPKVEVTSPNLDVSLPSMEVDIQAPGAKLDSTRLEGDLSLADKDVTAKDSKFKMPKFKMPSFGMLSPGKSIEVSVDVSAPKMEADMSIPSMQGDLKTTDLRIQAPSADLEVQAGQVDLKLPEGHMPEVAGLKGHLPKVEMPSFKMPKVDLKGPQVDVKGPKLDLKGPKAEVMAPDVEVSLPSVETDVQAPGSMLDGARLEGDLSLAHEDVAGKDSKFQGPKLSTSGFEWSSKKVSMSSSEIEGNVTFHEKTSTFPIVESVVHEGDLHDPSRDGNLGLAVGEVGMDSKFKKLHFKVPKVSFSSTKTPKDSLVPGAKSSIGLSTIPLSSSECSSFELQQVSACSEPSMQMPKVGFAGFPSSRLDLTGPHFESSILSPCEDVTLTKYQVTVPRAALAPELALEIPSGSQADIPLPKTECSTDLQPPEGVPTSQAESHSGPLNSMIPVSLGQVSFPKFYKPKFVFSVPQMAVPEGDLHAAVGAPVMSPLSPGERVQCPLPSTQLPSPGTCVSQGPEELVASLQTSVVAPGEAPSEDADHEGKGSPLKMPKIKLPSFRWSPKKETGPKVDPECSVEDSKLSLVLDKDEVAPQSAIHMDLPPERDGEKGRSTKPGFAMPKLALPKMKASKSGVSLPQRDVDPSLSSATAGGSFQDTEKASSDGGRGGLGATASATGSEGVNLHRPQVHIPSLGFAKPDLRSSKAKVEVSQPEADLPLPKHDLSTEGDSRGCGLGDVPVSQPCGEGIAPTPEDPLQPSCRKPDAEVLTVESPEEEAMTKYSQESWFKMPKFRMPSLRRSFRDRGGAGKLEVAQTQAPAATGGEAAAKVKEFLVSGSNVEAAMSLQLPEADAEVTASESKSSTDILRCDLDSTGLKLHLSTAGMTGDELSTSEVRIHPSKGPLPFQMPGMRLPETQVLPGEIDETPLSKPGHDLASMEDKTEKWSSQPEGPLKLKASSTDMPSQISVVNVDQLWEDSVLTVKFPKLMVPRFSFPAPSSEDDVFIPTVREVQCPEANIDTALCKESPGLWGASILKAGAGVPGEQPVDLNLPLEAPPISKVRVHIQGAQVESQEVTIHSIVTPEFVDLSVPRTFSTQIVRESEIPTSEIQTPSYGFSLLKVKIPEPHTQARVYTTMTQHSRTQEGTEEAPIQATPGVDSISGDLQPDTGEPFEMISSSVNVLGQQTLTFEVPSGHQLADSCSDEEPAEILEFPPDDSQEATTPLADEGRAPKDKPESKKSGLLWFWLPNIGFSSSVDETGVDSKNDVQRSAPIQTQPEARPEAELPKKQEKAGWFRFPKLGFSSSPTKKSKSTEDGAELEEQKLQEETITFFDARESFSPEEKEEGELIGPVGTGLDSRVMVTSAARTELILPEQDRKADDESKGSGLGPNEG

SEQ ID NO: 17670 - protein, 34 aa, Artificial Sequence
  Synthetic polypeptide
VVAPAPHLLAGSPWCPAVSCSPGSQVQKRKMTTL

SEQ ID NO: 17671 - protein, 29 aa, Artificial Sequence
  Synthetic polypeptide
LPQLHTYWLGPLGVRPSAAARGARCRNGR

SEQ ID NO: 17672 - protein, 516 aa, Artificial Sequence
  Synthetic polypeptide
NGQSGDSLHVHQQQKGSAGCDPCLYIPRFAHLLEFGEKNHEVSMTALRLLQRMKRDWMHTGRRPSGLCGAALLVAARMHDFRRTVKEVISVVKVCESTLRKRLTEFEDTPTSQLTIDEFMKIDLEEECDPPSYTAGQRKLRMKQLEQVLSKKLEEVEGEISSYQDAIEIELENSRPKAKGGLASLAKDGSTEDTASSLCGEEDTEDEELEAAASHLNKDLYRELLGGAPGSSEAAGSPEWGGRPPALGSLLDPLPTAASLGISDSIRECISSQSSDPKDASGDGELDLSGIDDLEIDRYILNESEARVKAELWMRENAEYLREQREKEARIAKEKELGIYKEHKPKKSCKRREPIQASTAREAIEKMLEQKKISSKINYSVLRGLSSAGGGSPHREDAQPEHSASARKLSRRRTPASRSGADPVTSVGKRLRPLVSTQPAKKVATGEALLPSSPTLGAEPARPQAVLVESGPVSYHADEEADEEEPDEEDGEPCVSALQMMGSNDYGCDGDEDDGY

SEQ ID NO: 17673 - protein, 43 aa, Artificial Sequence
  Synthetic polypeptide
MARVETAYMSISNRKDQQVVTRACIFHALRTCWNSGRRTTRCP

SEQ ID NO: 17674 - protein, 538 aa, Artificial Sequence
  Synthetic polypeptide
NGQSGDSLHVHQQQKGSAGCDPCLYIPRFAHLLEFGEKNHEVSMTALRLLQRMKRDWMHTGRRPSGLCGAALLVAARMHDFRRTVKEVISVVKVCESTLRKRLTEFEDTPTSQLTIDEFMKIDLEEECDPPSYTAGQRKLRMKQLEQVLSKKLEEVEGEISSYQDAIEIELENSRPKAKGGLASLAKDGSTEDTASSLCGEEDTEDEELEAAASHLNKDLYRELLGGAPGSSEAAGSPEWGGRPPALGSLLDPLPTAASLGISDSIRECISSQSSDPKDASGDGELDLSGIDDLEIDRRDLSMPRCAKAKSQPHFPVLAQYILNESEARVKAELWMRENAEYLREQREKEARIAKEKELGIYKEHKPKKSCKRREPIQASTAREAIEKMLEQKKISSKINYSVLRGLSSAGGGSPHREDAQPEHSASARKLSRRRTPASRSGADPVTSVGKRLRPLVSTQPAKKVATGEALLPSSPTLGAEPARPQAVLVESGPVSYHADEEADEEEPDEEDGEPCVSALQMMGSNDYGCDGDEDDGY

SEQ ID NO: 17675 - protein, 170 aa, Artificial Sequence
  Synthetic polypeptide
NGQSGDSLHVHQQQKGSAGCDPCLYIPRFAHLLEFGEKNHEVSMTALRLLQRMKRDWMHTGRRPSGLCGAALLVAARMHDFRRTVKEVISVVKVCESTLRKRLTEFEDTPTSQLTIDEFMKIDLEEECDPPSYTAGQRKLRMKQLEQVLSKKLEEVEGEISSYQDAIEIE

SEQ ID NO: 17676 - protein, 58 aa, Artificial Sequence
  Synthetic polypeptide
AALVTKAKIQNQPKHPSADAQEEEEKRRRRRRRKRNKKRERQRHQSVRATPSLLASTC

SEQ ID NO: 17677 - protein, 77 aa, Artificial Sequence
  Synthetic polypeptide
SQKPRYRTNLSTPQQMHRKRRRREEEGEGERGTRRERDKDTRVSEPHPASWRLPANPCSAGPVAPGQSHLHLLRGGQ

SEQ ID NO: 17678 - protein, 302 aa, Artificial Sequence
  Synthetic polypeptide
APLSRCTGRGGEEKKKEKEKEEQEERETKTPECPSHTQPLGVYLLTPAVQDLWLRDKATFTCFVVGSDLKDAHLTWEVAGKVPTGGVEEGLLERHSNGSQSQHSRLTLPRSLWNAGTSVTCTLNHPSLPPQRLMALREPAAQAPVKLSLNLLASSDPPEAASWLLCEVSGFSPPNILLMWLEDQREVNTSGFAPARPPPQPGSTTFWAWSVLRVPAPPSPQPATYTCVVSHEDSRTLLNASRSLEVSYLAMTPLIPQSKDENSDDYTTFDDVGSLWTALSTFVALFILTLLYSGIVTFIKVK

SEQ ID NO: 17679 - protein, 129 aa, Artificial Sequence
  Synthetic polypeptide
RLGVEWRKGERKEGGRRSCKRTRENVEGVQCEVQLVESGGGLVQPGGSLRLSCAASGFTFSNSDMNWVHQAPGKGLEWVSGVSWNGSRTHYADSVKGRFIISRDNSRNTLYLQTNSLRAEDTAVYYCVR

SEQ ID NO: 17680 - protein, 50 aa, Artificial Sequence
  Synthetic polypeptide
YEGWELNGEKVSEKREDGGVAREQEKMLRVSSVRCSWWSLGEAWYSLGDP

SEQ ID NO: 17681 - protein, 110 aa, Artificial Sequence
  Synthetic polypeptide
YMAEALHGKRVLSQVQLQESGPGLVKPSETLSLTCTVSGGSISSYYWSWIRQPAGKGLEWIGRIYTSGSTNYNPSLKSRVTMSVDTSKNQFSLKLSSVTAADTAVYYCAR

SEQ ID NO: 17682 - protein, 28 aa, Artificial Sequence
  Synthetic polypeptide
LNDDTWLKHCMENGSCPRCSCRSRAQDW

SEQ ID NO: 17683 - protein, 39 aa, Artificial Sequence
  Synthetic polypeptide
SIAWKTGPVPGAAAGVGPRTGEAFGDPVPHLHCLWWLHQ

SEQ ID NO: 17684 - protein, 110 aa, Artificial Sequence
  Synthetic polypeptide
YMAEALHGKRVLSQVQLQQWGAGLLKPSETLSLTCAVYGGSFSGYYWSWIRQPPGKGLEWIGEINHSGSTNYNPSLKSRVTISVDTSKNQFSLKLSSVTAADTAVYYCAR

SEQ ID NO: 17685 - protein, 28 aa, Artificial Sequence
  Synthetic polypeptide
LNDDTWLKHCMENGSCPRCSYSSGAQDC

SEQ ID NO: 17686 - protein, 62 aa, Artificial Sequence
  Synthetic polypeptide
SIAWKTGPVPGAATAVGRRTVEAFGDPVPHLRCLWWVLQWLLLELDPPAPREGAGVDWGNQS

SEQ ID NO: 17687 - protein, 9 aa, Artificial Sequence
  Synthetic polypeptide
SIAWKTCPV

SEQ ID NO: 17688 - protein, 110 aa, Artificial Sequence
  Synthetic polypeptide
YMAEALHGKRVQCEVQLVESGGGLVQPRGSLRLSCAASGFTVSSNEMSWIRQAPGKGLEWVSSISGGSTYYADSRKGRFTISRDNSKNTLYLQMNNLRAEGTAVYYCARY

SEQ ID NO: 17689 - protein, 34 aa, Artificial Sequence
  Synthetic polypeptide
LNDDTWLKHCMENVSSVRCSWWSLGEAWYSLGGP

SEQ ID NO: 17690 - protein, 112 aa, Artificial Sequence
  Synthetic polypeptide
YMAEALHGKRVLSQLQLQESGPGLVKPSETLSLTCTVSGGSISSSSYYWGWIRQPPGKGLEWIGSIYYSGSTYYNPSLKSRVTISVDTSKNQFSLKLSSVTAADTAVYYCAR

SEQ ID NO: 17691 - protein, 28 aa, Artificial Sequence
  Synthetic polypeptide
LNDDTWLKHCMENGSCPSCSCRSRAQDW

SEQ ID NO: 17692 - protein, 40 aa, Artificial Sequence
  Synthetic polypeptide
SIAWKTGPVPAAAAGVGPRTGEAFGDPVPHLHCLWWLHQQ

SEQ ID NO: 17693 - protein, 129 aa, Artificial Sequence
  Synthetic polypeptide
RSGVEWRKGERKEGGRRCKRIRENVEGVQCEVQLVESGGVVVQPGGSLRLSCAASGFTFDDYTMHWVRQAPGKGLEWVSLISWDGGSTYYADSVKGRFTISRDNSKNSLYLQMNSLRTEDTALYYCAKD

SEQ ID NO: 17694 - protein, 26 aa, Artificial Sequence
  Synthetic polypeptide
EKMLRVSSVKCSWWSLGESWYSLGGP

SEQ ID NO: 17695 - protein, 7 aa, Artificial Sequence
  Synthetic polypeptide
MEKRCPV

SEQ ID NO: 17696 - protein, 111 aa, Artificial Sequence
  Synthetic polypeptide
RSGVEWRKGVQCEVQLVESGGVVVQPGGSLRLSCAASGFTFDDYTMHWVRQAPGKGLEWVSLISWDGGSTYYADSVKGRFTISRDNSKNSLYLQMNSLRTEDTALYYCAKD

SEQ ID NO: 17697 - protein, 31 aa, Artificial Sequence
  Synthetic polypeptide
HEGRELNGEKVSSVKCSWWSLGESWYSLGGP

SEQ ID NO: 17698 - protein, 71 aa, Artificial Sequence
  Synthetic polypeptide
GLTWWLMPVNPALWEARWADHLRPLFSFWRPHYPIMSLCEDMLLCNYRKCRIKLSGYAWVTACSHIFCDQH

SEQ ID NO: 17699 - protein, 38 aa, Artificial Sequence
  Synthetic polypeptide
PDVVAHACKPSTLGGEVGRSPKASLQLLETSLSYYVFV

SEQ ID NO: 17700 - protein, 32 aa, Artificial Sequence
  Synthetic polypeptide
DLPSHVELISPVSRGASSRVAWGGPTPLFTLN

SEQ ID NO: 17701 - protein, 248 aa, Artificial Sequence
  Synthetic polypeptide
EVPFTLCHDCETSPAMWNSFPPFPEGHPAVLPGEDPPPYSPLTSPDSGSAPMITCRVCQSLINVEGKMHQHVVKCGVCNEATPIKNAPPGKKYVRCPCNCLLICKVTSQRIACPRPYCKRIINLGPVHPGPLSPEPQPMGVRVICGHCKNTFLWTEFTDRTLARCPHCRKVSSIGRRYPRKRCICCFLLGLLLAVTATGLAFGTWKHARRYGGIYAAWAFVILLAVLCLGRALYWACMKVSHPVQNFS

SEQ ID NO: 17702 - protein, 62 aa, Artificial Sequence
  Synthetic polypeptide
WFYQGFPLLHLPHSLLPPPSKKCLSPSAMIVRPPQPCGTHFPRFPRGIQPCCLGRTHPPIHP

SEQ ID NO: 17703 - protein, 41 aa, Artificial Sequence
  Synthetic polypeptide
VKRQNEAESGADLFHVADAAAGPGDGPGVGTSYGYSSLGGE

SEQ ID NO: 17704 - protein, 219 aa, Artificial Sequence
  Synthetic polypeptide
KGKMKLNLVQIFFMLLMLLLGLGMGLGLGLHMATAVLEESDQPLNEFWSSDSQDKAEATEEGDGTQTTETLVLSNKEVVQPGWPEDPILGEDEVGGNKMLRASALFQSNKDYLRLDQTDRECNDMMAHKMKEPSQSCIAQYAFIHEDLNTVKAVCNSPVIACELKGGKCHKSSRPFDLTLCELSQPDQVTPNCNYLTSVIKKHIIITCNDMKRQLPTGQ

SEQ ID NO: 17705 - protein, 36 aa, Artificial Sequence
  Synthetic polypeptide
PLFYLVIAAKCKNDDAGNSDTSKRTRKVLRLSEKAK

SEQ ID NO: 17706 - protein, 22 aa, Artificial Sequence
  Synthetic polypeptide
GQAQWLTPVIPALWEAESTGEG

SEQ ID NO: 17707 - protein, 24 aa, Artificial Sequence
  Synthetic polypeptide
SQHFGRPRALEKDERGKPEPRDGV

SEQ ID NO: 17708 - protein, 332 aa, Artificial Sequence
  Synthetic polypeptide
PGAVAHSCNPSTLGGREHWRRMKGANLSQGMEFELLGLTTDPQLQRLLFVVFLGMYTATLLGNLVMFLLIHVSATLHTPMYSLLKSLSFLDFCYSSTVVPQTLVNFLAKRKVISYFGCMTQMFFYAGFATSECYLIAAMAYDRYAAICNPLLYSTIMSPEVCASLIVGSYSAGFLNSLIHTGCIFSLKFCGAHVVTHFFCDGPPILSLSCVDTSLCEILLFIFAGFNLLSCTLTILISYFLILNTILKMSSAQGRFKAFSTCASHLTAICLFFGTTLFMYLRPRSSYSLTQDRTVAVIYTVVIPVLNPLMYSLRNKDVKKALIKVWGRKTME

SEQ ID NO: 17709 - protein, 35 aa, Artificial Sequence
  Synthetic polypeptide
ISWAWWCPPVVTVTLEAEAGESLEPGGRGFSEPRY

SEQ ID NO: 17710 - protein, 248 aa, Artificial Sequence
  Synthetic polypeptide
QLLSRLRQENRLNREVEVSVSQDINLAAEPKVNRGKAGVKRSAAEMYGSVTEHPSPSPLLSSSFDLDYDFQRDYYDRMYSYPARVPPPPPIARAVVPSKRQRVSGNTSRRGKSGFNSKSGQRGSSKSGKLKGDDLQAIKKELTQIKQKVDSLLENLEKIEKEQSKQAVEMKNDKSEEEQSSSSVKKDETNVKMESEGGADDSAEEGDLLDDDDNEDRGDDQLELIKDDEKEAEEGEDDRDSANGEDDS

SEQ ID NO: 17711 - protein, 11 aa, Artificial Sequence
  Synthetic polypeptide
AKILTWLQSQK

SEQ ID NO: 17712 - protein, 235 aa, Artificial Sequence
  Synthetic polypeptide
QLLSRLRQENRLNREVEVSVSQDINLAAEPKVNRGKAGVKRSAAEMYGSSFDLDYDFQRDYYDRMYSYPARVPPPPPIARAVVPSKRQRVSGNTSRRGKSGFNSKSGQRGSSKSGKLKGDDLQAIKKELTQIKQKVDSLLENLEKIEKEQSKQAVEMKNDKSEEEQSSSSVKKDETNVKMESEGGADDSAEEGDLLDDDDNEDRGDDQLELIKDDEKEAEEGEDDRDSANGEDDS

SEQ ID NO: 17713 - protein, 230 aa, Artificial Sequence
  Synthetic polypeptide
QLLSRLRQENRLNREVEVSVSQDINLAAEPKVNRGKAGVKRSAAEMYGSSFDLDYDFQRDYYDRMYSYPARVPPPPPIARAVVPSKRQRVSGNTSRRGKSGFNSKSGQRGSSKSGKLKGDDLQAIKKELTQIKQKVDSLLENLEKIEKEQSKQAVEMKNDKSEEEQSSSSVKKDETNVKMESEGGADDSAEEGDLLDDDDNEDRGDDQVKTTGKERKRWWRGAQGHMECL

SEQ ID NO: 17714 - protein, 173 aa, Artificial Sequence
  Synthetic polypeptide
QLLSRLRQENRLNREVEVSVSQDINLAAEPKVNRGKAGVKRSAAEMYGSVTEHPSPSPLLSSSFDLDYDFQRDYYDRMYSYPARVPPPPPIARAVVPSKRQRVSGNTSRRGKSGFNSKSGQRGSSKSGKLKGDDLQAIKKELTQIKQKVDSLLENLEKIEKEQSKQAAGVDQG

SEQ ID NO: 17715 - protein, 234 aa, Artificial Sequence
  Synthetic polypeptide
QLLSRLRQENRLNREVEVSVSQDINLAAEPKVNRGKAGVKRSAAEMYGSSFDLDYDFQRDYYDRMYSYPARVPPPPPIARAVVPSKRQRVSGNTSRRGKSGFNSKSGQRGSSKSGKLKGDDLQAIKKELTQIKQKVDSLLENLEKIEKEQSKQAEMKNDKSEEEQSSSSVKKDETNVKMESEGGADDSAEEGDLLDDDDNEDRGDDQLELIKDDEKEAEEGEDDRDSANGEDDS

SEQ ID NO: 17716 - protein, 247 aa, Artificial Sequence
  Synthetic polypeptide
QLLSRLRQENRLNREVEVSVSQDINLAAEPKVNRGKAGVKRSAAEMYGSVTEHPSPSPLLSSSFDLDYDFQRDYYDRMYSYPARVPPPPPIARAVVPSKRQRVSGNTSRRGKSGFNSKSGQRGSSKSGKLKGDDLQAIKKELTQIKQKVDSLLENLEKIEKEQSKQAEMKNDKSEEEQSSSSVKKDETNVKMESEGGADDSAEEGDLLDDDDNEDRGDDQLELIKDDEKEAEEGEDDRDSANGEDDS

SEQ ID NO: 17717 - protein, 89 aa, Artificial Sequence
  Synthetic polypeptide
QLLSRLRQENRLNREVEVSVSQDINLAAEPKVNRGKAGVKRSAAEMYGSVTEHPSPSPLLSVYQETLHEGAKVASILRVDSGDLPSLES

SEQ ID NO: 17718 - protein, 192 aa, Artificial Sequence
  Synthetic polypeptide
QLLSRLRQENRLNREVEVSVSQDINLAAEPKVNRGKAGVKRSAAEMYGSSFDLDYDFQRDYYDRMYSYPARVPPPPPIARAIKKELTQIKQKVDSLLENLEKIEKEQSKQAVEMKNDKSEEEQSSSSVKKDETNVKMESEGGADDSAEEGDLLDDDDNEDRGDDQLELIKDDEKEAEEGEDDRDSANGEDDS

SEQ ID NO: 17719 - protein, 204 aa, Artificial Sequence
  Synthetic polypeptide
QLLSRLRQENRLNREVEVSVSQDINLAAEPKVNRGKAGVKRSAAEMYGSSFDLDYDFQRDYYDRMYSYPARVPPPPPIARAVVPSKRQRVSGNTSRRGKSGFNSKSGQRGSSKSGKLKGDDLQAIKKELTQIKQKVDSLLENLEKIEKEQSKQAVEMKNDKSEEEQSSSSVKKDETNVKMESEGGADDSAEEGDLLDDDDNEDR

SEQ ID NO: 17720 - protein, 129 aa, Artificial Sequence
  Synthetic polypeptide
QLLSRLRQENRLNREVEVSVSQDINLAAEPKVNRGKAGVKRSAAEMYGSVTEHPSPSPLLSSSFDLDYDFQRDYYDRMYSYPARVPPPPPIARAVVPSKRQRVSGNTSRRGKSGFNSKSGQRGSSKSGK

SEQ ID NO: 17721 - protein, 117 aa, Artificial Sequence
  Synthetic polypeptide
QLLSRLRQENRLNREVEVSVSQDINLAAEPKVNRGKAGVKRSAAEMYGSVTEHPSPSPLLSSSFDLDYDFQRDYYDRMYSYPARVPPPPPIARAVVPSKRQRVSGNTSRRGKSGFNS

SEQ ID NO: 17722 - protein, 68 aa, Artificial Sequence
  Synthetic polypeptide
QLLSRLRQENRLNREVEVSVSQDINLAAEPKVNRGKAGVKRSAAEMYGSSFDLDYDFQRDYYDRMYSY

SEQ ID NO: 17723 - protein, 63 aa, Artificial Sequence
  Synthetic polypeptide
QLLSRLRQENRLNREVEVSVSQDINLAAEPKVNRGKAGVKRSAAEMYGSSFDLDYDFQRDYYD

SEQ ID NO: 17724 - protein, 59 aa, Artificial Sequence
  Synthetic polypeptide
QLLSRLRQENRLNREVEVSVSQDINLAAEPKVNRGKAGVKRSAAEMYGSSFDLDYDFQR

SEQ ID NO: 17725 - protein, 18 aa, Artificial Sequence
  Synthetic polypeptide
TQEAEVAVSRDGTAALQG

SEQ ID NO: 17726 - protein, 906 aa, Artificial Sequence
  Synthetic polypeptide
AEMALLHSRVDFDKDCEDPEYKPLQGPPKDQDDEGDPLMMMDEEISVIDGDEAQVTQQPGHLFWPPGSALTARLRRLVTAYQRSYKREQMKIEAAERGDRRRRRCEAAFKLKEIARREKQQRWTRREQTDFYRVVSTFGVEYDPDTMQFHWDRFRTFARLDKKTDESLTKYFHGFVAMCRQVCRLPPAAGDEPPDPNLFIEPITEERASRTLYRIELLRRLREQVLCHPLLEDRLALCQPPGPELPKWWEPVRHDGELLRGAARHGVSQTDCNIMQDPDFSFLAARMNYMQNHQAGAPAPSLSRCSTPLLHQQYTSRTASPLPLRPDAPVEKSPEETATQVPSLESLTLKLEHEVVARSRPTPQDYEMRVSPSDTTPLVSRSVPPVKLEDEDDSDSELDLSKLSPSSSSSSSSSSSSSSTDESEDEKEEKLTDQSRSKLYDEESLLSLTMSQDGFPNEDGEQMTPELLLLQERQRASEWPKDRVLINRIDLVCQAVLSGKWPSSRRSQEMVTGGILGPGNHLLDSPSLTPGEYGDSPVPTPRSSSAASMAEEEASAVSTAAAQFTKLRRGMDEKEFTVQIKDEEGLKLTFQKHKLMANGVMGDGHPLFHKKKGNRKKLVELEVECMEEPNHLDVDLETRIPVINKVDGTLLVGEDAPRRAELEMWLQGHPEFAVDPRFLAYMEDRRKQKWQRCKKNNKAELNCLGMEPVQTANSRNGKKGHHTETVFNRVLPGPIAPESSKKRARRMRPDLSKMMALMQGGSTGSLSLHNTFQHSSSGLQSVSSLGHSSATSASLPFMPFVMGGAPSSPHVDSSTMLHHHHHHPHPHHHHHHHPGLRAPGYPSSPVTTASGTTLRLPPLQPEEDDDEDEEDDDDLSQGYDSSERDFSLIDDPMMPANSDSSEDADD

SEQ ID NO: 17727 - protein, 59 aa, Artificial Sequence
  Synthetic polypeptide
SQLLGRLRQEKHLNPGGGGCSEPRWHCCTPGLTLIKIVKILNINHSKVPQRTKMMRVIP

SEQ ID NO: 17728 - protein, 144 aa, Artificial Sequence
  Synthetic polypeptide
LGCHRGAAGALLVYDITRRETFNHLTSWLEDARQHSSSNMVIMLIGNKSDLESRRDVKREEGEAFAREHGLIFMETSAKTACNVEEAFINTAKEIYRKIQQGLFDVHNEANGIKIGPQQSISTSVGPSASQRNSRDIGSNSGCC

SEQ ID NO: 17729 - protein, 25 aa, Artificial Sequence
  Synthetic polypeptide
DWGATGEQLEHCWCTTLQGVKPSTT

SEQ ID NO: 17730 - protein, 19 aa, Artificial Sequence
  Synthetic polypeptide
TGVPQGSSWSTAGVRHYKA

SEQ ID NO: 17731 - protein, 112 aa, Artificial Sequence
  Synthetic polypeptide
GKNHGKGAQDAGESGMAQTVTQSQPEMSVQEAETVTLSCTYDTSENNYYLFWYKQPPSRQMILVIRQEAYKQQNATENRFSVNFQKAAKSFSLKISDSQLGDTAMYFCAFMK

SEQ ID NO: 17732 - protein, 86 aa, Artificial Sequence
  Synthetic polypeptide
ETKQQSMTFCGHSTRKRKKASDVHEYNFLNTLLMPTSQAGRRALHMRAAHPKGRIMGKGHKMLENPAWPRQSLSLNQRCLCRRQRL

SEQ ID NO: 17733 - protein, 63 aa, Artificial Sequence
  Synthetic polypeptide
THCSCPRPKQEGGHCTCGQPILREESWERGTRCWRIRHGPDSHSVSTRDVCAGGRDCDPELHI

SEQ ID NO: 17734 - protein, 20 aa, Artificial Sequence
  Synthetic polypeptide
ARIAPLHSSLARVHSLNFLD

SEQ ID NO: 17735 - protein, 21 aa, Artificial Sequence
  Synthetic polypeptide
GGGCSEPELHHCTPAWQEFTL

SEQ ID NO: 17736 - protein, 28 aa, Artificial Sequence
  Synthetic polypeptide
THEAEVAVSPNCTIALQPGKSSLFEFPG

SEQ ID NO: 17737 - protein, 53 aa, Artificial Sequence
  Synthetic polypeptide
AEIVPLHFSLVCLRIQINPQNKADFQGISPERAFADFLFASTILHLVVMNFVG

SEQ ID NO: 17738 - protein, 33 aa, Artificial Sequence
  Synthetic polypeptide
SQLLGRLRQNRLNPGGGGCSEPRSCHCTSAWFA

SEQ ID NO: 17739 - protein, 43 aa, Artificial Sequence
  Synthetic polypeptide
TREVEVVVSRDRAIALQLGLPENTDQPTEQSGFPRHLPRASLC

SEQ ID NO: 17740 - protein, 35 aa, Artificial Sequence
  Synthetic polypeptide
AEIVPLHFSLVCLRIQINPQNKADFQGISPERAFA

SEQ ID NO: 17741 - protein, 72 aa, Artificial Sequence
  Synthetic polypeptide
AEIAPLHSSLATERDKTPSQKKKSRCHATKEVRETVGRVGPERVTLCPWGPQTKRQYACPLQAPAPAGPGCR

SEQ ID NO: 17742 - protein, 350 aa, Artificial Sequence
  Synthetic polypeptide
SHLLGRLKQENHLNLGGKGCSELRSRHCTPAWQQSETRLHLKKKKADATLLKKSEKLLAELDRSGLPSAPGAPRRRGSMPVPYKHQLRRAQAVDELDWPPQASSSGSSDSLGSGEAAPAQKDGIFKVMLVGESGVGKSTLAGTFGGLQGDSAHEPENPEDTYERRIMVDKEEVTLVVYDIWEQGDAGGWLRDHCLQTGDAFLIVFSVTDRRSFSKVPETLLRLRAGRPHHDLPVILVGNKSDLARSREVSLEEGRHLAGTLSCKHIETSAALHHNTRELFEGAVRQIRLRRGRNHAGGQRPDPGSPEGPAPPARRESLTKKAKRFLANLVPRNAKFFKQRSRSCHDLSVL

SEQ ID NO: 17743 - protein, 27 aa, Artificial Sequence
  Synthetic polypeptide
DRATALQPGNRARQDSISKKKKQMPRY

SEQ ID NO: 17744 - protein, 231 aa, Artificial Sequence
  Synthetic polypeptide
SHLLGRLKQENHLNLGGKGCSELRSRHCTPAWQQSETRLHLKKKKADATLLKKSEKLLAELDRSGLPSAPGAPRRRGSMPVPYKHQLRRAQAVDELDWPPQASSSGSSDSLGSGEAAPAQKDGIFKVMLVGESGVGKSTLAGTFGGLQGDSAHEPENPGGCRRVAAGPLPSDRGRLSHRLLSHRPTEFLQSSRDPTSAPGWEAAPRPTRYPRWKQERLGPLPGGITGGCVS

SEQ ID NO: 17745 - protein, 379 aa, Artificial Sequence
  Synthetic polypeptide
PMWRNPVSAKNTTLASRSRDRDRYRRRNSRSRSPGRQCRHRSRSWDRRHGSESRSRDHRREDRVHYRSPPLATGYRYGHSKSPHFREKSPVREPVDNLSPEERDARTVFCMQLAARIRPRDLEDFFSAVGKVRDVRIISDRNSRRSKGIAYVEFCEIQSVPLAIGLTGQRLLGVPIIVQASQAEKNRLAAMANNLQKGNGGPMRLYVGSLHFNITEDMLRGIFEPFGKIDNIVLMKDSDTGRSKGYGFITFSDSECARRALEQLNGFELAGRPMRVGHVTERLDGGTDITFPDGDQELDLGSAGGRFQLMAKLAEGAGIQLPSTAAAAAAAAAQAAALQLNGAVPLGALNPAALTALSPALNLASQCFQLSSLFTPQTM

SEQ ID NO: 17746 - protein, 83 aa, Artificial Sequence
  Synthetic polypeptide
PVVVEIGIGIDGEIVGAEVQVGSVVTVAVAGIVDMVVSREVGTIVVRIVCITGVLHLPLVIGMDTVRVLISERRAQSGSQLII

SEQ ID NO: 17747 - protein, 7 aa, Artificial Sequence
  Synthetic polypeptide
KYNISQS

SEQ ID NO: 17748 - protein, 361 aa, Artificial Sequence
  Synthetic polypeptide
PMWRNPVSAKNTTLASRSRDRDRYRRRNSRSRSPGRQCRHRSRSWDRRHGSESRSRDHRREDRVHYRSPPLATGEPVDNLSPEERDARTVFCMQLAARIRPRDLEDFFSAVGKVRDVRIISDRNSRRSKGIAYVEFCEIQSVPLAIGLTGQRLLGVPIIVQASQAEKNRLAAMANNLQKGNGGPMRLYVGSLHFNITEDMLRGIFEPFGKIDNIVLMKDSDTGRSKGYGFITFSDSECARRALEQLNGFELAGRPMRVGHVTERLDGGTDITFPDGDQELDLGSAGGRFQLMAKLAEGAGIQLPSTAAAAAAAAAQAAALQLNGAVPLGALNPAALTALSPALNLASQCFQLSSLFTPQTM

SEQ ID NO: 17749 - protein, 65 aa, Artificial Sequence
  Synthetic polypeptide
PVVVEIGIGIDGEIVGAEVQVGSVVTVAVAGIVDMVVSREVGTIVVRIVCITGVLHLPLGSQLII

SEQ ID NO: 17750 - protein, 84 aa, Artificial Sequence
  Synthetic polypeptide
PMWRNPVSAKNTTLASRSRDRDRYRRRNSRSRSPGRQCRHRSRSWDRRHGSESRSRDHRREDRVHYRSPPLATGEPVDNLSPEE

SEQ ID NO: 17751 - protein, 57 aa, Artificial Sequence
  Synthetic polypeptide
PMWRNPVSAKNTTLASRSRDRDRYRRRNSRSRSPGRQCRHRSRSWDRRHGSESRSRD

SEQ ID NO: 17752 - protein, 42 aa, Artificial Sequence
  Synthetic polypeptide
PVVVEIGIGIDGEIVGAEVQVGSVVTVAVAGIVDMVVSREVG

SEQ ID NO: 17753 - protein, 56 aa, Artificial Sequence
  Synthetic polypeptide
PMWRNPVSAKNTTLASRSRDRDRYRRRNSRSRSPGRQCRHRSRSWDRRHGSESRSR

SEQ ID NO: 17754 - protein, 41 aa, Artificial Sequence
  Synthetic polypeptide
PVVVEIGIGIDGEIVGAEVQVGSVVTVAVAGIVDMVVSREV

SEQ ID NO: 17755 - protein, 47 aa, Artificial Sequence
  Synthetic polypeptide
PMWRNPVSAKNTTLASRSRDRDRYRRRNSRSRSPGRQCRHRSRSWDR

SEQ ID NO: 17756 - protein, 32 aa, Artificial Sequence
  Synthetic polypeptide
PVVVEIGIGIDGEIVGAEVQVGSVVTVAVAGI

SEQ ID NO: 17757 - protein, 32 aa, Artificial Sequence
  Synthetic polypeptide
PMWRNPVSAKNTTLASRSRDRDRYRRRNSRSR

SEQ ID NO: 17758 - protein, 18 aa, Artificial Sequence
  Synthetic polypeptide
PVVVEIGIGIDGEIVGAE

SEQ ID NO: 17759 - protein, 22 aa, Artificial Sequence
  Synthetic polypeptide
PMWRNPVSAKNTTLASRSRDRD

SEQ ID NO: 17760 - protein, 7 aa, Artificial Sequence
  Synthetic polypeptide
PVVVEIG

SEQ ID NO: 17761 - protein, 18 aa, Artificial Sequence
  Synthetic polypeptide
SLEVKSLRPAWPTWILCG

SEQ ID NO: 17762 - protein, 34 aa, Artificial Sequence
  Synthetic polypeptide
DQPGQHGFCVDEGSATARSRGAAQKEMFHSALLL

SEQ ID NO: 17763 - protein, 219 aa, Artificial Sequence
  Synthetic polypeptide
GQEFETSLANMDFVWMRARLQQEVEEQLKKKCFTLLCYYDPNSDADSETVKAAKVWKLAEVLVGEQQQCQDAKSQQKEQMLLLEKKSAAYSQVLLRCLTLLQRLLQEHRLKTQSELDRINAQYLEVKCGAMILKLRMEELKILSDTYTVEKVEVHRLIRDRLEGAIHLQEQDMENSRQVLNSYEVLGEEFDRLVKEYTVLKQATENKRWALQEFSKVYR

SEQ ID NO: 17764 - protein, 84 aa, Artificial Sequence
  Synthetic polypeptide
GQEFETSLANMDFVWMRARLQQEVEEQLKKKCFTLLCYYDPNSGASPLPHFAAEASSRTPAEDSIRARPHQCPVPGSQVRCYDP

SEQ ID NO: 17765 - protein, 135 aa, Artificial Sequence
  Synthetic polypeptide
GQEFETSLANMDFVWMRARLQQEVEEQLKKKCFTLLCYYDPNSDADSETVKAAKVWKLAEVLVGEQQQCQDAKSQQKEQMLLLEKKSAAYSQVLLRCLTLLQRLLQEHRLKTQSELDRINAQYLEVKCGAMILKL

SEQ ID NO: 17766 - protein, 53 aa, Artificial Sequence
  Synthetic polypeptide
GQEFETSLANMDFVWMRARLQQEVEEQLKKKCFTLLCYYDPNSGASPLPHFAA

SEQ ID NO: 17767 - protein, 43 aa, Artificial Sequence
  Synthetic polypeptide
GQEFETSLANMDFVWMRARLQQEVEEQLKKKCFTLLCYYDPNS

SEQ ID NO: 17768 - protein, 11 aa, Artificial Sequence
  Synthetic polypeptide
DQPGQHGFCVD

SEQ ID NO: 17769 - protein, 16 aa, Artificial Sequence
  Synthetic polypeptide
GQEFETSLANMDFVWM

SEQ ID NO: 17770 - protein, 68 aa, Artificial Sequence
  Synthetic polypeptide
ASECQGPYLRLSPGFLRHLYQVQQRHLWAEQCLPGPGQPLPHPVLCLLLLWANFALQGFLQCQWLCVL

SEQ ID NO: 17771 - protein, 229 aa, Artificial Sequence
  Synthetic polypeptide
CSLFSPTETKHLNARDHIFDFLQVSLGTCIKCNKGIYGQSNACQALDSLYHTQCFVCCSCGRTLRCKAFYSVNGSVYCEEDYLFSGFQEAAEKCCVCGHLILEKILQAMGKSYHPGCFRCIVCNKCLDGIPFTVDFSNQVYCVTDYHKNYAPKCAACGQPILPSEGCEDIVRVISMDRDYHFECYHCEDCRMQLSDEEGCCCFPLDGHLLCHGCHMQRLNARQPPANYI

SEQ ID NO: 17772 - protein, 9 aa, Artificial Sequence
  Synthetic polypeptide
PTWPLLRGQ

SEQ ID NO: 17773 - protein, 119 aa, Artificial Sequence
  Synthetic polypeptide
SQHFGSPRRADPQRSGVQDQPDQHGLYYVDSEGNRISGATFSVGSGSVYAYGVMDRGYSYDLEVEQAYDLARRAIYQATYRDAYSGGAVNLYHVREDGWIRVSSDNVADLHEKYSGSTP

SEQ ID NO: 17774 - protein, 51 aa, Artificial Sequence
  Synthetic polypeptide
PGEVAHACNPSTLGVREGQIPRGQEFKTSLTNMASTTWTVKGTGFQGPPSL

SEQ ID NO: 17775 - protein, 31 aa, Artificial Sequence
  Synthetic polypeptide
SQHFGSPRRADPQRSGVQDQPDQHGLYYVDS

SEQ ID NO: 17776 - protein, 40 aa, Artificial Sequence
  Synthetic polypeptide
PGEVAHACNPSTLGVREGQIPRGQEFKTSLTNMASTTWTV

SEQ ID NO: 17777 - protein, 43 aa, Artificial Sequence
  Synthetic polypeptide
SQHFGSPRRADPQRSGVQDQPDQHGLYYVDSEGNRISGATFSV

SEQ ID NO: 17778 - protein, 39 aa, Artificial Sequence
  Synthetic polypeptide
GRAWWLTPVIPALWEAETVDHEVRRSRPSWLTRPLLRGQ

SEQ ID NO: 17779 - protein, 96 aa, Artificial Sequence
  Synthetic polypeptide
QGLYYVDSEGNRISGATFSVGSGSVYAYGVMDRGYSYDLEVEQAYDLARRAIYQATYRDAYSGGAVNLYHVREDGWIRVSSDNVADLHEKYSGSTP

SEQ ID NO: 17780 - protein, 34 aa, Artificial Sequence
  Synthetic polypeptide
DSGSRGQEIETILANKASTTWTVKGTGFQGPPSL

SEQ ID NO: 17781 - protein, 8 aa, Artificial Sequence
  Synthetic polypeptide
QGLYYVDS

SEQ ID NO: 17782 - protein, 23 aa, Artificial Sequence
  Synthetic polypeptide
DSGSRGQEIETILANKASTTWTV

SEQ ID NO: 17783 - protein, 20 aa, Artificial Sequence
  Synthetic polypeptide
QGLYYVDSEGNRISGATFSV

SEQ ID NO: 17784 - protein, 62 aa, Artificial Sequence
  Synthetic polypeptide
GQAWWLTPVIPALWEANAGRSLEESTSGWSQRMHLRISRNLTSASSHWLSFRAPLPMEAGTF

SEQ ID NO: 17785 - protein, 25 aa, Artificial Sequence
  Synthetic polypeptide
SQHFGRPMQADHLRRVLLAGAKECI

SEQ ID NO: 17786 - protein, 68 aa, Artificial Sequence
  Synthetic polypeptide
LWYLLVINHWCRWQPGALGSMGTSCWQGTARRLSPFRWTKRKCWHCWKRCCSPTCPCQPLEDMPSQPS

SEQ ID NO: 17787 - protein, 40 aa, Artificial Sequence
  Synthetic polypeptide
EHLGFCPDSGTSWLSTTGAGGSLVHWGVWGPPAGRELRGD

SEQ ID NO: 17788 - protein, 336 aa, Artificial Sequence
  Synthetic polypeptide
AQSPVFKNIWAFVLTLVPPGYQPLVQVAAWCIGEYGDLLLAGNCEEIEPLQVDEEEVLALLEKVLQSHMSLPATRGYALTALMKLSTRLCGDNNRIRQVVSIYGSCLDVELQQRAVEYDTLFRKYDHMRAAILEKMPLVERDGPQADEEAKESKEAAQLSEAAPVPTEPQASQLLDLLDLLDGASGDVQHPPHLDPSPGGALVHLLDLPCVPPPPAPIPDLKVFEREGVQLNLSFIRPPENPALLLITITATNFSEGDVTHFICQAAVPKSLQLQLQAPSGNTVPARGGLPITQLFRILNPNKAPLRLKLRLTYDHFHQSVQEIFEVNNLPVESWQ

SEQ ID NO: 17789 - protein, 10 aa, Artificial Sequence
  Synthetic polypeptide
LVTVQWPCGH

SEQ ID NO: 17790 - protein, 525 aa, Artificial Sequence
  Synthetic polypeptide
PGCPSHDSSLCSGRVATNTDTSRNAGNAVLFETVLTIMDIRSAAGLRVLAVNILGRFLLNSDRNIRYVALTSLLRLVQSDHSAVQRHRPTVVECLRETDASLSRRALELSLALVNSSNVRAMMQELQAFLESCPPDLRADCASGILLAAERFAPTKRWHIDTILHVLTTAGTHVRDDAVANLTQLIGGAQELHAYSVRRLYNALAEDISQQPLVQVAAWCIGEYGDLLLAGNCEEIEPLQVDEEEVLALLEKVLQSHMSLPATRGYALTALMKLSTRLCGDNNRIRQVVSIYGSCLDVELQQRAVEYDTLFRKYDHMRAAILEKMPLVERDGPQADEEAKESKEAAQLSEAAPVPTEPQASQLLDLLDLLDGASGDVQHPPHLDPSPGGALVHLLDLPCVPPPPAPIPDLKVFEREGVQLNLSFIRPPENPALLLITITATNFSEGDVTHFICQAAVPKSLQLQLQAPSGNTVPARGGLPITQLFRILNPNKAPLRLKLRLTYDHFHQSVQEIFEVNNLPVESWQ

SEQ ID NO: 17791 - protein, 48 aa, Artificial Sequence
  Synthetic polypeptide
MGAPHMTRHCAVAVWPLTRTPAEMPEMRSCLRQYSPSWISALQLAYGF

SEQ ID NO: 17792 - protein, 108 aa, Artificial Sequence
  Synthetic polypeptide
TTLDTPSLRTVILTARVCNFILEILSVNVKSPALLLSQLLPYMENRRGAVILVSSIAAYNPVVALGVYNVSKTALLGLTRTLALELAPKDIRVNCVVPGIIKTDFSKV

SEQ ID NO: 17793 - protein, 13 aa, Artificial Sequence
  Synthetic polypeptide
YSPQGSATSFLKS

SEQ ID NO: 17794 - protein, 163 aa, Artificial Sequence
  Synthetic polypeptide
TTLDTPSLRTVILTARVCNFILEILSVNVKSPALLLSQLLPYMENRRGAVILVSSIAAYNPVVALGVYNVSKTALLGLTRTLALELAPKDIRVNCVVPGIIKTDFSKVFHGNESLWKNFKEHHQLQRIGESEDCAGIVSFLCSPDASYVNGENIAVAGYSTRL

SEQ ID NO: 17795 - protein, 183 aa, Artificial Sequence
  Synthetic polypeptide
TTLDTPSLRTVILTARVCNFILEILSVNVKSPALLLSQLLPYMENRRGAVILVSSIAAYNPVVALGVYNVSKTALLGLTRTLALELAPKDIRVNCVVPGIIKTDFSKVVRIGFMGMSLSGRTSRNIISCRGLGSQRTVQESCPSCALQMPATSTGRTLRWQATPLGSERSGGGCVAVVPGPGA

SEQ ID NO: 17796 - protein, 147 aa, Artificial Sequence
  Synthetic polypeptide
TTLDTPSLRTVILTARVCNFILEILSVNVKSPALLLSQLLPYMENRRGAVILVSSIAAYNPVVALGVYNVSKTALLGLTRTLALELAPKDIRFHGNESLWKNFKEHHQLQRIGESEDCAGIVSFLCSPDASYVNGENIAVAGYSTRL

SEQ ID NO: 17797 - protein, 144 aa, Artificial Sequence
  Synthetic polypeptide
TTLDTPSLRTVILTARVCNFILEILSVNVKSPALLLSQLLPYMENRRGAVILVSSIAAYNPVVALGVYNVSKTALLGLTRTLALELAPKDIRVNCVVPGIIKTDFSKVFHGNESLWKNFKEHHQLQRQVGFGDLVVHVWLGRGS

SEQ ID NO: 17798 - protein, 42 aa, Artificial Sequence
  Synthetic polypeptide
PRQHGSASPSPGVWPRTGPTWSSAAGSSRMWTRRWPRCRGRG

SEQ ID NO: 17799 - protein, 160 aa, Artificial Sequence
  Synthetic polypeptide
IAKTIQSKKNTAGGITLPDFKLLQGYSNQDSMDRLRHRPAFGPGQGPRGRQQPEAAECGPGGGHAAGGGAERDGHCVPCGEGGGPGAAGGHGCEASWRYRYPSLQCCCQPFLWKPNGCHRGGVGQALDGQGKRGKHERNPADKKVRRARGLCWHRVFPVL

SEQ ID NO: 17800 - protein, 180 aa, Artificial Sequence
  Synthetic polypeptide
PRQSKAKRTQLEASRYLTSNYCKATVTKTAWIGFAIARRLAQDRAHVVVSSRKQQNVDQAVATLQGEGLSVTGTVCHVGKAEDRERLVAMAVKLHGGIDILVSNAAVNPFFGSLMDVTEEVWDKLWMDKEKEESMKETLRIRRLGEPEDCAGIVSFLCSEDASYITGETVVVGGGTPSRL

SEQ ID NO: 17801 - protein, 129 aa, Artificial Sequence
  Synthetic polypeptide
IAKTIQSKKNTAGGITLPDFKLLQGYSNQDSMDRLRHRPAFGPGQGPRGRQQPEAAECGPGGGHAAGGGAERDGHCVPCGEGGGPGAAGGHGCEASWRYRYPSLQCCCQPFLWKPNGCHRGGVGQDSGH

SEQ ID NO: 17802 - protein, 230 aa, Artificial Sequence
  Synthetic polypeptide
PRQSKAKRTQLEASRYLTSNYCKATVTKTAWIGFAIARRLAQDRAHVVVSSRKQQNVDQAVATLQGEGLSVTGTVCHVGKAEDRERLVAMAVKLHGGIDILVSNAAVNPFFGSLMDVTEEVWDKTLDINVKAPALMTKAVVPEMEKRGGGSVVIVSSIAAFSPSPGFSPYNVSKTALLGLNNTLAIELAPRNIRVNCLHLDLSRLASAGWLGEPEDCAGIVSFLCSEDAS

SEQ ID NO: 17803 - protein, 220 aa, Artificial Sequence
  Synthetic polypeptide
PRQSKAKRTQLEASRYLTSNYCKATVTKTAWIGFAIARRLAQDRAHVVVSSRKQQNVDQAVATLQGEGLSVTGTVCHVGKAEDRERLVAMAVKLHGGIDILVSNAAVNPFFGSLMDVTEEVWDKTLDINVKAPALMTKAVVPEMEKRGGGSVVIVSSIAAFSPSPGFSPYNVSKTALLGLNNTLAIELAPRNIRVNCLHLDLSRLASAGCSGWTRKKRKA

SEQ ID NO: 17804 - protein, 99 aa, Artificial Sequence
  Synthetic polypeptide
IAKTIQSKKNTAGGITLPDFKLLQGYSNQDSMDRLRHRPAFGPGQGPRGRQQPEAAECGPGGGHAAGGGAERDGHCVPCGEGGGPGAAGGHGLQSLQCQ

SEQ ID NO: 17805 - protein, 145 aa, Artificial Sequence
  Synthetic polypeptide
PRQSKAKRTQLEASRYLTSNYCKATVTKTAWIGFAIARRLAQDRAHVVVSSRKQQNVDQAVATLQGEGLSVTGTVCHVGKAEDRERLVAMGFSPYNVSKTALLGLNNTLAIELAPRNIRVNCLHLDLSRLASAGCSGWTRKKRKA

SEQ ID NO: 17806 - protein, 145 aa, Artificial Sequence
  Synthetic polypeptide
IAKTIQSKKNTAGGITLPDFKLLQGYSNQDSMDRLRHRPAFGPGQGPRGRQQPEAAECGPGGGHAAGGGAERDGHCVPCGEGGGPGAAGGHGCEASWRYRYPSLQCCCQPFLWKPNGCHRGGVGQALDGQGKRGKHERNPADKKV

SEQ ID NO: 17807 - protein, 143 aa, Artificial Sequence
  Synthetic polypeptide
PRQSKAKRTQLEASRYLTSNYCKATVTKTAWIGFAIARRLAQDRAHVVVSSRKQQNVDQAVATLQGEGLSVTGTVCHVGKAEDRERLVAMAVKLHGGIDILVSNAAVNPFFGSLMDVTEEVWDKLWMDKEKEESMKETLRIRR

SEQ ID NO: 17808 - protein, 247 aa, Artificial Sequence
  Synthetic polypeptide
PRQSKAKRTQLEASRYLTSNYCKATVTKTAWIGFAIARRLAQDRAHVVVSSRKQQNVDQAVATLQGEGLSVTGTVCHVGKAEDRERLVAMAVKLHGGIDILVSNAAVNPFFGSLMDVTEEVWDKTLDINVKAPALMTKAVVPEMEKRGGGSVVIVSSIAAFSPSPGFSPYNVSKTALLGLNNTLAIELAPRNIRVNCLHLDLSRLASAGWLGEPEDCAGIVSFLCSEDASYITGETVVVGGGTPSRL

SEQ ID NO: 17809 - protein, 247 aa, Artificial Sequence
  Synthetic polypeptide
AQEFETSLGKMVDVFREDLCTKTENLLGSYFPKKISELDAFLKEPALNEANLSNLKAPLDIPVPDPVKEKEKEERKKQQEKEDKDEKKKGEDEDKGPPCGPVNCNEKIVVLLQRLKPEIKDVIEQLNLVTTWLQLQIPRIEDGNNFGVAVQEKVFELMTSLHTKLEGFHTQISKYFSERGDAVTKAAKQPHVGDYRQLVHELDEAEYRDIRLMVMEIRNAYAVLYDIILKNFEKLKKPRGETKGMIY

SEQ ID NO: 17810 - protein, 56 aa, Artificial Sequence
  Synthetic polypeptide
VIPALWEAEARGSLEPRSLRPAWARWWMCFVKTSVPRQRTCSGAISPRRFLSWMHF

SEQ ID NO: 17811 - protein, 11 aa, Artificial Sequence
  Synthetic polypeptide
DQPGQDGGCVS

SEQ ID NO: 17812 - protein, 248 aa, Artificial Sequence
  Synthetic polypeptide
AQEFETSLGKMVDVFREDLCTKTENLLGSYFPKKISELDAFLKEPALNEANLSNLKAPLDIPVPDPVKEKEKEERKKQQEKEDKDEKKKGEDEDKGPPCGPVNCNEKIVVLLQRLKPEIKDVIEQLNLVTTWLQLQIPRIEDGNNFGVAVQEKVFELMTSLHTKLEGFHTQISKYFSERGDAVTKAAKQPHVGDYRQLVHELDEAEYRDIRLMVMEIRNAYVRRQGQGRGGQRQLSQATHSLTLQARG

SEQ ID NO: 17813 - protein, 231 aa, Artificial Sequence
  Synthetic polypeptide
AQEFETSLGKMVDVFREDLCTKTENLLGSYFPKKISELDAFLKEPALNEANLSNLKAPLDIPVPDPVKEKEKEERKKQQEKEDKDEKKKGEDEDKGPPCGPVNCNEKIVVLLQRLKPEIKDVIEQLNLVTTWLQLQIPRIEDGNNFGVAVQEKVFELMTSLHTKLEGFHTQISKYFSERGDAVTKAAKQPHVGDYRQLVHELDEAEYRDIRLMVMEIRNAYVRRLCYMTSS

SEQ ID NO: 17814 - protein, 22 aa, Artificial Sequence
  Synthetic polypeptide
TQEAEVEGRRRKGQPLKKQYRN

SEQ ID NO: 17815 - protein, 74 aa, Artificial Sequence
  Synthetic polypeptide
SKHFGRPRRADHLRLGVRHQPDQHGESLSVLKTQKISQAWWHMPVIPAIWEAEAGELLEPRRRRLREEGERANP

SEQ ID NO: 17816 - protein, 32 aa, Artificial Sequence
  Synthetic polypeptide
GRARWLTPVIPALWEAEGRRRKGQPLKKQYRN

SEQ ID NO: 17817 - protein, 16 aa, Artificial Sequence
  Synthetic polypeptide
SQHFGRPREEGERANP

SEQ ID NO: 17818 - protein, 821 aa, Artificial Sequence
  Synthetic polypeptide
PGAVAHACNPSTLGGRGKKEKGPTPEEAIQKLKETEKILIKKQEFLEQKIQQELQTAKKYGTKNKRAALQALRRKKRFEQQLAQTDGTLSTLEFQREAIENATTNAEVLRTMELAAQSMKKAYQDMDIDKVDELMTDITEQQEVAQQISDAISRPMGFGDDVDEDELLEELEELEQEELAQELLNVGDKEEEPSVKLPSVPSTHLPAGPGSTALRMTVVGNPRSWSCQWLPILILLLGTGHGPGVEGVTHYKAGDPVILYVNKVGPYHNPQETYHYYQLPVCCPEKIRHKSLSLGEVLDGDRMAESLYEIRFRENVEKRILCHMQLSSAQVEQLRQAIEELYYFEFVVDDLPIRGFVGYMEESGFLPHSHKIGLWTHLDFHLEFHGDRIIFANVSVRDVKPHSLDGLRPDEFLGLTHTYSVRWSETSVERRSDRRRGDDGGFFPRTLEIHWLSIINSMVLVFLLVGFVAVILMRVLRNDLARYNLDEETTSAGSGDDFDQGDNGWKIIHTDVFRFPPYRGLLCAVLGVGAQFLALGTGIIVMALLGMFNVHRHGAINSAAILLYALTCCISGYVSSHFYRQIGGERWVWNIILTTSLFSVPFFLTWSVVNSVHWANGSTQALPATTILLLLTVWLLVGFPLTVIGGIFGKNNASPFDAPCRTKNIAREIPPQPWYKSTVIHMTVGGFLPFSAISVELYYIFATVWGREQYTLYGILFFVFAILLSVGACISIALTYFQLSGEDYRWWWRSVLSVGSTGLFIFLYSVFYYARRSNMSGAVQTVEFFGYSLLTGYVFFLMLGTISFFSSLKFIRYIYVNLKMD

SEQ ID NO: 17819 - protein, 228 aa, Artificial Sequence
  Synthetic polypeptide
PGAVAHACNPSTLGGRGKKEKGPTPEEAIQKLKETEKILIKKQEFLEQKIQQELQTAKKYGTKNKRAALQALRRKKRFEQQLAQTDGTLSTLEFQREAIENATTNAEVLRTMELAAQSMKKAYQDMDIDKVDELMTDITEQQEVAQQISDAISRPMGFGDDVDEDELLEELEELEQEELAQELLNVGDKEEEPSVKLPSVPSTHLPAGPAPKVDEDEEALKQLAEWVS

SEQ ID NO: 17820 - protein, 129 aa, Artificial Sequence
  Synthetic polypeptide
PGAVAHACNPSTLGGRGKKEKGPTPEEAIQKLKETEKILIKKQEFLEQKIQQELQTAKKYGTKNKRAALQALRRKKRFEQQLAQTDGTLSTLEFQREAIENATTNAEVLRTMELAAQSMKKAYQDMWGH

SEQ ID NO: 17821 - protein, 209 aa, Artificial Sequence
  Synthetic polypeptide
PGAVAHACNPSTLGGRGKKEKGPTPEEAIQKLKETEKILIKKQEFLEQKIQQELQTAKKYGTKNKRAALQALRRKKRFEQQLAQTDGTLSTLEFQREAIENATTNAEVLRTMELAAQSMKKAYQDMDIDKVDELMTDITEQQEVAQQISDAISRPMGFGDDVDEDELLEELEELEQEELAQELLNVGDKEEEPSVKLPSVPSTHLPAGP

SEQ ID NO: 17822 - protein, 69 aa, Artificial Sequence
  Synthetic polypeptide
PGAVAHACNPSTLGGRGKKEKGPTPEEAIQKLKETEKILIKKQEFLEQKIQQELQTAKKYGTKNKRVSA

SEQ ID NO: 17823 - protein, 679 aa, Artificial Sequence
  Synthetic polypeptide
ARRGGSRLYSQHFGRPTWVDHEDELLEELEELEQEELAQELLNVGDKEEEPSVKLPSVPSTHLPAGPGSTALRMTVVGNPRSWSCQWLPILILLLGTGHGPGVEGVTHYKAGDPVILYVNKVGPYHNPQETYHYYQLPVCCPEKIRHKSLSLGEVLDGDRMAESLYEIRFRENVEKRILCHMQLSSAQVEQLRQAIEELYYFEFVVDDLPIRGFVGYMEESGFLPHSHKIGLWTHLDFHLEFHGDRIIFANVSVRDVKPHSLDGLRPDEFLGLTHTYSVRWSETSVERRSDRRRGDDGGFFPRTLEIHWLSIINSMVLVFLLVGFVAVILMRVLRNDLARYNLDEETTSAGSGDDFDQGDNGWKIIHTDVFRFPPYRGLLCAVLGVGAQFLALGTGIIVMALLGMFNVHRHGAINSAAILLYALTCCISGYVSSHFYRQIGGERWVWNIILTTSLFSVPFFLTWSVVNSVHWANGSTQALPATTILLLLTVWLLVGFPLTVIGGIFGKNNASPFDAPCRTKNIAREIPPQPWYKSTVIHMTVGGFLPFSAISVELYYIFATVWGREQYTLYGILFFVFAILLSVGACISIALTYFQLSGEDYRWWWRSVLSVGSTGLFIFLYSVFYYARRSNMSGAVQTVEFFGYSLLTGYVFFLMLGTISFFSSLKFIRYIYVNLKMD

SEQ ID NO: 17824 - protein, 28 aa, Artificial Sequence
  Synthetic polypeptide
PGAGAHACTRNTLGGRRGWIMRMNCWRS

SEQ ID NO: 17825 - protein, 86 aa, Artificial Sequence
  Synthetic polypeptide
ARRGGSRLYSQHFGRPTWVDHEDELLEELEELEQEELAQELLNVGDKEEEPSVKLPSVPSTHLPAGPAPKVDEDEEALKQLAEWVS

SEQ ID NO: 17826 - protein, 67 aa, Artificial Sequence
  Synthetic polypeptide
ARRGGSRLYSQHFGRPTWVDHEDELLEELEELEQEELAQELLNVGDKEEEPSVKLPSVPSTHLPAGP

SEQ ID NO: 17827 - protein, 24 aa, Artificial Sequence
  Synthetic polypeptide
ARRGGSRLYSQHFGRPTWVDHEGH

SEQ ID NO: 17828 - protein, 717 aa, Artificial Sequence
  Synthetic polypeptide
PGAGAHACTRNTLGGRRGWIMRDIDKVDELMTDITEQQEVAQQISDAISRPMGFGDDVDEDELLEELEELEQEELAQELLNVGDKEEEPSVKLPSVPSTHLPAGPGSTALRMTVVGNPRSWSCQWLPILILLLGTGHGPGVEGVTHYKAGDPVILYVNKVGPYHNPQETYHYYQLPVCCPEKIRHKSLSLGEVLDGDRMAESLYEIRFRENVEKRILCHMQLSSAQVEQLRQAIEELYYFEFVVDDLPIRGFVGYMEESGFLPHSHKIGLWTHLDFHLEFHGDRIIFANVSVRDVKPHSLDGLRPDEFLGLTHTYSVRWSETSVERRSDRRRGDDGGFFPRTLEIHWLSIINSMVLVFLLVGFVAVILMRVLRNDLARYNLDEETTSAGSGDDFDQGDNGWKIIHTDVFRFPPYRGLLCAVLGVGAQFLALGTGIIVMALLGMFNVHRHGAINSAAILLYALTCCISGYVSSHFYRQIGGERWVWNIILTTSLFSVPFFLTWSVVNSVHWANGSTQALPATTILLLLTVWLLVGFPLTVIGGIFGKNNASPFDAPCRTKNIAREIPPQPWYKSTVIHMTVGGFLPFSAISVELYYIFATVWGREQYTLYGILFFVFAILLSVGACISIALTYFQLSGEDYRWWWRSVLSVGSTGLFIFLYSVFYYARRSNMSGAVQTVEFFGYSLLTGYVFFLMLGTISFFSSLKFIRYIYVNLKMD

SEQ ID NO: 17829 - protein, 124 aa, Artificial Sequence
  Synthetic polypeptide
PGAGAHACTRNTLGGRRGWIMRDIDKVDELMTDITEQQEVAQQISDAISRPMGFGDDVDEDELLEELEELEQEELAQELLNVGDKEEEPSVKLPSVPSTHLPAGPAPKVDEDEEALKQLAEWVS

SEQ ID NO: 17830 - protein, 24 aa, Artificial Sequence
  Synthetic polypeptide
PGAGAHACTRNTLGGRRGWIMRDI

SEQ ID NO: 17831 - protein, 105 aa, Artificial Sequence
  Synthetic polypeptide
PGAGAHACTRNTLGGRRGWIMRDIDKVDELMTDITEQQEVAQQISDAISRPMGFGDDVDEDELLEELEELEQEELAQELLNVGDKEEEPSVKLPSVPSTHLPAGP

SEQ ID NO: 17832 - protein, 34 aa, Artificial Sequence
  Synthetic polypeptide
RARWLTSVIPALWEAEAGGSRDREFKTSLINMDK

SEQ ID NO: 17833 - protein, 109 aa, Artificial Sequence
  Synthetic polypeptide
STWTSEIEGANQLLELFDLFRYFVHREIYPGSKITHFERLQQKTGIPFSQMIFFDDERRNIVDVSKLGVTCIHIQNGMNLQTLSQGLETFAKAQTGPLRSSLEESPFEA

SEQ ID NO: 17834 - protein, 35 aa, Artificial Sequence
  Synthetic polypeptide
GAVAHVCNPSTLGGRGGWITRSGVQDQPDQHGQVR

SEQ ID NO: 17835 - protein, 55 aa, Artificial Sequence
  Synthetic polypeptide
STWTSEIEGANQLLELFDLFRCYLHSHPEWNESSNSKSRVRDICEGPNWAFEVQP

SEQ ID NO: 17836 - protein, 86 aa, Artificial Sequence
  Synthetic polypeptide
STWTSEIEGANQLLELFDLFRYFVHREIYPGSKITHFERLQQKTGIPFSQMIFFDDERRNIVDVSKLGVTCIHIQNGMNLQTLSQG

SEQ ID NO: 17837 - protein, 24 aa, Artificial Sequence
  Synthetic polypeptide
GRAQWLTPVIPALWEAEGGGSPEE

SEQ ID NO: 17838 - protein, 48 aa, Artificial Sequence
  Synthetic polypeptide
SQHFGRLKGVDHLRNDEKTAADYKILVMELYEIGGAKTSDCTQRCLRS

SEQ ID NO: 17839 - protein, 45 aa, Artificial Sequence
  Synthetic polypeptide
SQHFGRLKGVDHLRNDEKTAADYKILGGSVLHLVLALRGGGGLRQ

SEQ ID NO: 17840 - protein, 20 aa, Artificial Sequence
  Synthetic polypeptide
CRFFISQYSEGWHDHQLPIQ

SEQ ID NO: 17841 - protein, 641 aa, Artificial Sequence
  Synthetic polypeptide
SQLLGRLKQNCLNLGGRGCVALKRMLNFNVPHIKNSTGEPVWKVLIYDRFGQDIISPLLSVKELRDMGITLHLLLHSDRDPIPDVPAVYFVMPTEENIDRMCQDLRNQLYESYYLNFISAISRSKLEDIANAALAASAVTQVAKVFDQYLNFITLEDDMFVLCNQNKELVSYRAINRPDITDTEMETVMDTIVDSLFCFFVTLGAVPIIRCSRGTAAEMVAVKLDKKLRENLRDARNSLFTGDTLGAGQFSFQRPLLVLVDRNIDLATPLHHTWTYQALVHDVLDFHLNRVNLEESSGVENSPAGARPKRKNKKSYDLTPVDKFWQKHKGSPFPEVAESVQQELESYRAQEDEVKRLKSIMGLEGEDEGAISMLSDNTAKLTSAVSSLPELLEKKRLIDLHTNVATAVLEHIKARKLDVYFEYEEKIMSKTTLDKSLLDIISDPDAGTPEDKMRLFLIYYISTQQAPSEADLEQYKKALTDAGCNLNPLQYIKQWKAFTKMASAPASYGSTTTKPMGLLSRVMNTGSQFVMEGVKNLVLKQQNLPVTRILDNLMEMKSNPETDDYRYFDPKMLRGNDSSVPRNKNPFQEAIVFVVGGGNYIEYQNLVDYIKGKQGKHILYGCSELFNATQFIKQLSQLGQK

SEQ ID NO: 17842 - protein, 9 aa, Artificial Sequence
  Synthetic polypeptide
TWEAEVVWL

SEQ ID NO: 17843 - protein, 46 aa, Artificial Sequence
  Synthetic polypeptide
KYKISRAWQRMPVIPATREAEAELLEPGRQRLCGFEAYVEFQCASY

SEQ ID NO: 17844 - protein, 120 aa, Artificial Sequence
  Synthetic polypeptide
SQLLGRLKQNCLNLGGRGCVALKRMLNFNVPHIKNSTGEPVWKVLIYDRFGQDIISPLLSVKELRDMGITLHLFLTNISILLLWKMICLYYVIKIRSLFHIVPLTGQISQTRKWKLLWTL

SEQ ID NO: 17845 - protein, 47 aa, Artificial Sequence
  Synthetic polypeptide
SQLLGRLKQNCLNLGGRGCVALKRMLNFNVPHIKNSTGEPVWKAFTL

SEQ ID NO: 17846 - protein, 74 aa, Artificial Sequence
  Synthetic polypeptide
SQLLGRLKQNCLNLGGRGCVALKRMLNFNVPHIKNSTGEPVWKVLIYDRFGQDIISPLLSVKELRDMGITLHLH

SEQ ID NO: 17847 - protein, 162 aa, Artificial Sequence
  Synthetic polypeptide
SQLLGRLKQNCLNLGGRGCVALKRMLNFNVPHIKNSTGEPVWKVLIYDRFGQDIISPLLSVKELRDMGITLHLLLHSDRDPIPDVPAVYFVMPTEENIDRMCQDLRNQLYESYYLNFISAISRSKLEDIANAALAASAVTQVAKPLTGQISQTRKWKLLWTL

SEQ ID NO: 17848 - protein, 121 aa, Artificial Sequence
  Synthetic polypeptide
SQLLGRLKQNCLNLGGRGCVALKRMLNFNVPHIKNSTGEPVWKVLIYDRFGQDIISPLLSVKELRDMGITLHLLLHSDRDPIPDVPAVYFVMPTEENIDRMCQPLTGQISQTRKWKLLWTL

SEQ ID NO: 17849 - protein, 10 aa, Artificial Sequence
  Synthetic polypeptide
PSNPITGISI

SEQ ID NO: 17850 - protein, 25 aa, Artificial Sequence
  Synthetic polypeptide
FLKDLELEIPFDPAIPLLGFPFKQG

SEQ ID NO: 17851 - protein, 368 aa, Artificial Sequence
  Synthetic polypeptide
KYHLTQQSHYWDFHLNRVNLEESSGVENSPAGARPKRKNKKSYDLTPVDKFWQKHKGSPFPEVAESVQQELESYRAQEDEVKRLKSIMGLEGEDEGAISMLSDNTAKLTSAVSSLPELLEKKRLIDLHTNVATAVLEHIKARKLDVYFEYEEKIMSKTTLDKSLLDIISDPDAGTPEDKMRLFLIYYISTQQAPSEADLEQYKKALTDAGCNLNPLQYIKQWKAFTKMASAPASYGSTTTKPMGLLSRVMNTGSQFVMEGVKNLVLKQQNLPVTRILDNLMEMKSNPETDDYRYFDPKMLRGNDSSVPRNKNPFQEAIVFVVGGGNYIEYQNLVDYIKGKQGKHILYGCSELFNATQFIKQLSQLGQK

SEQ ID NO: 17852 - protein, 3 aa, Artificial Sequence
  Synthetic polypeptide
PGE

SEQ ID NO: 17853 - protein, 25 aa, Artificial Sequence
  Synthetic polypeptide
NPVSTKNTKISQGSNQQLRGTCTSL

SEQ ID NO: 17854 - protein, 515 aa, Artificial Sequence
  Synthetic polypeptide
WEWWLTPVIPPLWEAEADGPLEVRSSRPSQHGETLSLLKIQKLARGVISNSGGPVRVYSLPGRENYSSVDANGIQSQMLSRWSASFTVTKGKSSTQEATGQAVSTAHPPTGKRLKKTPEKKTGNKDCKADIAFLIDGSFNIGQRRFNLQKNFVGKVALMLGIGTEGPHVGLVQASEHPKIEFYLKNFTSAKDVLFAIKEVGFRGGNSNTGKALKHTAQKFFTVDAGVRKGIPKVVVVFIDGWPSDDIEEAGIVAREFGVNVFIVSVAKPIPEELGMVQDVTFVDKAVCRNNGFFSYHMPNWFGTTKYVKPLVQKLCTHEQMMCSKTCYNSVNIAFLIDGSSSVGDSNFRLMLEFVSNIAKTFEISDIGAKIAAVQFTYDQRTEFSFTDYSTKENVLAVIRNIRYMSGGTATGDAISFTVRNVFGPIRESPNKNFLVIVTDGQSYDDVQGPAAAAHDAGITIFSVGVAWAPLDDLKDMASKPKESHAFFTREFTGLEPIVSDVIRGICRDFLESQQ

SEQ ID NO: 17855 - protein, 459 aa, Artificial Sequence
  Synthetic polypeptide
WEWWLTPVIPPLWEAEADGPLEVRSSRPSQHGETLSLLKIQKLARGVISNSGGPVRVYSLPGRENYSSVDANGIQSQMLSRWSASFTVTKGKSSTQEATGQAVSTAHPPTGKRLKKTPEKKTGNKDCKADIAFLIDGSFNIGQRRFNLQKNFVGKVALMLGIGTEGPHVGLVQASEHPKIEFYLKNFTSAKDVLFAIKEVGFRGGNSNTGKALKHTAQKFFTVDAGVRKGIPKVVVVFIDGWPSDDIEEAGIVAREFGVNVFIVSVAKPIPEELGMVQDVTFVDKAVCRNNGFFSYHMPNWFGTTKYVKPLVQKLCTHEQMMCSKTCYNSVNIAFLIDGSSSVGDSNFRLMLEFVSNIAKTFEISDIGAKIAAVQFTYDQRTEFSFTDYSTKENVLAVIRNIRYMSGGTATGDAISFTVRNVFGPIRESPNKNFLVIVTDGQSYDDVQGPAAAAHDAAK

SEQ ID NO: 17856 - protein, 174 aa, Artificial Sequence
  Synthetic polypeptide
WEWWLTPVIPPLWEAEADGPLEVRSSRPSQHGETLSLLKIQKLARGVISNSGGPVRVYSLPGRENYSSVDANGIQSQMLSRWSASFTVTKGKSSTQEATGQAVSTAHPPTGKRLKKTPEKKTGNKDCKADIAFLIDGSFNIGQRRFNLQKNFVGKVALMLGIGTEGPHVGLVQA

SEQ ID NO: 17857 - protein, 505 aa, Artificial Sequence
  Synthetic polypeptide
RQSSGKSCLLFSINDSSSLSSEFLRYNSNEMSSGDVLETFNFLENADDSDEDEENDMIEGIPEGKDKHRMNKHKIGNEGLAADLTDDPDTEEALKEFDFLVTAEDGEGAGEARSSGDGTEWAEPITFPSGGGKSFIMGSDDVLLSVLGLGDLADLTVTNDADYSYDLPANKDAFRKTWNPKYTLRSHFDGVRALAFHPVEPVLVTASEDHTLKLWNLQKTVPAKKSASLDVEPIYTFRAHIGPVLSLAISSNGEQCFSGGIDATIQWWNMPSPSVDPYDTYEPNVLAGTLVGHTDAVWGLAYSGIKNQLLSCSADGTVRLWNPQEKLPCICTYNGDKKHGIPTSVDFIGCDPAHMVTSFNTGSAVIYDLETSQSLVILSSQVDSGLQSNNHINRVVSHPTLPVTITAHEDRHIKFFDNKTGKMIHSMVAHLDAVTSLAVDPNGIYLMSGSHDCSIRLWNLDSKTCVQEITAHRKKLDESIYDVAFHSSKAYIASAGADALAKVFV

SEQ ID NO: 17858 - protein, 23 aa, Artificial Sequence
  Synthetic polypeptide
AQSSSAIIQMKCPLVMFLRRSIS

SEQ ID NO: 17859 - protein, 4 aa, Artificial Sequence
  Synthetic polypeptide
NVLW

SEQ ID NO: 17860 - protein, 589 aa, Artificial Sequence
  Synthetic polypeptide
RQSSGKSCLLFSINDSSSLSSEFLRYNSNEMSSGDVLETFNFLENADDSDEDEENDMIEGIPEGKDKHRMNKHKIGNEGLAADLTDDPDTEEALKEFDFLVTAEDGEGAGEARSSGDGTEWDKDDLSPTAEVWDVDQGLISKLKEQYKKERKGKKGVKRANRTKLYDMIADLGDDELPHIPSGIINQSRSASTRMTDHEGARAEEAEPITFPSGGGKSFIMGSDDVLLSVLGLGDLADLTVTNDADYSYDLPANKDAFRKTWNPKYTLRSHFDGVRALAFHPVEPVLVTASEDHTLKLWNLQKTVPAKKSASLDVEPIYTFRAHIGPVLSLAISSNGEQCFSGGIDATIQWWNMPSPSVDPYDTYEPNVLAGTLVGHTDAVWGLAYSGIKNQLLSCSADGTVRLWNPQEKLPCICTYNGDKKHGIPTSVDFIGCDPAHMVTSFNTGSAVIYDLETSQSLVILSSQVDSGLQSNNHINRVVSHPTLPVTITAHEDRHIKFFDNKTGKMIHSMVAHLDAVTSLAVDPNGIYLMSGSHDCSIRLWNLDSKTCVQEITAHRKKLDESIYDVAFHSSKAYIASAGADALAKVFV

SEQ ID NO: 17861 - protein, 124 aa, Artificial Sequence
  Synthetic polypeptide
RQSSGKSCLLFSINDSSSLSSEFLRYNSNEMSSGDVLETFNFLENADDSDEDEENDMIEGIPEGKDKHRMNKHKIGNEGLAADLTDDPDTEEALKEFDFLVTAEDGEGAGEARSSGDGTEWVAC

SEQ ID NO: 17862 - protein, 42 aa, Artificial Sequence
  Synthetic polypeptide
MMYFKNILSNIIYNRKWKLISTLGDWLNRRNQRHRGSHSTSE

SEQ ID NO: 17863 - protein, 561 aa, Artificial Sequence
  Synthetic polypeptide
IEETKDTEAPTAPQNSQLTWKQGRQLLRQYLQEVGYTDTILDVRSQRVRSLLGLSNSEPNGSVETKNLEQILNGGESPKQKGQEIKRSSGDVLETFNFLENADDSDEDEENDMIEGIPEGKDKHRMNKHKIGNEGLAADLTDDPDTEEALKEFDFLVTAEDGEGAGEARSSGDGTEWAEPITFPSGGGKSFIMGSDDVLLSVLGLGDLADLTVTNDADYSYDLPANKDAFRKTWNPKYTLRSHFDGVRALAFHPVEPVLVTASEDHTLKLWNLQKTVPAKKSASLDVEPIYTFRAHIGPVLSLAISSNGEQCFSGGIDATIQWWNMPSPSVDPYDTYEPNVLAGTLVGHTDAVWGLAYSGIKNQLLSCSADGTVRLWNPQEKLPCICTYNGDKKHGIPTSVDFIGCDPAHMVTSFNTGSAVIYDLETSQSLVILSSQVDSGLQSNNHINRVVSHPTLPVTITAHEDRHIKFFDNKTGKMIHSMVAHLDAVTSLAVDPNGIYLMSGSHDCSIRLWNLDSKTCVQEITAHRKKLDESIYDVAFHSSKAYIASAGADALAKVFV

SEQ ID NO: 17864 - protein, 645 aa, Artificial Sequence
  Synthetic polypeptide
IEETKDTEAPTAPQNSQLTWKQGRQLLRQYLQEVGYTDTILDVRSQRVRSLLGLSNSEPNGSVETKNLEQILNGGESPKQKGQEIKRSSGDVLETFNFLENADDSDEDEENDMIEGIPEGKDKHRMNKHKIGNEGLAADLTDDPDTEEALKEFDFLVTAEDGEGAGEARSSGDGTEWDKDDLSPTAEVWDVDQGLISKLKEQYKKERKGKKGVKRANRTKLYDMIADLGDDELPHIPSGIINQSRSASTRMTDHEGARAEEAEPITFPSGGGKSFIMGSDDVLLSVLGLGDLADLTVTNDADYSYDLPANKDAFRKTWNPKYTLRSHFDGVRALAFHPVEPVLVTASEDHTLKLWNLQKTVPAKKSASLDVEPIYTFRAHIGPVLSLAISSNGEQCFSGGIDATIQWWNMPSPSVDPYDTYEPNVLAGTLVGHTDAVWGLAYSGIKNQLLSCSADGTVRLWNPQEKLPCICTYNGDKKHGIPTSVDFIGCDPAHMVTSFNTGSAVIYDLETSQSLVILSSQVDSGLQSNNHINRVVSHPTLPVTITAHEDRHIKFFDNKTGKMIHSMVAHLDAVTSLAVDPNGIYLMSGSHDCSIRLWNLDSKTCVQEITAHRKKLDESIYDVAFHSSKAYIASAGADALAKVFV

SEQ ID NO: 17865 - protein, 180 aa, Artificial Sequence
  Synthetic polypeptide
IEETKDTEAPTAPQNSQLTWKQGRQLLRQYLQEVGYTDTILDVRSQRVRSLLGLSNSEPNGSVETKNLEQILNGGESPKQKGQEIKRSSGDVLETFNFLENADDSDEDEENDMIEGIPEGKDKHRMNKHKIGNEGLAADLTDDPDTEEALKEFDFLVTAEDGEGAGEARSSGDGTEWVAC

SEQ ID NO: 17866 - protein, 79 aa, Artificial Sequence
  Synthetic polypeptide
IEETKDTEAPTAPQNSQLTWKQGRQLLRQYLQEVGYTDTILDVRSQRVRSLLGLSNSEPNGSVETKNLEQILNGGESPK

SEQ ID NO: 17867 - protein, 38 aa, Artificial Sequence
  Synthetic polypeptide
GQESESSLAAWYKSRPTSSYIPSFSIQIQLFPTHTFTL

SEQ ID NO: 17868 - protein, 69 aa, Artificial Sequence
  Synthetic polypeptide
FHPALWEDAVGRLLEARSPRAALQHGTNQDLPAPTFHLSVSKSSCFLPIHLLFSILYHGKTAGNRQEKT

SEQ ID NO: 17869 - protein, 207 aa, Artificial Sequence
  Synthetic polypeptide
PGTVAHTCNSIQHFGRTRWADCLRPGVREQPCSMVQIKTYQLLHSIFQYPNPAVSYPYIYSLASCIMEKLQEIDKRKPENTAELEIFQEGIKVLETLVTVAEEHHRAQLVACLLPILISFLLDENSLGSATSIMRNLHDFALQNLMQIGPQYSSVFKSLVASSPALKARLEAAIKGNQESVKVKIPTSKYTKSPGKNSSIQLKTSFL

SEQ ID NO: 17870 - protein, 64 aa, Artificial Sequence
  Synthetic polypeptide
GQAQWLTPVIPALWEAEAGGSRGQEIKTILVNTASYIGTAFGQYKAHKRSSSASGSVTCCFFSF

SEQ ID NO: 17871 - protein, 1266 aa, Artificial Sequence
  Synthetic polypeptide
SQHFGKPRRADHEAKRSRPSWLTRLLILEQLLDSIKHTKGARQQVVQLHVVSSVSSFLKYVAGSKGCLGPEEMKRFALTLVMGALESPNPLLRCAAAESWARLAQVVDDGAFTAGLAQVSFDKLKSARDVVTRTGHSLALGSLHRYLGGISSSQHLNSCIGILYTLAQDSTSPDVQTWALHSLSLIIDSAGPLYYVHVEPTLSLIIMLLLNVPPTHAEVHQSLGRCLNALITTLGPELQGNSTSISTLRTSCLLGCAVMQDNPDCLVQAQAISCLQQLHMFAPRHVNLSSLVSCLCVNLCSPYLLLRRAVLACLRQLVQREAAEVSEHAVMLAKDSREELTPDANIREVGLEGALLILLDKETDERLCHDIKETLNYMLTSMAVEKLSLWLKLCKDVLAASADFTAVTCVDTMQEEEGDKGDDASVLTTRRDEKSHPFTNPRWATRVFAAECVCRIINQCENANSAHFDIALAQEMKKRDSRNDFLVLHLADLIRMAFMAATDHSDQLRLSGLEMLLVVIRRFATVPEPEFPGHVILEQYQANVGAALRPAFTSETPPDVTAKACQVCSAWIASGVVSDLNDLRRVHQLLVSSLTKIQAGKEALSHLYNESASTMEILAVLKAWAEVYIIAVQRHKNHRQPLKTTTCLEDGIRNGSCSSDGLLDLVYADLGTLSRLWLAALQDFALLTLPSEFASQLPAEGGAFYTAETSENAKLHYYNSWALILHATALWLTSTGFVVADPDEGASNLSRPVTPTSMCQGSSSGATIKSPEDVYTDRFHLILGISVEFLCSLRSDATMESITACLHALQALLDVPWPRSKIGSDQDLGIELLNVLHRVILTRESPSIQLASLEVVRQIICAAQEHVKEKRRSAEVDDGAAEKETLPEFGEGKDTGGLVPGKSLVFATLELCVCILVRQLPELNPKLTGSPGVKATKPQILLEDGSRLVSAALVILSELPAVCSPEGSISILPTILYLTIGVLRETAVKLPGGQLSSTVAASLQALKGILSSPMARAEKSRTAWTDLLRSALTTILDCWDPVDETHQELDEVSLLTAITVFILSTSPEVTTIPCLQKRCIDKFKATLEIKDPVVQIKTYQLLHSIFQYPNPAVSYPYIYSLASCIMEKLQEIDKRKPENTAELEIFQEGIKVLETLVTVAEEHHRAQLVACLLPILISFLLDENSLGSATSIMRNLHDFALQNLMQIGPQYSSVFKSLVASSPALKARLEAAIKGNQESVKVKIPTSKYTKSPGKNSSIQLKTSFL

SEQ ID NO: 17872 - protein, 12 aa, Artificial Sequence
  Synthetic polypeptide
HGFLYWNSFWTV

SEQ ID NO: 17873 - protein, 1191 aa, Artificial Sequence
  Synthetic polypeptide
SQHFGKPRRADHEAKRSRPSWLTRLLILEQLLDSIKHTKGARQQVVQLHVVSSVSSFLKYVAGSKGCLGPEEMKRFALTLVMGALESPNPLLRCAAAESWARLAQVVDDGAFTAGLAQVSFDKLKSARDVVTRTGHSLALGSLHRYLGGISSSQHLNSCIGILYTLAQDSTSPDVQTWALHSLSLIIDSAGPLYYVHVEPTLSLIIMLLLNVPPTHAEVHQSLGRCLNALITTLGPELQGNSTSISTLRTSCLLGCAVMQDNPDCLVQAQAISCLQQLHMFAPRHVNLSSLVSCLCVNLCSPYLLLRRAVLACLRQLVQREAAEVSEHAVMLAKDSREELTPDANIREVGLEGALLILLDKETDERLCHDIKETLNYMLTSMAVEKLSLWLKLCKDVLAASADFTAVTCVDTMQEEEGDKGDDASVLTTRRDEKSHPFTNPRWATRVFAAECVCRIINQCENANSAHFDIALAQEMKKRDSRNDFLVLHLADLIRMAFMAATDHSDQLRLSGLEMLLVVIRRFATVPEPEFPGHVILEQYQANVGAALRPAFTSETPPDVTAKACQVCSAWIASGVVSDLNDLRRVHQLLVSSLTKIQAGKEALSHLYNESASTMEILAVLKAWAEVYIIAVQRHKNHRQPLKTTTCLEDGIRNGSCSSDGLLDLVYADLGTLSRLWLAALQDFALLTLPSEFASQLPAEGGAFYTAETSENAKLHYYNSWALILHATALWLTSTGFVVADPDEGASNLSRPVTPTSMCQGSSSGATIKSPEDVYTDRFHLILGISVEFLCSLRSDATMESITACLHALQALLDVPWPRSKIGSDQDLGIELLNVLHRVILTRESPSIQLASLEVVRQIICAAQEHVKEKRRSAEVDDGAAEKETLPEFGEGKDTGGLVPGKSLVFATLELCVCILVRQLPELNPKLTGSPGVKATKPQILLEDGSRLVSAALVILSELPAVCSPEVDETHQELDEVSLLTAITVFILSTSPEVTTIPCLQKRCIDKFKATLEIKDPVVQIKTYQLLHSIFQYPNPAVSYPYIYSLASCIMEKLQEIDKRKPENTAELEIFQEGIKVLETLVTVAEEHHRAQLVACLLPILISFLLDENSLGSATSIMRNLHDFALQNLMQIGPQYSSVFKSLVASSPALKARLEAAIKGNQESVKVKIPTSKYTKSPGKNSSIQLKTSFL

SEQ ID NO: 17874 - protein, 473 aa, Artificial Sequence
  Synthetic polypeptide
SQHFGKPRRADHEAKRSRPSWLTRLLILEQLLDSIKHTKGARQQVVQLHVVSSVSSFLKYVAGSKGCLGPEEMKRFALTLVMGALESPNPLLRCAAAESWARLAQVVDDGAFTAGLAQVSFDKLKSARDVVTRTGHSLALGSLHRYLGGISSSQHLNSCIGILYTLAQDSTSPDVQTWALHSLSLIIDSAGPLYYVHVEPTLSLIIMLLLNVPPTHAEVHQSLGRCLNALITTLGPELQGNSTSISTLRTSCLLGCAVMQDNPDCLVQAQAISCLQQLHMFAPRHVNLSSLVSCLCVNLCSPYLLLRRAVLACLRQLVQREAAEVSEHAVMLAKDSREELTPDANIREVGLEGALLILLDKETDERLCHDIKETLNYMLTSMAVEKLSLWLKLCKDVLAASADFTAVTCVDTMQEEEGDKGDDASVLTTRRDEKSHPFTNPRWATRVFAAECVCRIINQCENANSAHFDIALA

SEQ ID NO: 17875 - protein, 360 aa, Artificial Sequence
  Synthetic polypeptide
SQHFGKPRRADHEAKRSRPSWLTRLLILEQLLDSIKHTKGARQQVVQLHVVSSVSSFLKYVAGSKGCLGPEEMKRFALTLVMGALESPNPLLRCAAAESWARLAQVVDDGAFTAGLAQVSFDKLKSARDVVTRTGHSLALGSLHRYLGGISSSQHLNSCIGILYTLAQDSTSPDVQTWALHSLSLIIDSAGPLYYVHVEPTLSLIIMLLLNVPPTHAEVHQSLGRCLNALITTLGPELQGNSTSISTLRTSCLLGCAVMQDNPDCLVQAQAISCLQQLHMFAPRHVNLSSLVSCLCVNLCSPYLLLRRAVLACLRQLVQREAAEVSEHAVMLAKDSREELTPVFTASSPGVDSICRNHLE

SEQ ID NO: 17876 - protein, 18 aa, Artificial Sequence
  Synthetic polypeptide
IVWYISEMLQVLFQTTTI

SEQ ID NO: 17877 - protein, 17 aa, Artificial Sequence
  Synthetic polypeptide
MCGISQRCCRSCSRPPQ

SEQ ID NO: 17878 - protein, 17 aa, Artificial Sequence
  Synthetic polypeptide
CVVYLRDVAGLVPDHHN

SEQ ID NO: 17879 - protein, 149 aa, Artificial Sequence
  Synthetic polypeptide
IVDWGQLDYLVVDMPPGTGDVQLSVSQNIPITGAVIVSTPQDIALMDAHKGAEMFRRVHVPVLGLVQNMSVFQCPKCKHKTHIFGADGARKLAQTLGLEVLGDIPLHLNIREASDTGQPIVFSQPESDEAKAYLRIAVEVVRRLPSPSE

SEQ ID NO: 17880 - protein, 136 aa, Artificial Sequence
  Synthetic polypeptide
SKQRKKDWYHMETFLEKKKSEITMYFHTLILSPLSTSHGKSQRSLSLPPLRQQDHSHLFLLFLSLLNVKITRMKTFLVIHFHLMNSRLGSTGLLSCRHATRNWRCAVISLTEYSYNRCCDCLHAPGHRIDGCTQGC

SEQ ID NO: 17881 - protein, 15 aa, Artificial Sequence
  Synthetic polypeptide
IVDWGQLDYLVVDMP

SEQ ID NO: 17882 - protein, 99 aa, Artificial Sequence
  Synthetic polypeptide
SKQRKKDWYHMETFLEKKKSEITMYFHTLILSPLSTSHGKSQRSLSLPPLRQQDHSHLFLLFLSLLNVKITRMKTFLVIHFHLMNSRLGSTGLLSCRHA

SEQ ID NO: 17883 - protein, 3 aa, Artificial Sequence
  Synthetic polypeptide
IVL

SEQ ID NO: 17884 - protein, 202 aa, Artificial Sequence
  Synthetic polypeptide
SKQRKKDWYHMETFLEKKKSEITMYFHTLILSPLSTSHGKSQRSLSLPPLRQQDHSHLFLLFLSLLNVKITRMKTFLVIHFHLMNSAVIVSTPQDIALMDAHKGAEMFRRVHVPVLGLVQNMSVFQCPKCKHKTHIFGADGARKLAQTLGLEVLGDIPLHLNIREASDTGQPIVFSQPESDEAKAYLRIAVEVVRRLPSPSE

SEQ ID NO: 17885 - protein, 88 aa, Artificial Sequence
  Synthetic polypeptide
SKQRKKDWYHMETFLEKKKSEITMYFHTLILSPLSTSHGKSQRSLSLPPLRQQDHSHLFLLFLSLLNVKITRMKTFLVIHFHLMNSAV

SEQ ID NO: 17886 - protein, 2 aa, Artificial Sequence
  Synthetic polypeptide
QR

SEQ ID NO: 17887 - protein, 52 aa, Artificial Sequence
  Synthetic polypeptide
KGRLGSTGLLSCRHATRNWRCAVISLTEYSYNRCCDCLHAPGHRIDGCTQGC

SEQ ID NO: 17888 - protein, 149 aa, Artificial Sequence
  Synthetic polypeptide
KVDWGQLDYLVVDMPPGTGDVQLSVSQNIPITGAVIVSTPQDIALMDAHKGAEMFRRVHVPVLGLVQNMSVFQCPKCKHKTHIFGADGARKLAQTLGLEVLGDIPLHLNIREASDTGQPIVFSQPESDEAKAYLRIAVEVVRRLPSPSE

SEQ ID NO: 17889 - protein, 15 aa, Artificial Sequence
  Synthetic polypeptide
KGRLGSTGLLSCRHA

SEQ ID NO: 17890 - protein, 15 aa, Artificial Sequence
  Synthetic polypeptide
KVDWGQLDYLVVDMP

SEQ ID NO: 17891 - protein, 110 aa, Artificial Sequence
  Synthetic polypeptide
MDQQTRLNYMLPRRNLLHLHESYKTQYRAMFVMNCSINKEEVLRYKASENRKKRRVHKKMRSNREDAAEKAETDVEEIYHPVMCTECSTEVAVYDKDEVFHFFNVLASHS

SEQ ID NO: 17892 - protein, 37 aa, Artificial Sequence
  Synthetic polypeptide
RQTVAEWINKQDSTICCLEETCFTCMNHTKLNIEQCL

SEQ ID NO: 17893 - protein, 7 aa, Artificial Sequence
  Synthetic polypeptide
KKLASLA

SEQ ID NO: 17894 - protein, 51 aa, Artificial Sequence
  Synthetic polypeptide
MDQQTRLNYMLPRRNLLHLHESYKTQYRAMFVMNCSINKEEVLRYKASENR

SEQ ID NO: 17895 - protein, 32 aa, Artificial Sequence
  Synthetic polypeptide
LTPVIPVVREAKRGQEVDHLNPRAQDQPGQHA

SEQ ID NO: 17896 - protein, 399 aa, Artificial Sequence
  Synthetic polypeptide
THELKTSLGNMLKAINVDLQSDAALQVDISDALSERDKVKFTVHTKSSLPNFKQNEFSVVRQHEEFIWLHDSFVENEDYAGYIIPPAPPRPDFDASREKLQKLGEGEGSMTKEEFTKMKQELEAEYLAIFKKTVAMHEVFLCRVAAHPILRRDLNFHVFLEYNQDLSVRGKNKKEKLEDFFKNMVKSADGVIVSGVKDVDDFFEHERTFLLEYHNRVKDASAKSDRMTRSHKSAADDYNRIGSSLYALGTQDSTDICKFFLKVSELFDKTRKIEARVSADEDLKLSDLLKYYLRESQAAKDLLYRRSRSLVDYENANKALDKARAKNKDVLQAETSQQLCCQKFEKISESAKQELIDFKTRRVAAFRKNLVELAELELKHAKGNLQLLQNCLAVLNGDT

SEQ ID NO: 17897 - protein, 34 aa, Artificial Sequence
  Synthetic polypeptide
HTCNTSGSGSQTGSGGGSLEPTSSRPAWATCLKQ

SEQ ID NO: 17898 - protein, 15 aa, Artificial Sequence
  Synthetic polypeptide
THELKTSLGNMLKAI

SEQ ID NO: 17899 - protein, 150 aa, Artificial Sequence
  Synthetic polypeptide
THELKTSLGNMLKAINVDLQSDAALQVDISDALSERDKVKFTVHTKSSLPNFKQNEFSVVRQHEEFIWLHDSFVENEDYAGYIIPPAPPRPDFDASREKLQKLGEGEGSMTKEEFTKMKQELEAGWITENLGFILLLPPSSASFFFVFTE

SEQ ID NO: 17900 - protein, 137 aa, Artificial Sequence
  Synthetic polypeptide
THELKTSLGNMLKAINVDLQSDAALQVDISDALSERDKVKFTVHTKSSLPNFKQNEFSVVRQHEEFIWLHDSFVENEDYAGYIIPPAPPRPDFDASREKLQKLGEGEGSMTKEEFTKMKQELEADQTSPIIGPAGLL

SEQ ID NO: 17901 - protein, 220 aa, Artificial Sequence
  Synthetic polypeptide
THELKTSLGNMLKAINVDLQSDAALQVDISDALSERDKVKFTVHTKIPPAPPRPDFDASREKLQKLGEGEGSMTKEEFTKMKQELEAEYLAIFKKTVAMHEVFLCRVAAHPILRRDLNFHVFLEYNQDLSVRGKNKKEKLEDFFKNMVKSADGVIVSGVKDVDDFFEHERTFLLEYHNRVKDASAKSDRMTRSHKSAADDYNRIGSSLYALGTQDSTDIC

SEQ ID NO: 17902 - protein, 113 aa, Artificial Sequence
  Synthetic polypeptide
THELKTSLGNMLKAINVDLQSDAALQVDISDALSERDKVKFTVHTKIPPAPPRPDFDASREKLQKLGEGEGSMTKEEFTKMKQELEAGWITENLGFILLLPPSSASFFFVFTE

SEQ ID NO: 17903 - protein, 95 aa, Artificial Sequence
  Synthetic polypeptide
THELKTSLGNMLKAINVDLQSDAALQVDISDALSERDKVKFTVHTKSSLPNFKQNEFSVVRQHEEFIWLHDSFVENEDYAGYIIPPAPPRPDFDA

SEQ ID NO: 17904 - protein, 28 aa, Artificial Sequence
  Synthetic polypeptide
SQLLGRRKQEDHLRPGVGDQPGQHNFWG

SEQ ID NO: 17905 - protein, 51 aa, Artificial Sequence
  Synthetic polypeptide
GRELETSLGNITFGDKNRNSKYCINKCKYTTISEQCGSLSGNGTLSNRAGH

SEQ ID NO: 17906 - protein, 1489 aa, Artificial Sequence
  Synthetic polypeptide
RRIDFFERTILCNSLVWSCAVTGRPGLTYQEALESEKKARQNLQSFPEPLIIPVLYLTSLTHRSRLHEICDDIFAYVKDRYFVEETVEVIRNNGARLQCRILEVLPPSHQNGFANGHVNSVDGETIIISDSDDSETQSCSFQNGKKKDAIDPLLFKYKVQPTKKELHESAIVKATQISRRKHLFSRDKLKLFLKQHCEPQDGVIKIKASSLSTYKIAEQDFSYFFPDDPPTFIFSPANRRRGRPPKRIHISQEDNVANKQTLASYRSKATKERDKLLKQEEMKSLAFEKAKLKREKADALEAKKKEKEDKEKKREELKKIVEEERLKKKEEKERLKVEREKEREKLREEKRKYVEYLKQWSKPREDMECDDLKELPEPTPVKTRLPPEIFGDALMVLEFLNAFGELFDLQDEFPDGVTLEVLEEALVGNDSEGPLCELLFFFLTAIFQAIAEEEEEVAKEQLTDADTKGCSLKSLDLDSCTLSEILRLHILASGADVTSANAKYRYQKRGGFDATDDACMELRLSNPSLVKKLSSTSVYDLTPGEKMKILHALCGKLLTLVSTRDFIEDYVDILRQAKQEFRELKAEQHRKEREEAAARIRKRKEEKLKEQEQKMKEKQEKLKEDEQRNSTADISIGEEEREDFDTSIESKDTEQKELDQDMVTEDEDDPGSHKRGRRGKRGQNGFKEFTRQEQINCVTREPLTADEEEALKQEHQRKEKELLEKIQSAIACTNIFPLGRDRMYRRYWIFPSIPGLFIEEDYSGLTEDMLLPRPSSFQNNVQSQDPQVSTKTGEPLMSESTSNIDQGPRDHSVQLPKPVHKPNRWCFYSSCEQLDQLIEALNSRGHRESALKETLLQEKSRICAQLARFSEEKFHFSDKPQPDSKPTYSRGRSSNAYDPSQMCAEKQLELRLRDFLLDIEDRIYQGTLGAIKVTDRHIWRSALESGRYELLSEENKENGIIKTVNEDVEEMEIDEQTKVIVKDRLLGIKTETPSTVSTNASTPQSVSSVVHYLAMALFQIEQGIERRFLKAPLDASDSGRSYKTVLDRWRESLLSSASLSQVFLHLSTLDRSVIWSKSILNARCKICRKKGDAENMVLCDGCDRGHHTYCVRPKLKTVPEGDWFCPECRPKQRSRRLSSRQRPSLESDEDVEDSMGGEDDEVDGDEEEGQSEEEEYEVEQDEDDSQEEEEVSLPKRGRPQVRLPVKTRGKLSSSFSSRGQQQEPGRYPSRSQQSTPKTTVSSKTGRSLRKINSAPPTETKSLRIASRSTRHSHGPLQADVFVELLSPRRKRRGRKSANNTPENSPNFPNFRVIATKSSEQSRSVNIASKLSLQESESKRRCRKRQSPEPSPVTLGRRSSGRQGGVHELSAFEQLVVELVRHDDSWPFLKLVSKIQVPDYYDIIKKPIALNIIREKVNKCEYKLASEFIDDIELMFSNCFEYNPRNTSEAKAGTRLQAFFHIQAQKLGLHVTPSNVDQVSTPPAAKKSRI

SEQ ID NO: 17907 - protein, 26 aa, Artificial Sequence
  Synthetic polypeptide
IFFFFKEELTFLNEPFCATALCGVVL

SEQ ID NO: 17908 - protein, 1521 aa, Artificial Sequence
  Synthetic polypeptide
RRIDFFERTILCNSLVWSCAVTGRPGLTYQEALESEKKARQNLQSFPEPLIIPVLYLTSLTHRSRLHEICDDIFAYVKDRYFVEETVEVIRNNGARLQCRILEVLPPSHQNGFANGHVNSVDGETIIISDSDDSETQSCSFQNGKKKDAIDPLLFKYKVQPTKKELHESAIVKATQISRRKHLFSRDKLKLFLKQHCEPQDGVIKIKASSLSTYKIAEQDFSYFFPDDPPTFIFSPANRRRGRPPKRIHISQEDNVANKQTLASYRSKATKERDKLLKQEEMKSLAFEKAKLKREKADALEAKKKEKEDKEKKREELKKIVEEERLKKKEEKERLKVEREKEREKLREEKRKYVEYLKQWSKPREDMECDDLKELPEPTPVKTRLPPEIFGDALMVLEFLNAFGELFDLQDEFPDGVTLEVLEEALVGNDSEGPLCELLFFFLTAIFQAIAEEEEEVAKEQLTDADTKDLTEALDEDADPTKSALSAVASLAAAWPQLHQGCSLKSLDLDSCTLSEILRLHILASGADVTSANAKYRYQKRGGFDATDDACMELRLSNPSLVKKLSSTSVYDLTPGEKMKILHALCGKLLTLVSTRDFIEDYVDILRQAKQEFRELKAEQHRKEREEAAARIRKRKEEKLKEQEQKMKEKQEKLKEDEQRNSTADISIGEEEREDFDTSIESKDTEQKELDQDMVTEDEDDPGSHKRGRRGKRGQNGFKEFTRQEQINCVTREPLTADEEEALKQEHQRKEKELLEKIQSAIACTNIFPLGRDRMYRRYWIFPSIPGLFIEEDYSGLTEDMLLPRPSSFQNNVQSQDPQVSTKTGEPLMSESTSNIDQGPRDHSVQLPKPVHKPNRWCFYSSCEQLDQLIEALNSRGHRESALKETLLQEKSRICAQLARFSEEKFHFSDKPQPDSKPTYSRGRSSNAYDPSQMCAEKQLELRLRDFLLDIEDRIYQGTLGAIKVTDRHIWRSALESGRYELLSEENKENGIIKTVNEDVEEMEIDEQTKVIVKDRLLGIKTETPSTVSTNASTPQSVSSVVHYLAMALFQIEQGIERRFLKAPLDASDSGRSYKTVLDRWRESLLSSASLSQVFLHLSTLDRSVIWSKSILNARCKICRKKGDAENMVLCDGCDRGHHTYCVRPKLKTVPEGDWFCPECRPKQRSRRLSSRQRPSLESDEDVEDSMGGEDDEVDGDEEEGQSEEEEYEVEQDEDDSQEEEEVSLPKRGRPQVRLPVKTRGKLSSSFSSRGQQQEPGRYPSRSQQSTPKTTVSSKTGRSLRKINSAPPTETKSLRIASRSTRHSHGPLQADVFVELLSPRRKRRGRKSANNTPENSPNFPNFRVIATKSSEQSRSVNIASKLSLQESESKRRCRKRQSPEPSPVTLGRRSSGRQGGVHELSAFEQLVVELVRHDDSWPFLKLVSKIQVPDYYDIIKKPIALNIIREKVNKCEYKLASEFIDDIELMFSNCFEYNPRNTSEAKAGTRLQAFFHIQAQKLGLHVTPSNVDQVSTPPAAKKSRI

SEQ ID NO: 17909 - protein, 55 aa, Artificial Sequence
  Synthetic polypeptide
GAPLPGRDPVWERQQPCGGDDDGPGASGRCGTRRSRRSLGSCGRRGIRGICRADE

SEQ ID NO: 17910 - protein, 249 aa, Artificial Sequence
  Synthetic polypeptide
DVGSASAPPPHLGCEERLCPAETPSGSASSPVVATTMDQEPVGGVERGEAVAASGAAAAAAFGESAGQMSNERGFENVELGVIGKKKKVPRRVIHFVSGETMEEYSTDEDEVDGLEKKDVLPTVDPTKLTWGPYLWFYMLRAATSTLSVCDFLGEKIASVLGISTPKYQYAIDEYYRMKKEEEEEEEENRMSEEAEKQYQQNKLQTDSIVQTDQPETVISSSFVNVNFEMEGDSEVIMESKQNPVSVPP

SEQ ID NO: 17911 - protein, 79 aa, Artificial Sequence
  Synthetic polypeptide
GASLPGRPSSEMWGAPLPRRPIWDVRSASARPRPRLGAPAALWWRRRWTRSQWAVWNEEKPSQPRELRPPRHSGNLQGR

SEQ ID NO: 17912 - protein, 446 aa, Artificial Sequence
  Synthetic polypeptide
GLLKVAGEKQNLEKKSEQELKDEEMDLFTKYYSEWKGGRKNTNEFYKTIPRFYYRLPAEDEVLLQKLREESRAVFLQRKSRELLDNEELQNLWFLLDKHQTPPMIGEEAMINYENFLKVGEKAGAKCKQFFTAKVFAKLLHTDSYGRISIMQFFNYVMRKVWLHQTRIGLSLYDVAGQGYLRESDLENYILELIPTLPQLDGLEKSFYSFYVCTAVRKFFFFLDPLRTGKIKIQDILACSFLDDLLELRDEELSKESQETNWFSAPSALRVYGQYLNLDKDHNGMLSKEELSRYGTATMTNVFLDRVFQECLTYDGEMDYKTYLDFVLALENRKEPAALQYIFKLLDIENKGYLNVFSLNYFFRAIQELMKIHGQDPVSFQDVKDEIFDMVKPKDPLKISLQDLINSNQGDTVTTILIDLNGFWTYENREALVANDSENSADLDDT

SEQ ID NO: 17913 - protein, 16 aa, Artificial Sequence
  Synthetic polypeptide
KWLEKNRTLKKKVNKN

SEQ ID NO: 17914 - protein, 219 aa, Artificial Sequence
  Synthetic polypeptide
GLLKVAGEKQNLEKKSEQELKDEEMDLFTKYYSEWKGGRKNTNEFYKTIPRFYYRLPAEDEVLLQKLREESRAVFLQRKSRELLDNEELQVGEKAGAKCKQFFTAKVFAKLLHTDSYGRISIMQFFNYVMRKVWLHQTRIGLSLYDVAGQGYLRESDLENYILELIPTLPQLDGLEKSFYSFYVCTAVRKFFFFLDPLRTGKIKIQDILACSFLDDLLE

SEQ ID NO: 17915 - protein, 127 aa, Artificial Sequence
  Synthetic polypeptide
GLLKVAGEKQNLEKKSEQELKDEEMDLFTKYYSEWKGGRKNTNEFYKTIPRFYYRLPAEDEVLLQKLREESRAVFLQRKSRELLDNEELQNLWFLLDKHQTPPMIGEEAMINYENFLKAIFHSKSLC

SEQ ID NO: 17916 - protein, 99 aa, Artificial Sequence
  Synthetic polypeptide
GLLKVAGEKQNLEKKSEQELKDEEMDLFTKYYSEWKGGRKNTNEFYKTIPRFYYRLPAEDEVLLQKLREESRAVFLQRKSRELLDNEELQAIFHSKSLC

SEQ ID NO: 17917 - protein, 183 aa, Artificial Sequence
  Synthetic polypeptide
GLLKVAGEKQNLEKKSEQELKDEEMDLFTKYYSEWKGGRKNTNEFYKTIPRFYYRLPAEDEVLLQKLREESRAVFLQRKSRELLDNEELQNLWFLLDKHQTPPMIGEEAMINYENFLKVGEKAGAKCKQFFTAKVFAKLLHTDSYGRISIMQFFNYVMRKGDSFLLCLNSLSGNQVGFWSVLL

SEQ ID NO: 17918 - protein, 160 aa, Artificial Sequence
  Synthetic polypeptide
GLLKVAGEKQNLEKKSEQELKDEEMDLFTKYYSEWKGGRKNTNEFYKTIPRFYYRLPAEDEVLLQKLREESRAVFLQRKSRELLDNEELQNLWFLLDKHQTPPMIGEEAMINYENFLKVGEKAGAKCKQFFTAKVFAKLLHTDSYGRISIMQFFNYVMRK

SEQ ID NO: 17919 - protein, 51 aa, Artificial Sequence
  Synthetic polypeptide
DVPFTFCHDCEASQATWNSLECRLSTSQTESATAGPRPEAHAKTEFPVESG

SEQ ID NO: 17920 - protein, 193 aa, Artificial Sequence
  Synthetic polypeptide
EVSPFTSLILSCPPPCKTCLLPSAMIVRPPKPRGTLLNVVSQLAKRNLRLLVLGRKHMLRRSSQWSRDEMEEVQKQASCFFADDISEDDPFLLYATLHSGNHCRFITRDLMRDHKACLPDAKTQRLFFKWQQGHQLAIVNRFPGSKLTFQRILSYDTVVQTTGDSWHIPYDEDLVERCSCEVPTKWLCLHQKT

SEQ ID NO: 17921 - protein, 9 aa, Artificial Sequence
  Synthetic polypeptide
GLPSHVELS

SEQ ID NO: 17922 - protein, 167 aa, Artificial Sequence
  Synthetic polypeptide
EVSPFTSLILSCPPPCKTCLLPSAMIVRPPKPRGTLLNVVSQLAKRNLRLLVLGRKHMLRRSSQWSRDEMEEVQKQASCFFADDISEDDPFLLYATLHSGNHCRFITRDLMRDHKACLPDAKTQRLFFKWQQGHQLAIVNRFPGSKLTFQRILSYDTVVQTTGDSWH

SEQ ID NO: 17923 - protein, 6 aa, Artificial Sequence
  Synthetic polypeptide
LGDYSS

SEQ ID NO: 17924 - protein, 52 aa, Artificial Sequence
  Synthetic polypeptide
KAGELHTIPPPLFIDWVTIALECRLSTSQTESATAGPRPEAHAKTEFPVESG

SEQ ID NO: 17925 - protein, 34 aa, Artificial Sequence
  Synthetic polypeptide
GWAQWLTVVIPALWEAKVRGLFKTKSSKPAWATC

SEQ ID NO: 17926 - protein, 177 aa, Artificial Sequence
  Synthetic polypeptide
EDCLRPRVQNQPGQHADSRSQVQRARYEAANWKYKYGYEIPVDMLCKRIADISQVYTQNAEMRPLGCCMILIGIDEEQGPQVYKCDPAGYYCGFKATAAGVKQTESTSFLEKKVKKKFDWTFEQTVETAITCLSTVLSIDFKPSEIEVGVVTVENPKFRILTEAEIDAHLVALAERD

SEQ ID NO: 17927 - protein, 57 aa, Artificial Sequence
  Synthetic polypeptide
DQEFKTSLGNMLTADPRYRGHAMRQLTGNTSMAMRFLWTCCVKELPIFLRSTHRMLK

SEQ ID NO: 17928 - protein, 79 aa, Artificial Sequence
  Synthetic polypeptide
EDCLRPRVQNQPGQHADSRSQVQRARYEAANWKYKYGYEIPVDMLCKRIADISQVYTQNAEMRPLGCYCNYMPVYCSIN

SEQ ID NO: 17929 - protein, 183 aa, Artificial Sequence
  Synthetic polypeptide
EDCLRPRVQNQPGQHADSRSQVQRARYEAANWKYKYGYEIPVDMLCKRIADISQVYTQNAEMRPLGCWSFLFLGMILIGIDEEQGPQVYKCDPAGYYCGFKATAAGVKQTESTSFLEKKVKKKFDWTFEQTVETAITCLSTVLSIDFKPSEIEVGVVTVENPKFRILTEAEIDAHLVALAERD

SEQ ID NO: 17930 - protein, 134 aa, Artificial Sequence
  Synthetic polypeptide
EDCLRPRVQNQPGQHADSRSQVQRARYEAANWKYKYGYEIPVDMLCKRIADISQVYTQNAEMRPLGCCMILIGIDEEQGPQVYKCDPAGYYCGFKATAAGVKQTESTSFLEKKVKKKFDWTFEQTVEDSYRSRD

SEQ ID NO: 17931 - protein, 59 aa, Artificial Sequence
  Synthetic polypeptide
KLKTNQMSINWFRKCFPSPLTSGLQVTDSFPFYIEYRSHGTEGSAARREAPPLCSSDTR

SEQ ID NO: 17932 - protein, 1060 aa, Artificial Sequence
  Synthetic polypeptide
KQTKCPSIGSESASPVHSPLGSRSQTPSPSTLNIDHMEQKDLQLDEKLHHSVLQTPDDLEISEFPSECCSVMAGGTLTGWHADVATVMWRRMLGILGDVNSIMDPEIHAQVFDYLCELWQNLAKIRDNLGISTDNLTSPSPPVLIPPLRILTPWLFKATMLTDKYKQGKLHAYKLICNTMKRRQDVSPNRDFLTHFYNIMHCGLLHIDQDIVNTIIKHCSPQFFSLGLPGATMLIMDFIVAAGRVASSAFLNAPRVEAQVLLGSLVCFPNLYCELPSLHPNIPDVAVSQFTDVKELIIKTVLSSARDEPSGPARCVALCSLGIWICEELVHESHHPQIKEALNVICVSLKFTNKTVAHVACNMLHMLVHYVPRLQIYQPDSPLKIIQILIATITHLLPSTEASSYEMDKRLVVSLLLCLLDWIMALPLKTLLQPFHATGAESDKTEKSVLNCIYKVLHGCVYGAQCFSNPRYFPMSLSDLASVDYDPFMHLESLKEPEPLHSPDSERSSKLQPVTEVKTQMQHGLISIAARTVITHLVNHLGHYPMSGGPAMLTSQVCENHDNHYSESTELSPELFESPNIQFFVLNNTTLVSCIQIRSEENMPGGGLSAGLASANSNVRIIVRDLSGKYSWDSAILYGPPPVSGLSEPTSFMLSLSHQEKPEEPPTSNECLEDITVKDGLSLQFKRFRETVPTWDTIRDEEDVLDELLQYLGVTSPECLQRTGISLNIPAPQPVCISEKQENDVINAILKQHTEEKEFVEKHFNDLNMKAVEQDEPIPQKPQSAFYYCRLLLSILGMNSWDKRRSFHLLKKNEKLLRELRNLDSRQCRETHKIAVFYVAEGQEDKHSILTNTGGSQAYEDFVAGLGWEVNLTNHCGFMGGLQKNKSTGLTTPYFATSTVEVIFHVSTRMPSDSDDSLTKKLRHLGNDEVHIVWSEHTRDYRRGIIPTEFGDVLIVIYPMKNHMFSIQIMKKPEVPFFGPLFDGAIVNGKVLPIMVRATAINASRALKSLIPLYQNFYEERARYLQTIVQHHLEPTTFEDFAAQVFSPAPYHHLPSDADH

SEQ ID NO: 17933 - protein, 35 aa, Artificial Sequence
  Synthetic polypeptide
LKIENKPNVHQLVQKVLPQSTHLWAPGHRLLPLLH

SEQ ID NO: 17934 - protein, 1107 aa, Artificial Sequence
  Synthetic polypeptide
KQTKCPSIGSESASPVHSPLGSRSQTPSPSTLNIDHMEQKDLQLDEKLHHSVLQTPDDLEISEFPSECCSVMAGGTLTGWHADVATVMWRRMLGILGDVNSIMDPEIHAQVFDYLCELWQNLAKIRDNLGISTDNLTSPSPPVLIPPLRILTPWLFKATMLTDKYKQGKLHAYKLICNTMKRRQDVSPNRDFLTHFYNIMHCGLLHIDQDIVNTIIKHCSPQFFSLGLPGATMLIMDFIVAAGRVASSAFLNAPRVEAQVLLGSLVCFPNLYCELPSLHPNIPDVAVSQFTDVKELIIKTVLSSARDEPSGPARCVALCSLGIWICEELVHESHHPQIKEALNVICVSLKFTNKTVAHVACNMLHMLVHYVPRLQIYQPDSPLKIIQILIATITHLLPSTEASSYEMDKRLVVSLLLCLLDWIMALPLKTLLQPFHATGAESDKTEKSVLNCIYKVLHGCVYGAQCFSNPRYFPMSLSDLASVDYDPFMHLESLKEPEPLHSPDSERSSKLQPVTEVKTQMQHGLISIAARTVITHLVNHLGHYPMSGGPAMLTSQVCENHDNHYSESTELSPELFESPNIQFFVLNNTTLVSCIQIRSEENMPGGGLSAGLASANSNVRIIVRDLSGKYSWDSAILYGPPPVSGLSEPTSFMLSLSHQEKPEEPPTSNECLEDITVKDGLSLQFKRFRETVPTWDTIRDEEDVLDELLQYLGVTSPECLQRTGISLNIPAPQPVCISEKQENDVINAILKQHTEEKEFVEKHFNDLNMKAVEQDEPIPQKPQSAFYYCRLLLSILGMNSWDKRRSFHLLKKNEKLLRELRNLDSRQCRETHKIAVFYVAEGQEDKHSILTNTGGSQAYEDFVAGLGWEVNLTNHCGFMGGLQKNKSTGLTTPYFATSTVEVIFHVSTRMPSDSDDSLTKKLRHLGNDEVHIVWSEHTRDYRRGIIPTEFGDVLIVIYPMKNHMFSIQIMKKPEVPFFGPLFDGAIVNGKVLPIMVRATAINASRALKSLIPLYQNFYEERARYLQTIVQHHLEPTTFEDFAAQVFSPAPYHHLPSDAGSYPEILPSETPTATQVDGADLASPMSPRTSKSRMSMKLRRSSGSANKS

SEQ ID NO: 17935 - protein, 31 aa, Artificial Sequence
  Synthetic polypeptide
QILMMLKYFPAQLESDIFHKVKKLEMKFLVL

SEQ ID NO: 17936 - protein, 256 aa, Artificial Sequence
  Synthetic polypeptide
RAISRLYGNPECSEILPSRGASSEARLFGFYKGILPPILAETPKRAVKFFTFEQYKKLLGYVSLSPALTFAIAGLGSGLTEAIVVNPFEVVKVGLQANRNTFAEQPSTVGYARQIIKKEGWGLQGLNKGLTATLGRHGVFNMVYFGFYYNVKNMIPVNKDPILEFWRKFGIGLLSGTIASVINIPFDVAKSRIQGPQPVPGEIKYRTCFKTMATVYQEEGILALYKGLLPKIMRLGPGGAVMLLVYEYTYSWLQEN

SEQ ID NO: 17937 - protein, 46 aa, Artificial Sequence
  Synthetic polypeptide
EPSQDCMETLNVLRSCHLEVPHQKPGYLVFTREFCHLSWLKPQKEQ

SEQ ID NO: 17938 - protein, 21 aa, Artificial Sequence
  Synthetic polypeptide
RCLIRSQVIWFLQGNSATYLG

SEQ ID NO: 17939 - protein, 257 aa, Artificial Sequence
  Synthetic polypeptide
RAISRLYGNPECSEILPSRGASSEARLFGFYKGILPPILAETPKRAVKFFTFEQYKKLLGYVSLSPALTFAIAGLGSGLTEAIVVNPFEVVKVGLQANRNTFAEQPSTVGYARQIIKKEGWGLQGLNKGLTATLGRHGVFNMVYFGFYYNVKNMIPVNKDPILEFWRKFGIGLLSGTIASVINIPFDVAKSRIQGPQPVPGEIKYRTCFKTMATVYQEEGILALYKGLLPKIMRLGPGGAVMLLVYEYTYSWLQENW

SEQ ID NO: 17940 - protein, 1326 aa, Artificial Sequence
  Synthetic polypeptide
KEQSTCKAKIWMYAYPEFTKLFWNTAAPKFSVPESVMKETLYPKYESVQASRLLTDKLSYKSSVITLHQHSRTNFWCFLPRKSASFESIQKWFSAQPTQLRRVKSSVDLRKEKIIAPLEIKNDMQSSIKEVMFQKAKELKRQLQLTKQNKTEEPNYVKESIDDIFDNMCEKHSLRNLSLTLIEASKKAGISYIVYPKKKKMRWKKRLKQQKLIFVHEELSKPPKSLERSASHGILPGQKKYLFKVPLYERQIRCPSLPLYLNFEKFVQAKGGIPENIDPRTWALDRLIEYKDASIPVKEKDDKISVPEDPPERVKEPPKLKLNDYVESDLPQEVIKYYESEVKILTEEINDKTKYPAFAYCRRGAIYRKLGKLQSAMNDLQRVILLEPLFLNAYWHRHLIYLFQDKINEALDDLNYIHKYNKNNTEAYLSKAEIYRGKKDITLAILNYTQAIKSTPTDADIYFRRGEMYEITNKVLAIDDFSKCIFYDPKRTDALLKRGLFYCENENWFAAIEDFTALLNIDHQNSQARTYRGIAYVKWKFYKEATQDFSAAIHLDPNNWLALYYRGCLFRKSNPFRALQDYSVSALINDGYENLGCFLHRGIVYAHLKLWLLAICDFETVISLERTITLAYVNIGLIHLLHLDNYTEAIWQFSEAIRIDPLCIQSYLCRAETYFKLHKLKKAVNELSRAIHLQPDGIQLYIRRGQYLLMMKYYDLAKFTIYQIAEMDKGLSELSPMQQALIYSFCENHDKAIEVLDGISWNRAEMTMCALLAKVQMKAKRTKEAVEVLKKALDAISHSDKGPDATAISADCLYNLGLCYMEEGNLQMAFDSFTKAVKANPDFAESFYQRGLCKVKLHKDSSILDFNRAITLNPKHYQAYLSRVAFYGLKGRYSKAILNCNKAIKIYPESVRAYLYRGVLKYYNKTYKLAITDLTTAISMDKNSYTAFYNRALCYTKIRELQMALTDYGIVLLLDATETVKLNTFLNRGLIYVELGQYGFALEDFKQAALISRTNGSLCHATAMCHHRINEFEEAVNFFTWALKINPCFLDAYVGRGNSYMEYGHDEATKQAQKDFLKALHINPAYIKARISFGYNLQAQGKFQKAWNHFTIAIDTDPKNYLAYEGRAVVCLQMGNNFAAMQDINAAMKISTTAEFLTNRGVIHEFMGHKQNAMKDYQDAITLNPKYSLAYFNAGNIYFHHRQFSQASDYFSKALKFDPENEYVLMNRAITNTILKKYEEAKEDFANVIESCPFWAAVYFNRAHFYYCLKQYELAEEDLNKALSLKPNDALVYNFRAKVRGKIGLIEEAMADYNQALDLEDYASVI

SEQ ID NO: 17941 - protein, 50 aa, Artificial Sequence
  Synthetic polypeptide
IERNDKRKNPGICRRNKAHVKQKYGCMLIQNSRSCFGIQLHLNSLFQNLS

SEQ ID NO: 17942 - protein, 21 aa, Artificial Sequence
  Synthetic polypeptide
SKNMDVCLSRIHEVVLEYSCT

SEQ ID NO: 17943 - protein, 25 aa, Artificial Sequence
  Synthetic polypeptide
IMAVWLCTRMSFFHRRCILEDLGHI

SEQ ID NO: 17944 - protein, 43 aa, Artificial Sequence
  Synthetic polypeptide
WQCGYVRECLFFTGDAYWRTWGIFKPSSILWFKRQVFQSNLEL

SEQ ID NO: 17945 - protein, 470 aa, Artificial Sequence
  Synthetic polypeptide
NGSVVMYENVFFSQEMHTGGLGAYLSRVAFYGLKGRYSKAILNCNKAIKIYPESVRAYLYRGVLKYYNKTYKLAITDLTTAISMDKNSYTAFYNRALCYTKIRELQMALTDYGIVLLLDATETVKLNTFLNRGLIYVELGQYGFALEDFKQAALISRTNGSLCHATAMCHHRINEFEEAVNFFTWALKINPCFLDAYVGRGNSYMEYGHDEATKQAQKDFLKALHINPAYIKARISFGYNLQAQGKFQKAWNHFTIAIDTDPKNYLAYEGRAVVCLQMGNNFAAMQDINAAMKISTTAEFLTNRGVIHEFMGHKQNAMKDYQDAITLNPKYSLAYFNAGNIYFHHRQFSQASDYFSKALKFDPENEYVLMNRAITNTILKKYEEAKEDFANVIESCPFWAAVYFNRAHFYYCLKQYELAEEDLNKALSLKPNDALVYNFRAKVRGKIGLIEEAMADYNQALDLEDYASVI

SEQ ID NO: 17946 - protein, 406 aa, Artificial Sequence
  Synthetic polypeptide
NGSVVMYENVFFSQEMHTGGLGAYLSRVAFYGLKGRYSKAILNCNKAIKIYPESVRAYLYRGVLKYYNKTYKLAITDLTTAISMDKNSYTAFYNRALCYTKIRELQMALTDYGIVLLLDATETVKLNTFLNRGLIYVELGQYGFALEDFKQAALISRTNGSLCHATAMCHHRINEFEEAVNFFTWALKINPCFLDAYVGRGNSYMEYGHDEATKQAQKDFLKALHINPAYIKARISFGYNLQAQGKFQKAWNHFTIAIDTDPKNYLAYEGRAVVCLQMGNNFAAMQDINAAMKISTTAEFLTNRGVIHEFMGHKQNAMKDYQDAITLNPKYSLAYFNAGNIYFHHRQFSQEESLGLAWSLSLDSFLRTGGATFSSGVNPLQTLHRRMSILSPLPPTCPRDEMDFTS

SEQ ID NO: 17947 - protein, 29 aa, Artificial Sequence
  Synthetic polypeptide
ESLGEKKSMKELMYILVQGKMALCFIGLS

SEQ ID NO: 17948 - protein, 75 aa, Artificial Sequence
  Synthetic polypeptide
CISWYKGRWLYALLACLEKPLLPEAHSLIRQLARRCSEVRLLVDSKDDERVPALNLLICLVSRYFDQRDLADEPS

SEQ ID NO: 17949 - protein, 48 aa, Artificial Sequence
  Synthetic polypeptide
INILLPSLRKSWRKKVNERVDVYPGTREDGFMLYWLVLKSLCYLRLIH

SEQ ID NO: 17950 - protein, 45 aa, Artificial Sequence
  Synthetic polypeptide
CISWYKGRWLYALLACLEKPLLPEAHSLIRQLARRCSEVRLLVVF

SEQ ID NO: 17951 - protein, 43 aa, Artificial Sequence
  Synthetic polypeptide
CISWYKGRWLYALLACLEKPLLPEAHSLIRQLARRCSEVRLLV

SEQ ID NO: 17952 - protein, 35 aa, Artificial Sequence
  Synthetic polypeptide
IHSTTKKSSNHKGRQQEKKGMKKTTNKMTIEPSEV

SEQ ID NO: 17953 - protein, 38 aa, Artificial Sequence
  Synthetic polypeptide
HYKKIIKSQRKTAREERNEKNYEQNDDRTFRSLVFLET

SEQ ID NO: 17954 - protein, 54 aa, Artificial Sequence
  Synthetic polypeptide
HYILLGSEMPSHRDELHENGTRLCEWAEKWQKNFIMGKCKVLWSKDAVLHDVSS

SEQ ID NO: 17955 - protein, 411 aa, Artificial Sequence [sequence omitted]

SEQ ID NO: 17956 - protein, 7 aa, Artificial Sequence
  Synthetic polypeptide
MDIQIIS

SEQ ID NO: 17957 - protein, 43 aa, Artificial Sequence
  Synthetic polypeptide
IRSCSSSAWNLSIASHLVQSKWISKLSHKEIYVWISRKLERAH

SEQ ID NO: 17958 - protein, 691 aa, Artificial Sequence
  Synthetic polypeptide
LLILSKVNGYPNYLIRKFMFGFPENWKEHIDNFLEQLRAGEKNREKTKQKQKTGRSVRDIRKSMKNDARENQTDTAQRATTTYDFDCDNLELKSNKHSESPGATELNMCHSNCQNKPTLRFPDDQVNNTIQNGGGDDLSNQELIGKKEYKMSSKKLKIGERTNERIIKSQKQETTEELDVSIDILTSREQFFSDEERKYMAINQKKAYILVTPLKSRKVIEQRCMRYNLSAGTIKAVTDFVIPECQKKSPISKSMGTLENTFEGHKSKNKEDCDERDLLTVNRKIKISNLEKEQMLTSDFKKNTRLLPKLKKIENQVAMSFYKHQSSPDLSSEESETEKEIKRKAEVKKTKAGNTKEAVVHLRKSTRNTSNIPVILEPETEESENEFYIKQKKARPSVKETLQKSGVRKEFPITEAVGSDKTNRHPLECLPGLIQDKEWNEKELQKLHCAFASLPKHKPGFWSEVAAAVGSRSPEECQRKYMENPRGKGSQKHVTKKKPANSKGQNGKRGDADQKQTIKITAKVGTLKRKQQMREFLEQLPKDDHDDFFSTTPLQHQRILLPSFQDSEDDDDILPNMDKNPTTPSSVIFPLVKTPQCQHVSPGMLGSINRNDCDKYVFRMQKYHKSNGGIVWGNIKKKLVETDFSTPTPRRKTPFNTDLGENSGIGKLFTNAVESLDEEEKDYYFSNSDSA

SEQ ID NO: 17959 - protein, 55 aa, Artificial Sequence
  Synthetic polypeptide
LLILSKVNGYPNYLIRKFMFGFPENWKEHIDNFLEQLRDGVSSCWPDWSRTPGYK

SEQ ID NO: 17960 - protein, 30 aa, Artificial Sequence
  Synthetic polypeptide
LLILSKVNGYPNYLIRKFMFGFPENWKEHI

SEQ ID NO: 17961 - protein, 11 aa, Artificial Sequence
  Synthetic polypeptide
VECSSATGMDD

SEQ ID NO: 17962 - protein, 760 aa, Artificial Sequence
  Synthetic polypeptide
HSEKNSELNVVQLQEWMIKSINNNTAICVEGKLIDVTNIYWHSNVIIERIEHNKLRTISGNVYILKGMIDQISMKEAGYPNYLIRKFMFGFPENWKEHIDNFLEQLRAGEKNREKTKQKQKTGRSVRDIRKSMKNDARENQTDTAQRATTTYDFDCDNLELKSNKHSESPGATELNMCHSNCQNKPTLRFPDDQVNNTIQNGGGDDLSNQELIGKKEYKMSSKKLKIGERTNERIIKSQKQETTEELDVSIDILTSREQFFSDEERKYMAINQKKAYILVTPLKSRKVIEQRCMRYNLSAGTIKAVTDFVIPECQKKSPISKSMGTLENTFEGHKSKNKEDCDERDLLTVNRKIKISNLEKEQMLTSDFKKNTRLLPKLKKIENQVAMSFYKHQSSPDLSSEESETEKEIKRKAEVKKTKAGNTKEAVVHLRKSTRNTSNIPVILEPETEESENEFYIKQKKARPSVKETLQKSGVRKEFPITEAVGSDKTNRHPLECLPGLIQDKEWNEKELQKLHCAFASLPKHKPGFWSEVAAAVGSRSPEECQRKYMENPRGKGSQKHVTKKKPANSKGQNGKRGDADQKQTIKITAKVGTLKRKQQMREFLEQLPKDDHDDFFSTTPLQHQRILLPSFQDSEDDDDILPNMDKNPTTPSSVIFPLVKTPQCQHVSPGMLGSINRNDCDKYVFRMQKYHKSNGGIVWGNIKKKLVETDFSTPTPRRKTPFNTDLGENSGIGKLFTNAVESLDEEEKDYYFSNSDSA

SEQ ID NO: 17963 - protein, 124 aa, Artificial Sequence
  Synthetic polypeptide
HSEKNSELNVVQLQEWMIKSINNNTAICVEGKLIDVTNIYWHSNVIIERIEHNKLRTISGNVYILKGMIDQISMKEAGYPNYLIRKFMFGFPENWKEHIDNFLEQLRDGVSSCWPDWSRTPGYK

SEQ ID NO: 17964 - protein, 55 aa, Artificial Sequence
  Synthetic polypeptide
HSEKNSELNVVQLQEWMIKSINNNTAICVEGKLMISKLSHKEIYVWISRKLERAH

SEQ ID NO: 17965 - protein, 40 aa, Artificial Sequence
  Synthetic polypeptide
PRNFGRLKQADHEVRRLRPSWPTSCKNVVTLISYKERRKE

SEQ ID NO: 17966 - protein, 10 aa, Artificial Sequence
  Synthetic polypeptide
DHPGQQVARM

SEQ ID NO: 17967 - protein, 200 aa, Artificial Sequence
  Synthetic polypeptide
QAWWLTPVAPELWETEAGRSRGQEIETILANKLQECSNSDQLQGKEERVNEESHLTEKEYIEHCNTPTTDSDSSIAVKALQIDSFGLVTCFQQESLDVSQMILGKSQQPESKMQSEFIKEKSATCSNEEKDNLNESVITEEKETDGDHLSSLLNKTTVHNIPGFDSIKETNMQDGSVQVIKDHVTNCAFSFQNSLLYDLD

SEQ ID NO: 17968 - protein, 41 aa, Artificial Sequence
  Synthetic polypeptide
PRNFGRLKQADHEVRRLRPSWPTRKGYLSMKKMLMSFLKRS

SEQ ID NO: 17969 - protein, 12 aa, Artificial Sequence
  Synthetic polypeptide
DHPGQQGKVICQ

SEQ ID NO: 17970 - protein, 248 aa, Artificial Sequence
  Synthetic polypeptide
QAWWLTPVAPELWETEAGRSRGQEIETILANKERLFVNEENVNEFLEEVLSSPFKQSMSLTPPLIEVLQVTDNKIQINAKLQECSNSDQLQGKEERVNEESHLTEKEYIEHCNTPTTDSDSSIAVKALQIDSFGLVTCFQQESLDVSQMILGKSQQPESKMQSEFIKEKSATCSNEEKDNLNESVITEEKETDGDHLSSLLNKTTVHNIPGFDSIKETNMQDGSVQVIKDHVTNCAFSFQNSLLYDLD

SEQ ID NO: 17971 - protein, 39 aa, Artificial Sequence
  Synthetic polypeptide
GRARWLMPVIPGLWEAEVCGSRAQEFETSLTNMQTSRLL

SEQ ID NO: 17972 - protein, 8 aa, Artificial Sequence
  Synthetic polypeptide
PTCKLQGF

SEQ ID NO: 17973 - protein, 12 aa, Artificial Sequence
  Synthetic polypeptide
DQPDQHANFKAF

SEQ ID NO: 17974 - protein, 38 aa, Artificial Sequence
  Synthetic polypeptide
QCLTHSPSRNWLQKRNLLILVTVNHRAGDICQPRKEGK

SEQ ID NO: 17975 - protein, 14 aa, Artificial Sequence
  Synthetic polypeptide
HTVHPEIGFKRGIF

SEQ ID NO: 17976 - protein, 290 aa, Artificial Sequence
  Synthetic polypeptide
VPDTQSIQKLASKEESSNSSDSKSQSRRHLSAKERREMKKKKLPSDSGDLEALEGKDKEKESTVHIETHQNTSKNVAAVQPMKRGQKSKMKKMKEKYKDQDEEDRELIMKLLGSAGSNKEEKGKKGKKGKTKDEPVKKQPQKPRGGQRVSDNIKKETPFLEVITHELQDFAVDDPHDDKEEQDLDQQGNEENLFDSLTGQPHPEDVLLFAIPICAPYTTMTNYKYKVKLTPGVQKKGKAAKTALNSFMHSKEATAREKDLFRSVKDTDLSRNIPGKVKVSAPNLLNVKRK

SEQ ID NO: 17977 - protein, 254 aa, Artificial Sequence
  Synthetic polypeptide
VPDTQSIQKLASKEESSNSSDSKSQSRRHLSAKERREMKKKKLPSDSGDLEALEGKDKEKESTVHIETHQNTSKNVAAVQPMKRGQKSKMKKMKEKYKDQDEEDRELIMKLLGSAGSNKEEKGKKGKKGKTKDEPVKKQPQKPRGGQRVSDNIKKETPFLEVITHELQDFAVDDPHDDKEEQDLDQQGNEENLFDSLTGQPHPEDVLLFAIPICAPYTTMTNYKYKVKLTPGVQKKGKAAKTALNSFMHSKEAT

SEQ ID NO: 17978 - protein, 10 aa, Artificial Sequence
  Synthetic polypeptide
FMENPSPHGP

SEQ ID NO: 17979 - protein, 14 aa, Artificial Sequence
  Synthetic polypeptide
TCSLWRTHPPTDLD

SEQ ID NO: 17980 - protein, 506 aa, Artificial Sequence
  Synthetic polypeptide
NRDSRNKPVVYGEPIPPRTLTEAGTMALCYSAAWDARVITSAWWVYHHQVSKTAPTGEYLTTGSFMIRGKKNFLPPSYLMMGFSFLFKVDESCVWRHQGERKVRVQDEDMETLASCTSELISEEMEQLDGGDTSSDEDKEEHETPVEVELMTQVDQEDITLQSGRDELNEELIQEESSEDEGEYEEVRKDQDSVGEMKDEGEETLNYPDTTIDLSHLQPQRSIQKLASKEESSNSSDSKSQSRRHLSAKERREMKKKKLPSDSGDLEALEGKDKEKESTVHIETHQNTSKNVAAVQPMKRGQKSKMKKMKEKYKDQDEEDRELIMKLLGSAGSNKEEKGKKGKKGKTKDEPVKKQPQKPRGGQRVSDNIKKETPFLEVITHELQDFAVDDPHDDKEEQDLDQQGNEENLFDSLTGQPHPEDVLLFAIPICAPYTTMTNYKYKVKLTPGVQKKGKAAKTALNSFMHSKEATAREKDLFRSVKDTDLSRNIPGKVKVSAPNLLNVKRK

SEQ ID NO: 17981 - protein, 470 aa, Artificial Sequence
  Synthetic polypeptide
NRDSRNKPVVYGEPIPPRTLTEAGTMALCYSAAWDARVITSAWWVYHHQVSKTAPTGEYLTTGSFMIRGKKNFLPPSYLMMGFSFLFKVDESCVWRHQGERKVRVQDEDMETLASCTSELISEEMEQLDGGDTSSDEDKEEHETPVEVELMTQVDQEDITLQSGRDELNEELIQEESSEDEGEYEEVRKDQDSVGEMKDEGEETLNYPDTTIDLSHLQPQRSIQKLASKEESSNSSDSKSQSRRHLSAKERREMKKKKLPSDSGDLEALEGKDKEKESTVHIETHQNTSKNVAAVQPMKRGQKSKMKKMKEKYKDQDEEDRELIMKLLGSAGSNKEEKGKKGKKGKTKDEPVKKQPQKPRGGQRVSDNIKKETPFLEVITHELQDFAVDDPHDDKEEQDLDQQGNEENLFDSLTGQPHPEDVLLFAIPICAPYTTMTNYKYKVKLTPGVQKKGKAAKTALNSFMHSKEAT

SEQ ID NO: 17982 - protein, 31 aa, Artificial Sequence
  Synthetic polypeptide
SQHFGRPRRADHEVKRSRPSWLTRWTRSATE

SEQ ID NO: 17983 - protein, 535 aa, Artificial Sequence
  Synthetic polypeptide
HGGRDQQQNEIIVKRYLTPGDIYVHADLHGATSCVIKNPTGEPIPPRTLTEAGTMALCYSAAWDARVITSAWWVYHHQVSKTAPTGEYLTTGSFMIRGKKNFLPPSYLMMGFSFLFKVDESCVWRHQGERKVRVQDEDMETLASCTSELISEEMEQLDGGDTSSDEDKEEHETPVEVELMTQVDQEDITLQSGRDELNEELIQEESSEDEGEYEEVRKDQDSVGEMKDEGEETLNYPDTTIDLSHLQPQRSIQKLASKEESSNSSDSKSQSRRHLSAKERREMKKKKLPSDSGDLEALEGKDKEKESTVHIETHQNTSKNVAAVQPMKRGQKSKMKKMKEKYKDQDEEDRELIMKLLGSAGSNKEEKGKKGKKGKTKDEPVKKQPQKPRGGQRVSDNIKKETPFLEVITHELQDFAVDDPHDDKEEQDLDQQGNEENLFDSLTGQPHPEDVLLFAIPICAPYTTMTNYKYKVKLTPGVQKKGKAAKTALNSFMHSKEATAREKDLFRSVKDTDLSRNIPGKVKVSAPNLLNVKRK

SEQ ID NO: 17984 - protein, 41 aa, Artificial Sequence
  Synthetic polypeptide
RAQWLTPVIPALWEAEEGGSRGQEIETILANTVDEISNRMK

SEQ ID NO: 17985 - protein, 514 aa, Artificial Sequence
  Synthetic polypeptide
HGGRDQQQNEIIVKRYLTPGEPIPPRTLTEAGTMALCYSAAWDARVITSAWWVYHHQVSKTAPTGEYLTTGSFMIRGKKNFLPPSYLMMGFSFLFKVDESCVWRHQGERKVRVQDEDMETLASCTSELISEEMEQLDGGDTSSDEDKEEHETPVEVELMTQVDQEDITLQSGRDELNEELIQEESSEDEGEYEEVRKDQDSVGEMKDEGEETLNYPDTTIDLSHLQPQRSIQKLASKEESSNSSDSKSQSRRHLSAKERREMKKKKLPSDSGDLEALEGKDKEKESTVHIETHQNTSKNVAAVQPMKRGQKSKMKKMKEKYKDQDEEDRELIMKLLGSAGSNKEEKGKKGKKGKTKDEPVKKQPQKPRGGQRVSDNIKKETPFLEVITHELQDFAVDDPHDDKEEQDLDQQGNEENLFDSLTGQPHPEDVLLFAIPICAPYTTMTNYKYKVKLTPGVQKKGKAAKTALNSFMHSKEATAREKDLFRSVKDTDLSRNIPGKVKVSAPNLLNVKRK

SEQ ID NO: 17986 - protein, 499 aa, Artificial Sequence
  Synthetic polypeptide
HGGRDQQQNEIIVKRYLTPGDIYVHADLHGATSCVIKNPTGEPIPPRTLTEAGTMALCYSAAWDARVITSAWWVYHHQVSKTAPTGEYLTTGSFMIRGKKNFLPPSYLMMGFSFLFKVDESCVWRHQGERKVRVQDEDMETLASCTSELISEEMEQLDGGDTSSDEDKEEHETPVEVELMTQVDQEDITLQSGRDELNEELIQEESSEDEGEYEEVRKDQDSVGEMKDEGEETLNYPDTTIDLSHLQPQRSIQKLASKEESSNSSDSKSQSRRHLSAKERREMKKKKLPSDSGDLEALEGKDKEKESTVHIETHQNTSKNVAAVQPMKRGQKSKMKKMKEKYKDQDEEDRELIMKLLGSAGSNKEEKGKKGKKGKTKDEPVKKQPQKPRGGQRVSDNIKKETPFLEVITHELQDFAVDDPHDDKEEQDLDQQGNEENLFDSLTGQPHPEDVLLFAIPICAPYTTMTNYKYKVKLTPGVQKKGKAAKTALNSFMHSKEAT

SEQ ID NO: 17987 - protein, 33 aa, Artificial Sequence
  Synthetic polypeptide
DQEFDTTLAIMAKPLSLLKIQKLARDISFRKEK

SEQ ID NO: 17988 - protein, 17 aa, Artificial Sequence
  Synthetic polypeptide
PGIYHSEKRNKTKLGSR

SEQ ID NO: 17989 - protein, 869 aa, Artificial Sequence
  Synthetic polypeptide
SQHFWRPRWADHLRPRVRHHPGHHGKTPVSTKNTKISQGYIIQKREIKPSLEADKPVEDILTYEEFHPFLFSQHSQCPYIEFESFDKAVDEFYSKIEGQKIDLKALQQEKQALKKLDNVRKDHENRLEALQQAQEIDKLKGELIEMNLQIVDRAIQVVRSALANQIDWTEIGLIVKEAQAQGDPVASAIKELKLQTNHVTMLLRNPYLLSEEEDDDVDGDVNVEKNETEPPKGKKKKQKNKQLQKPQKNKPLLVDVDLSLSAYANAKKYYDHKRYAAKKTQKTVEAAEKAFKSAEKKTKQTLKEVQTVTSIQKARKVYWFEKFLWFISSENYLIIGGRDQQQNEIIVKRYLTPGDIYVHADLHGATSCVIKNPTGEPIPPRTLTEAGTMALCYSAAWDARVITSAWWVYHHQVSKTAPTGEYLTTGSFMIRGKKNFLPPSYLMMGFSFLFKVDESCVWRHQGERKVRVQDEDMETLASCTSELISEEMEQLDGGDTSSDEDKEEHETPVEVELMTQVDQEDITLQSGRDELNEELIQEESSEDEGEYEEVRKDQDSVGEMKDEGEETLNYPDTTIDLSHLQPQRSIQKLASKEESSNSSDSKSQSRRHLSAKERREMKKKKLPSDSGDLEALEGKDKEKESTVHIETHQNTSKNVAAVQPMKRGQKSKMKKMKEKYKDQDEEDRELIMKLLGSAGSNKEEKGKKGKKGKTKDEPVKKQPQKPRGGQRVSDNIKKETPFLEVITHELQDFAVDDPHDDKEEQDLDQQGNEENLFDSLTGQPHPEDVLLFAIPICAPYTTMTNYKYKVKLTPGVQKKGKAAKTALNSFMHSKEATAREKDLFRSVKDTDLSRNIPGKVKVSAPNLLNVKRK

SEQ ID NO: 17990 - protein, 848 aa, Artificial Sequence
  Synthetic polypeptide
SQHFWRPRWADHLRPRVRHHPGHHGKTPVSTKNTKISQGYIIQKREIKPSLEADKPVEDILTYEEFHPFLFSQHSQCPYIEFESFDKAVDEFYSKIEGQKIDLKALQQEKQALKKLDNVRKDHENRLEALQQAQEIDKLKGELIEMNLQIVDRAIQVVRSALANQIDWTEIGLIVKEAQAQGDPVASAIKELKLQTNHVTMLLRNPYLLSEEEDDDVDGDVNVEKNETEPPKGKKKKQKNKQLQKPQKNKPLLVDVDLSLSAYANAKKYYDHKRYAAKKTQKTVEAAEKAFKSAEKKTKQTLKEVQTVTSIQKARKVYWFEKFLWFISSENYLIIGGRDQQQNEIIVKRYLTPGEPIPPRTLTEAGTMALCYSAAWDARVITSAWWVYHHQVSKTAPTGEYLTTGSFMIRGKKNFLPPSYLMMGFSFLFKVDESCVWRHQGERKVRVQDEDMETLASCTSELISEEMEQLDGGDTSSDEDKEEHETPVEVELMTQVDQEDITLQSGRDELNEELIQEESSEDEGEYEEVRKDQDSVGEMKDEGEETLNYPDTTIDLSHLQPQRSIQKLASKEESSNSSDSKSQSRRHLSAKERREMKKKKLPSDSGDLEALEGKDKEKESTVHIETHQNTSKNVAAVQPMKRGQKSKMKKMKEKYKDQDEEDRELIMKLLGSAGSNKEEKGKKGKKGKTKDEPVKKQPQKPRGGQRVSDNIKKETPFLEVITHELQDFAVDDPHDDKEEQDLDQQGNEENLFDSLTGQPHPEDVLLFAIPICAPYTTMTNYKYKVKLTPGVQKKGKAAKTALNSFMHSKEATAREKDLFRSVKDTDLSRNIPGKVKVSAPNLLNVKRK

SEQ ID NO: 17991 - protein, 833 aa, Artificial Sequence
  Synthetic polypeptide
SQHFWRPRWADHLRPRVRHHPGHHGKTPVSTKNTKISQGYIIQKREIKPSLEADKPVEDILTYEEFHPFLFSQHSQCPYIEFESFDKAVDEFYSKIEGQKIDLKALQQEKQALKKLDNVRKDHENRLEALQQAQEIDKLKGELIEMNLQIVDRAIQVVRSALANQIDWTEIGLIVKEAQAQGDPVASAIKELKLQTNHVTMLLRNPYLLSEEEDDDVDGDVNVEKNETEPPKGKKKKQKNKQLQKPQKNKPLLVDVDLSLSAYANAKKYYDHKRYAAKKTQKTVEAAEKAFKSAEKKTKQTLKEVQTVTSIQKARKVYWFEKFLWFISSENYLIIGGRDQQQNEIIVKRYLTPGDIYVHADLHGATSCVIKNPTGEPIPPRTLTEAGTMALCYSAAWDARVITSAWWVYHHQVSKTAPTGEYLTTGSFMIRGKKNFLPPSYLMMGFSFLFKVDESCVWRHQGERKVRVQDEDMETLASCTSELISEEMEQLDGGDTSSDEDKEEHETPVEVELMTQVDQEDITLQSGRDELNEELIQEESSEDEGEYEEVRKDQDSVGEMKDEGEETLNYPDTTIDLSHLQPQRSIQKLASKEESSNSSDSKSQSRRHLSAKERREMKKKKLPSDSGDLEALEGKDKEKESTVHIETHQNTSKNVAAVQPMKRGQKSKMKKMKEKYKDQDEEDRELIMKLLGSAGSNKEEKGKKGKKGKTKDEPVKKQPQKPRGGQRVSDNIKKETPFLEVITHELQDFAVDDPHDDKEEQDLDQQGNEENLFDSLTGQPHPEDVLLFAIPICAPYTTMTNYKYKVKLTPGVQKKGKAAKTALNSFMHSKEAT

SEQ ID NO: 17992 - protein, 57 aa, Artificial Sequence
  Synthetic polypeptide
RMPFPASLAGGVSVFQPMKRKNCAMKNGKLLRSCSSVRRAADKLDWGRFFLQDLQSV

SEQ ID NO: 17993 - protein, 69 aa, Artificial Sequence
  Synthetic polypeptide
WAPDMKLALRMKNAFSSLPRWWSLRVPANEEKELCHEKWKTPEKLFQRQESSRQAGLGKILPARPAECM

SEQ ID NO: 17994 - protein, 62 aa, Artificial Sequence
  Synthetic polypeptide
DGVKASTVLMLPFCSSRGWTVQDQGACIWRLVWTLFLVCSSSLLLSQITKKWTGRRSGSKEK

SEQ ID NO: 17995 - protein, 30 aa, Artificial Sequence
  Synthetic polypeptide
MGSRPPRSSCCPSAVLEAGQSKIKVPASGV

SEQ ID NO: 17996 - protein, 214 aa, Artificial Sequence
  Synthetic polypeptide
WGQGLHGPHAALLQFSRLDSPRSRCLHLASSVDPIPGLQFFIVIVSDHQKVDREEEWKQGKIRKEIHWIPLFTMWSWLQCVEDRSIAGIPKLEHGDSHQTESLLDVLVGGFWGVPHTAPPRLQEAGGPTGGCGVGGQPLGGRGQWVGEETGPVGGPHAWWVPPTAPGTSLVLLVLLAQPFQSSEWMPVSSHTPPGTQTNTAALLNVCTSYSEYV

SEQ ID NO: 17997 - protein, 989 aa, Artificial Sequence
  Synthetic polypeptide
EWRIIRTQELKATQLKACSEEQEDRECLNQAITALMNLQGSMDRIYKQYSPRRRPGDPVCPFYSHQLRSKHLAIKKMNEIQKNIDGWEGKDIGQCCNEFIMEGPLTRIGAKHERHIFLFDGLMISCKPNHGQTRLPGYSSAEYRLKEKFVMRKIQICDKEDTCEHKHAFELVSKDENSIIFAAKSAEEKNNWMAALISLHYRSTLDRMLDSVLLKEENEQPLRLPSPEVYRFVVKDSEENIVFEDNLQSRSGIPIIKGGTVVKLIERLTYHMYADPNFVRTFLTTYRSFCKPQELLSLLIERFEIPEPEPTDADKLAIEKGEQPISADLKRFRKEYVQPVQLRILNVFRHWVEHHFYDFERDLELLERLESFISSVRGKAMKKWVESIAKIIRRKKQAQANGVSHNITFESPPPPIEWHISKPGQFETFDLMTLHPIEIARQLTLLESDLYRKVQPSELVGSVWTKEDKEINSPNLLKMIRHTTNLTLWFEKCIVEAENFEERVAVLSRIIEILQVFQDLNNFNGVLEIVSAVNSVSVYRLDHTFEALQERKRKILDEAVELSQDHFKKYLVKLKSINPPCVPFFGIYLTNILKTEEGNNDFLKKKGKDLINFSKRRKVAEITGEIQQYQNQPYCLRIEPDMRRFFENLNPMGSASEKEFTDYLFNKSLEIEPRNCKQPPRFPRKSTFSLKSPGIRPNTGRHGSTSGTLRGHPTPLEREPCKISFSRIAETELESTVSAPTSPNTPSTPPVSASSDLSVFLDVDLNSSCGSNSIFAPVLLPHSKSFFSSCGSLHKLSEEPLIPPPLPPRKKFDHDASNSKGNMKSDDDPPAIPPRQPPPPKVKPRVPVPTGAFDGPLHSPPPPPPRDPLPDTPPPVPLRPPEHFINCPFNLQPPPLGHLHRDSDWLRDISTCPNSPSTPPSTPSPRVPRRCYVLSSSQNNLAHPPAPPVPPRQNSSPHLPKLPPKTYKRELSHPPLYRLPLLENAETPQ

SEQ ID NO: 17998 - protein, 17 aa, Artificial Sequence
  Synthetic polypeptide
EAESGGSLEPRSSRPHN

SEQ ID NO: 17999 - protein, 12 aa, Artificial Sequence
  Synthetic polypeptide
NPGAQGHTIESM

SEQ ID NO: 18000 - protein, 35 aa, Artificial Sequence
  Synthetic polypeptide
SQHFGKLRWEDHLSPGVQDQPGQHGSGTSASHSLS

SEQ ID NO: 18001 - protein, 1314 aa, Artificial Sequence
  Synthetic polypeptide
AQEFKISLGNMVQEQVHPTLSANEESLYYIEELIFQLLNKLCMAQPRTVQDVEERVQKTFPHPIDKWAIADAQSAIEKRKRRNPLLLPVDKIHPSLKEVLGYKVDYHVSLYIVAVLEYISADILKLAGNYVFNIRHYEISQQDIKVSMCADKVLMDMFDQDDIGLVSLCEDEPSSSGELNYYDLVRTEIAEERQYLRELNMIIKVFREAFLSDRKLFKPSDIEKIFSNISDIHELTVKLLGLIEDTVEMTDESSPHPLAGSCFEDLAEEQAFDPYETLSQDILSPEFHEHFNKLMARPAVALHFQSIADGFKEAVRYVLPRLMLVPVYHCWHYFELLKQLKACSEEQEDRECLNQAITALMNLQGSMDRIYKQYSPRRRPGDPVCPFYSHQLRSKHLAIKKMNEIQKNIDGWEGKDIGQCCNEFIMEGPLTRIGAKHERHIFLFDGLMISCKPNHGQTRLPGYSSAEYRLKEKFVMRKIQICDKEDTCEHKHAFELVSKDENSIIFAAKSAEEKNNWMAALISLHYRSTLDRMLDSVLLKEENEQPLRLPSPEVYRFVVKDSEENIVFEDNLQSRSGIPIIKGGTVVKLIERLTYHMYADPNFVRTFLTTYRSFCKPQELLSLLIERFEIPEPEPTDADKLAIEKGEQPISADLKRFRKEYVQPVQLRILNVFRHWVEHHFYDFERDLELLERLESFISSVRGKAMKKWVESIAKIIRRKKQAQANGVSHNITFESPPPPIEWHISKPGQFETFDLMTLHPIEIARQLTLLESDLYRKVQPSELVGSVWTKEDKEINSPNLLKMIRHTTNLTLWFEKCIVEAENFEERVAVLSRIIEILQVFQDLNNFNGVLEIVSAVNSVSVYRLDHTFEALQERKRKILDEAVELSQDHFKKYLVKLKSINPPCVPFFGIYLTNILKTEEGNNDFLKKKGKDLINFSKRRKVAEITGEIQQYQNQPYCLRIEPDMRRFFENLNPMGSASEKEFTDYLFNKSLEIEPRNCKQPPRFPRKSTFSLKSPGIRPNTGRHGSTSGTLRGHPTPLEREPCKISFSRIAETELESTVSAPTSPNTPSTPPVSASSDLSVFLDVDLNSSCGSNSIFAPVLLPHSKSFFSSCGSLHKLSEEPLIPPPLPPRKKFDHDASNSKGNMKSDDDPPAIPPRQPPPPKVKPRVPVPTGAFDGPLHSPPPPPPRDPLPDTPPPVPLRPPEHFINCPFNLQPPPLGHLHRDSDWLRDISTCPNSPSTPPSTPSPRVPRRCYVLSSSQNNLAHPPAPPVPPRQNSSPHLPKLPPKTYKRELSHPPLYRLPLLENAETPQ

SEQ ID NO: 18002 - protein, 54 aa, Artificial Sequence
  Synthetic polypeptide
MGAVAHAIISALWEAEVGGSLEPRSSRSAWATWFRNKCIPLSQLMKSLSIILKS

SEQ ID NO: 18003 - protein, 1281 aa, Artificial Sequence
  Synthetic polypeptide
AQEFKISLGNMVQEQVHPTLSANEESLYYIEELIFQLLNKLCMAQPRTVQDVEERVQKTFPHPIDKWAIADAQSAIEKRKRRNPLLLPVDKIHPSLKEVLGYKVDYHVSLYIVAVLEYISADILKLAGNYVFNIRHYEISQQDIKVSMCADKVLMDMFDQDDIGLVSLCEDEPSSSGELNYYDLVRTEIAEERQYLRELNMIIKVFREAFLSDRKLFKPSDIEKIFSNISDIHELTVKLLGLIEDTVEMTDESSPHPLAGSCFEDLAEEQAFDPYETLSQDILSPEFHEHFNKLMARPAVALHFQQLKACSEEQEDRECLNQAITALMNLQGSMDRIYKQYSPRRRPGDPVCPFYSHQLRSKHLAIKKMNEIQKNIDGWEGKDIGQCCNEFIMEGPLTRIGAKHERHIFLFDGLMISCKPNHGQTRLPGYSSAEYRLKEKFVMRKIQICDKEDTCEHKHAFELVSKDENSIIFAAKSAEEKNNWMAALISLHYRSTLDRMLDSVLLKEENEQPLRLPSPEVYRFVVKDSEENIVFEDNLQSRSGIPIIKGGTVVKLIERLTYHMYADPNFVRTFLTTYRSFCKPQELLSLLIERFEIPEPEPTDADKLAIEKGEQPISADLKRFRKEYVQPVQLRILNVFRHWVEHHFYDFERDLELLERLESFISSVRGKAMKKWVESIAKIIRRKKQAQANGVSHNITFESPPPPIEWHISKPGQFETFDLMTLHPIEIARQLTLLESDLYRKVQPSELVGSVWTKEDKEINSPNLLKMIRHTTNLTLWFEKCIVEAENFEERVAVLSRIIEILQVFQDLNNFNGVLEIVSAVNSVSVYRLDHTFEALQERKRKILDEAVELSQDHFKKYLVKLKSINPPCVPFFGIYLTNILKTEEGNNDFLKKKGKDLINFSKRRKVAEITGEIQQYQNQPYCLRIEPDMRRFFENLNPMGSASEKEFTDYLFNKSLEIEPRNCKQPPRFPRKSTFSLKSPGIRPNTGRHGSTSGTLRGHPTPLEREPCKISFSRIAETELESTVSAPTSPNTPSTPPVSASSDLSVFLDVDLNSSCGSNSIFAPVLLPHSKSFFSSCGSLHKLSEEPLIPPPLPPRKKFDHDASNSKGNMKSDDDPPAIPPRQPPPPKVKPRVPVPTGAFDGPLHSPPPPPPRDPLPDTPPPVPLRPPEHFINCPFNLQPPPLGHLHRDSDWLRDISTCPNSPSTPPSTPSPRVPRRCYVLSSSQNNLAHPPAPPVPPRQNSSPHLPKLPPKTYKRELSHPPLYRLPLLENAETPQ

SEQ ID NO: 18004 - protein, 33 aa, Artificial Sequence
  Synthetic polypeptide
AQEFKISLGNMVQEQVHPTLSANEESLYYIEEL

SEQ ID NO: 18005 - protein, 23 aa, Artificial Sequence
  Synthetic polypeptide
DVTCSSLPSTMIVRPPQPCGTIK

SEQ ID NO: 18006 - protein, 30 aa, Artificial Sequence
  Synthetic polypeptide
GLPSHVELSNDAVWKNFPAVVWRKETPMVM

SEQ ID NO: 18007 - protein, 161 aa, Artificial Sequence
  Synthetic polypeptide
ASQDVMVLKTGGFPAQVLSLHAAIHVRCDLLLLAFHHDCEASPAMWNYQMMPFGKISQQLCGVKKLPWSCDSRYFWGWLNAVFNKVDYDRIRDVGPDRAASEWLLRCGAMVRYHGQERWQKDYNHLPTGPLDKYKIQAIDATDSCIMSIGFDHMETSNICC

SEQ ID NO: 18008 - protein, 170 aa, Artificial Sequence
  Synthetic polypeptide
ASQDVMVLKTGGFPAQVLSLHAAIHVRCDLLLLAFHHDCEASPAMWNYQMMPFGKISQQLCGVKKLPWSCDSRYFWGWLNAVFNKVDYDRIRDVGPDRAASEWLLRCGAMVRYHGQERWQKDYNHLPTGPLDKYKIQAIDATDSCIMSIGFDHMGNYPIVLLIENADDLQ

SEQ ID NO: 18009 - protein, 249 aa, Artificial Sequence
  Synthetic polypeptide
ASQDVMVLKTGGFPAQVLSLHAAIHVRCDLLLLAFHHDCEASPAMWNYQMMPFGKISQQLCGVKKLPWSCDSRYFWGWLNAVFNKVDYDRIRDVGPDRAASEWLLRCGAMVRYHGQERWQKDYNHLPTGPLDKYKIQAIDATDSCIMSIGFDHMEGLEHVEKIRLCKCHYIEDDCLLRLSQLENLQKTILEMEIISCGNITDKGIIALRHLRNLKYLLLSDLPGVREKENLVQAFKTALPSLELKLQLK

SEQ ID NO: 18010 - protein, 40 aa, Artificial Sequence
  Synthetic polypeptide
GHSNKVPFWKQRACLRRHQCQHLDLGFPSMRNSTQASQPC

SEQ ID NO: 18011 - protein, 355 aa, Artificial Sequence
  Synthetic polypeptide
HPYKELKVEGGALLPFCLLPCEDTATRCHFGSREHASADTSASTLILDFPACGTQLKHPNLVNLLEVFRRKRRLHLVFEYCDHTVLHELDRYQRGVPEHLVKSITWQTLQAVNFCHKHNCIHRDVKPENILITKHSVIKLCDFGFARLLTGPSDYYTDYVATRWYRSPELLVGDTQYGPPVDVWAIGCVFAELLSGVPLWPGKSDVDQLYLIRKTLGDLIPRHQQVFSTNQYFSGVKIPDPEDMEPLELKFPNISYPALGLLKGCLHMDPTQRLTCEQLLHHPYFENIREIEDLAKEHNKPTRKTLRKSRKHHCFTETSKLQYLPQLTGSSILPALDNKKYYCDTKKLNYRFPNI

SEQ ID NO: 18012 - protein, 55 aa, Artificial Sequence
  Synthetic polypeptide
SWISQHAELNSSIPTLLTSWKSSGGNGGFTWCLNIVTTQFSMSWTDTKEGYQNIS

SEQ ID NO: 18013 - protein, 273 aa, Artificial Sequence
  Synthetic polypeptide
HPYKELKVEGGALLPFCLLPCEDTATRCHFGSREHASADTSASTLILDFPACGTQLKHPNLVNLLEVFRRKRRLHLVFEYCDHTVLHELDRYQRGVPEHLVKSITWQTLQAVNFCHKHNCIHRDVKPENILITKHSVIKLCDFGFARLLTGPSDYYTDYVATRWYRSPELLVGDTQYGPPVDVWAIGCVFAELLSGVPLWPGKSDVDQLYLIRKTLGDLIPRHQQVFSTNQYFSGVKIPDPEDMEPLELKFPNISYPALGLLKGRVPIASRTE

SEQ ID NO: 18014 - protein, 59 aa, Artificial Sequence
  Synthetic polypeptide
SQLLGRLRQEDLLNPGGRGCSELRLCHCTPTPATDPMQSFVIPLDLQTGMPELNGQLQK

SEQ ID NO: 18015 - protein, 20 aa, Artificial Sequence
  Synthetic polypeptide
DCATALQPQQQTPCNHSSYH

SEQ ID NO: 18016 - protein, 547 aa, Artificial Sequence
  Synthetic polypeptide
AEIVPLHSNPSNRPHAIIRHTIRSTNRNARAERTASEINFDKLQFEPPLRKETEARDEMGLSSDPNFMLQWNPFVDGANTGKSTSKRAIPPPLPPKPRISSYPEDNFPDEEKASTIKHCPDSESRAPQILRRQSSPSCGPVAETSSIGNGDGISKLMSENTEGSAQAPQLPRKKDKRDFPKPAINGLPPTPKVLMGACFSKVFDGCPLKINCATSWIHPDTKDQYIIFGTEDGIYTLNLNELHEATMEQLFPRKCTWLYVINNTLMSLSVGKTFQLYSHNLIALFEHAKKPGLAAHIQTHRFPDRILPRKFALTTKIPDTKGCHKCCIVRNPYTGHKYLCGALQSGIVLLQWYEPMQKFMLIKHFDFPLPSPLNVFEMLVIPEQEYPMVCVAISKGTESNQVVQFETINLNSASSWFTEIGAGSQQLDSIHVTQLERDTVLVCLDKFVKIVNLQGKLKSSKKLASELSFDFRIESVVCLQDSVLAFWKHGMQGKSFKSDEVTQEISDETRVFRLLGSDRVVVLESRPTENPTAHSNLYILAGHENSY

SEQ ID NO: 18017 - protein, 28 aa, Artificial Sequence
  Synthetic polypeptide
PTCYWTIIRIANSLCMQRNLTGSCLFAY

SEQ ID NO: 18018 - protein, 745 aa, Artificial Sequence
  Synthetic polypeptide
DQPSQHVTGPLSELQIAYVCRETLQGLAYLHTKGKMHRDIKGANILLTDHGDVKLADFGVAAKITATIAKRKSFIGTPYWMAPEVAAVEKNGGYNQLCDIWAVGITAIELGELQPPMFDLHPMRALFLMSKSNFQPPKLKDKTKWSSTFHNFVKIALTKNPKKRPTAERLLTHTFVAQPGLSRALAVELLDKVNNPDNHAHYTEADDDDFEPHAIIRHTIRSTNRNARAERTASEINFDKLQFEPPLRKETEARDEMGLSSDPNFMLQWNPFVDGANTGKSTSKRAIPPPLPPKPRISSYPEDNFPDEEKASTIKHCPDSESRAPQILRRQSSPSCGPVAETSSIGNGDGISKLMSENTEGSAQAPQLPRKKDKRDFPKPAINGLPPTPKVLMGACFSKVFDGCPLKINCATSWIHPDTKDQYIIFGTEDGIYTLNLNELHEATMEQLFPRKCTWLYVINNTLMSLSVGKTFQLYSHNLIALFEHAKKPGLAAHIQTHRFPDRILPRKFALTTKIPDTKGCHKCCIVRNPYTGHKYLCGALQSGIVLLQWYEPMQKFMLIKHFDFPLPSPLNVFEMLVIPEQEYPMVCVAISKGTESNQVVQFETINLNSASSWFTEIGAGSQQLDSIHVTQLERDTVLVCLDKFVKIVNLQGKLKSSKKLASELSFDFRIESVVCLQDSVLAFWKHGMQGKSFKSDEVTQEISDETRVFRLLGSDRVVVLESRPTENPTAHSNLYILAGHENSY

SEQ ID NO: 18019 - protein, 31 aa, Artificial Sequence
  Synthetic polypeptide
HACNSSTLGGQGREFETSLANMLLDHYQNCK

SEQ ID NO: 18020 - protein, 74 aa, Artificial Sequence
  Synthetic polypeptide
DQPSQHVTGPLSELQIAYVCRETLQGLAYLHTKGKMHRDIKGANILLTDHGDVKLADFGVAAKITATIAKRKSF

SEQ ID NO: 18021 - protein, 36 aa, Artificial Sequence
  Synthetic polypeptide
DQPSQHVTGPLSELQIAYVCRETLQGLAYLHTKGKM

SEQ ID NO: 18022 - protein, 44 aa, Artificial Sequence
  Synthetic polypeptide
MECLLQICFPGKFLNIFQVLAQTSYVVLPDQWNQLIGLETTMNH

SEQ ID NO: 18023 - protein, 14 aa, Artificial Sequence
  Synthetic polypeptide
LKHPMWSCLTNGIS

SEQ ID NO: 18024 - protein, 461 aa, Artificial Sequence
  Synthetic polypeptide
PMESVDWVGDYNEPLTGFSWRGGSERETTGIQIWSEIFLINKPDGKKVAVLLMDTQGTFDSQSTLRDSATVFALSTMISSIQVYNLSQNVQEDDLQHLQLFTEYGRLAMEETFLKPFQSLIFLVRDWSFPYEFSYGADGGAKFLEKRLKVSGNQHEELQNVRKHIHSCFTNISCFLLPHPGLKVATNPNFDGKLKEIDDEFIKNLKILIPWLLSPESLDIKEINGNKITCRGLVEYFKAYIKIYQGEELPHPKSMLQATAEANNLAAVATAKDTYNKKMEEICGGDKPFLAPNDLQTKHLQLKEESVKLFRGVKKMGGEEFSRRYLQQLESEIDELYIQYIKHNDSKNIFHAARTPATLFVVIFITYVIAGVTGFIGLDIIASLCNMIMGLTLITLCTWAYIRYSGEYRELGAVIDQVAAALWDQALYKLYSAAATHRHLYHQAFPTPKSESTEQSEKKKM

SEQ ID NO: 18025 - protein, 37 aa, Artificial Sequence
  Synthetic polypeptide
MECLLQICFPGKFLNIFQVLAQTSYVVLPDQWNQLIG

SEQ ID NO: 18026 - protein, 7 aa, Artificial Sequence
  Synthetic polypeptide
PMESVDW

SEQ ID NO: 18027 - protein, 466 aa, Artificial Sequence
  Synthetic polypeptide
PMESVDWVGDYNEPLTGFSWRGGSERETTGIQIWSEIFLINKPDGKKVAVLLMDTQGTFDSQSTLRDSATVFALSTMISSIQVYNLSQNVQEDDLQHLQLFTEYGRLAMEETFLKPFQSLIFLVRDWSFPYEFSYGADGGAKFLEKRLKVSGNQHEELQNVRKHIHSCFTNISCFLLPHPGLKVATNPNFDGKLKEIDDEFIKNLKILIPWLLSPESLDIKEINGNKITCRGLVEYFKAYIKIYQGEELPHPKSMLQATAEANNLAAVATAKDTYNKKMEEICGGDKPFLAPNDLQTKHLQLKEESVKLFRGVKKMGGEEFSRRYLQQLESEIDELYIQYIKHNDSKNIFHAARTPATLFVVIFITYVIAGVTGFIGLDIIASLCNMIMGLTLITLCTWAYIRYSGEYRELGAVIDQVAAALWDQGPSHQALYKLYSAAATHRHLYHQAFPTPKSESTEQSEKKKM

SEQ ID NO: 18028 - protein, 466 aa, Artificial Sequence
  Synthetic polypeptide
PMESVDWVGDYNEPLTGFSWRGGSERETTGIQIWSEIFLINKPDGKKVAVLLMDTQGTFDSQSTLRDSATVFALSTMISSIQVYNLSQNVQEDDLQHLQLFTEYGRLAMEETFLKPFQSLIFLVRDWSFPYEFSYGADGGAKFLEKRLKVSGNQHEELQNVRKHIHSCFTNISCFLLPHPGLKVATNPNFDGKLKEIDDEFIKNLKILIPWLLSPESLDIKEINGNKITCRGLVEYFKAYIKIYQGEELPHPKSMLQATAEANNLAAVATAKDTYNKKMEEICGGDKPFLAPNDLQTKHLQLKEESVKLFRGVKKMGGEEFSRRYLQQLESEIDELYIQYIKHNDSKNIFHAARTPATLFVVIFITYVIAGVTGFIGLDIIASLCNMIMGLTLITLCTWAYIRYSGEYRELGAVIDQVAAALWDQGSTNEALYKLYSAAATHRHLYHQAFPTPKSESTEQSEKKKM

SEQ ID NO: 18029 - protein, 38 aa, Artificial Sequence
  Synthetic polypeptide
PMESVDWVGDYNEPLTGFSWRGGSERETTGIQIWSEIF

SEQ ID NO: 18030 - protein, 48 aa, Artificial Sequence
  Synthetic polypeptide
EAEDAVSQDHASTLQPARQSETPSQKKKSSEFRRHRAECKPANVPDEI

SEQ ID NO: 18031 - protein, 388 aa, Artificial Sequence
  Synthetic polypeptide
AKIMLVHFSLHDRARLHLKKRKVQNLEDTVQNVNLQMSRMKSDLRVTQQEKEALKQEVMSLHKQLQNAGGKSWAPEIATHPSGLHNQQKRLSWDKLDHLMNEEQQLLWQENERLQTMVQNTKAELTHSREKVRQLESNLLPKHQKHLNPSGTMNPTEQEKLSLKRECDQFQKEQSPANRKVSQMNSLEQELETIHLENEGLKKKQVKLDEQLMEMQHLRSTATPSPSPHAWDLQLLQQQACPMVPREQFLQLQRQLLQAERINQHLQEELENRTSETNTPQGNQEQLVTVMEERMIEVEQKLKLVKRLLQEKVNQLKEQLCKNTKADAMVKDLYVENAQLLKALEVTEQRQKTAEKKNYLLEEKIASLSNIVRNLTPAPLTSTPPLRS

SEQ ID NO: 18032 - protein, 20 aa, Artificial Sequence
  Synthetic polypeptide
YTSACTTERDSISKKEKFRI

SEQ ID NO: 18033 - protein, 244 aa, Artificial Sequence
  Synthetic polypeptide
AKIMLVHFSLHDRARLHLKKRKVQNLEDTVQNVNLQMSRMKSDLRVTQQEKEALKQEVMSLHKQLQNAGGKSWAPEIATHPSGLHNQQKRLSWDKLDHLMNEEQQLLWQENERLQTMVQNTKAELTHSREKVRQLESNLLPKHQKHLNPSGTMNPTEQEKLSLKRECDQFQKEQSPANRKVSQMNSLEQELETIHLENEGLKKKQVKLDEQLMENSVVGSSREGCSSLPEIVCEDAAPEVHCDA

SEQ ID NO: 18034 - protein, 345 aa, Artificial Sequence
  Synthetic polypeptide
AKIMLVHFSLHDRARLHLKKRKVQNLEDTVQNVNLQMSRMKSDLRVTQQEKEALKQEVMSLHKQLQNAGGKSWAPEIATHPSGLHNQQKRLSWDKLDHLMNEEQQLLWQENERLQTMVQNTKAELTHSREKVRQLESNLLPKHQKHLNPSGTMNPTEQEKLSLKRECDQFQKEQSPANRKVSQMNSLEQELETIHLENEGLKKKQVKLDEQLMEMQHLRSTATPSPSPHAWDLQLLQQQACPMVPREQFLQLQRQLLQAERINQHLQEELENRTSETNTPQGNQEQLVTVMEERMIEVEQKLKLVKRLLQEKVNQLKEQVSLPGHLCSPTSHSSFNSSFTSLYCH

SEQ ID NO: 18035 - protein, 301 aa, Artificial Sequence
  Synthetic polypeptide
AKIMLVHFSLHDRARLHLKKRKVQNLEDTVQNVNLQMSRMKSDLRVTQQEKEALKQEVMSLHKQLQNAGGKSWAPEIATHPSGLHNQQKRLSWDKLDHLMNEEQQLLWQENERLQTMVQNTKAELTHSREKVRQLESNLLPKHQKHLNPSGTMNPTEQEKLSLKRECDQFQKEQSPANRKVSQMNSLEQELETIHLENEGLKKKQVKLDEQLMEMQHLRSTATPSPSPHAWDLQLLQQQACPMVPREQFLQLQRQLLQAERINQHLQEELENRTSETNTPQALLPEQRAVHADSYRRIGHL

SEQ ID NO: 18036 - protein, 48 aa, Artificial Sequence
  Synthetic polypeptide
GWVQWLTTVIPALWEAEAGRSPEVRSSRPAWPTWWSWLCHMTPPCPAT

SEQ ID NO: 18037 - protein, 31 aa, Artificial Sequence
  Synthetic polypeptide
SQHFGKPKRADHLRSGVQDQPGQHGGPGSAI

SEQ ID NO: 18038 - protein, 610 aa, Artificial Sequence
  Synthetic polypeptide
GQEFKTSLANMVVLALPYDTPVPGYMNNTVNTMRLWSARAPNDFNLRDFNVGDYIQAVLDRNLAENISRVLYPNDNFFEGKELRLKQEYFVVAATLQDIIRRFKASKFGSTRGAGTVFDAFPDQVAIQLNDTHPALAIPELMRIFVDIEKLPWSKAWELTQKTFAYTNHTVLPEALERWPVDLVEKLLPRHLEIIYEINQKHLDRIVALFPKDVDRLRRMSLIEEEGSKRINMAHLCIVGSHAVNGVAKIHSDIVKTKVFKDFSELEPDKFQNKTNGITPRRWLLLCNPGLAELIAEKIGEDYVKDLSQLTKLHSFLGDDVFLRELAKVKQENKLKFSQFLETEYKVKINPSSMFDVQVKRIHEYKRQLLNCLHVITMYNRIKKDPKKLFVPRTVIIGGKAAPGYHMAKMIIKLITSVADVVNNDPMVGSKLKVIFLENYRVSLAEKVIPATDLSEQISTAGTEASGTGNMKFMLNGALTIGTMDGANVEMAEEAGEENLFIFGMRIDDVAALDKKGYEAKEYYEALPELKLVIDQIDNGFFSPKQPDLFKDIINMLFYHDRFKVFADYEAYVKCQDKVSQLYMKSDAVRPKHWPGKDSVQTGPLRETVR

SEQ ID NO: 18039 - protein, 638 aa, Artificial Sequence
  Synthetic polypeptide
GQEFKTSLANMVVLALPYDTPVPGYMNNTVNTMRLWSARAPNDFNLRDFNVGDYIQAVLDRNLAENISRVLYPNDNFFEGKELRLKQEYFVVAATLQDIIRRFKASKFGSTRGAGTVFDAFPDQVAIQLNDTHPALAIPELMRIFVDIEKLPWSKAWELTQKTFAYTNHTVLPEALERWPVDLVEKLLPRHLEIIYEINQKHLDRIVALFPKDVDRLRRMSLIEEEGSKRINMAHLCIVGSHAVNGVAKIHSDIVKTKVFKDFSELEPDKFQNKTNGITPRRWLLLCNPGLAELIAEKIGEDYVKDLSQLTKLHSFLGDDVFLRELAKVKQENKLKFSQFLETEYKVKINPSSMFDVQVKRIHEYKRQLLNCLHVITMYNRIKKDPKKLFVPRTVIIGGKAAPGYHMAKMIIKLITSVADVVNNDPMVGSKLKVIFLENYRVSLAEKVIPATDLSEQISTAGTEASGTGNMKFMLNGALTIGTMDGANVEMAEEAGEENLFIFGMRIDDVAALDKKGYEAKEYYEALPELKLVIDQIDNGFFSPKQPDLFKDIINMLFYHDRFKVFADYEAYVKCQDKVSQLYMNPKAWNTMVLKNIAASGKFSSDRTIKEYAQNIWNVEPSDLKISLSNESNKVNGN

SEQ ID NO: 18040 - protein, 9 aa, Artificial Sequence
  Synthetic polypeptide
SACICELLS

SEQ ID NO: 18041 - protein, 599 aa, Artificial Sequence
  Synthetic polypeptide
RCHMHEVFSEVPAYVNCSVKILCHQLLVQVCDLLRLKDCHLFGLSVIQNNEHVYMELSQKLYKYCPKEWKKEASKGIDQFGPPMIIHFRVQYYVENGRLISDRAARYYYYWHLRKQVLHSQCVLREEAYFLLAAFALQADLGNFKRNKHYGKYFEPEAYFPSWVVSKRGKDYILKHIPNMHKDQFALTASEAHLKYIKEAVRLDDVAVHYYRLYKDKREIEASLTLGLTMRGIQIFQNLDEEKQLLYDFPWTNVGKLVFVGKKFEILPDGLPSARKLIYYTGCPMRSRHLLQLLSNSHRLYMNLQPVLRHIRKLEENEEKKQYRESYISDNLDLDMDQLEKRSRASGSSAGSMKHKRLSRHSTASHSSSHTSGIEADTKPRDTGPEDSYSSSAIHRKLKTCSSMTSHGSSHTSGVESGGKDRLEEDLQDDEIEMLVDDPRDLEQMNEESLEVSPDMCIYITEDMLMSRKLNGHSGLIVKEIGSSTSSSSETVVKLRGQSTDSLPQTICRKPKTSTDRHSLSLDDIRLYQKDFLRIAGLCQDTAQSYTFGCGHELDEEGLYCNSCLAQQCINIQDAFPVKRTSKYFSLDLTHDEVPEFVV

SEQ ID NO: 18042 - protein, 20 aa, Artificial Sequence
  Synthetic polypeptide
IAQLRFCVTSCWSRFVTCSG

SEQ ID NO: 18043 - protein, 607 aa, Artificial Sequence
  Synthetic polypeptide
RCHMHEVFSEVPAYVNCSVKILCHQLLVQVCDLLRLKDCHLFGLSVIQNNEHVYMELSQKLYKYCPKEWKKEASKVRQYEVTWGIDQFGPPMIIHFRVQYYVENGRLISDRAARYYYYWHLRKQVLHSQCVLREEAYFLLAAFALQADLGNFKRNKHYGKYFEPEAYFPSWVVSKRGKDYILKHIPNMHKDQFALTASEAHLKYIKEAVRLDDVAVHYYRLYKDKREIEASLTLGLTMRGIQIFQNLDEEKQLLYDFPWTNVGKLVFVGKKFEILPDGLPSARKLIYYTGCPMRSRHLLQLLSNSHRLYMNLQPVLRHIRKLEENEEKKQYRESYISDNLDLDMDQLEKRSRASGSSAGSMKHKRLSRHSTASHSSSHTSGIEADTKPRDTGPEDSYSSSAIHRKLKTCSSMTSHGSSHTSGVESGGKDRLEEDLQDDEIEMLVDDPRDLEQMNEESLEVSPDMCIYITEDMLMSRKLNGHSGLIVKEIGSSTSSSSETVVKLRGQSTDSLPQTICRKPKTSTDRHSLSLDDIRLYQKDFLRIAGLCQDTAQSYTFGCGHELDEEGLYCNSCLAQQCINIQDAFPVKRTSKYFSLDLTHDEVPEFVV

SEQ ID NO: 18044 - protein, 46 aa, Artificial Sequence
  Synthetic polypeptide
RCHMHEVFSEVPAYVNCSVKILCHQLLVQVCDLLRLKDCHLFGLSV

SEQ ID NO: 18045 - protein, 99 aa, Artificial Sequence
  Synthetic polypeptide
NINVVYLYNGLFSHEKEQVFLKDLSSTPMASNNTASIAQARKLVEQLKMEANIDRIKVSKAAADLMAYCEAHAKEDPLLTPVPASENPFREKKFFCAIL

SEQ ID NO: 18046 - protein, 18 aa, Artificial Sequence
  Synthetic polypeptide
MWCIYTMDYSAMKRNKCF

SEQ ID NO: 18047 - protein, 32 aa, Artificial Sequence
  Synthetic polypeptide
KGTSVSERSIQHSDGQQQHRQHSTSQEAGRAA

SEQ ID NO: 18048 - protein, 21 aa, Artificial Sequence
  Synthetic polypeptide
NINVVYLYNGLFSHEKEQVFL

SEQ ID NO: 18049 - protein, 6 aa, Artificial Sequence
  Synthetic polypeptide
KGTSVS

SEQ ID NO: 18050 - protein, 60 aa, Artificial Sequence
  Synthetic polypeptide
NINVVYLYNGLFSHEKEQVFLKDLSSTPMASNNTASIAQARKLVEQLKMEANIDRIKEVH

SEQ ID NO: 18051 - protein, 121 aa, Artificial Sequence
  Synthetic polypeptide
GAFPNFTRHFSLLLPCEEGCVCFHLCRYCKFPEASPAVQNLFLKDLSSTPMASNNTASIAQARKLVEQLKMEANIDRIKVSKAAADLMAYCEAHAKEDPLLTPVPASENPFREKKFFCAIL

SEQ ID NO: 18052 - protein, 46 aa, Artificial Sequence
  Synthetic polypeptide
WFYKGLSPILLGTFPCCCHVKKDVFASTYAVIVNFLRPPQPCRTCF

SEQ ID NO: 18053 - protein, 36 aa, Artificial Sequence
  Synthetic polypeptide
GLPSRAELVSERSIQHSDGQQQHRQHSTSQEAGRAA

SEQ ID NO: 18054 - protein, 43 aa, Artificial Sequence
  Synthetic polypeptide
GAFPNFTRHFSLLLPCEEGCVCFHLCRYCKFPEASPAVQNLFL

SEQ ID NO: 18055 - protein, 10 aa, Artificial Sequence
  Synthetic polypeptide
GLPSRAELVS

SEQ ID NO: 18056 - protein, 82 aa, Artificial Sequence
  Synthetic polypeptide
GAFPNFTRHFSLLLPCEEGCVCFHLCRYCKFPEASPAVQNLFLKDLSSTPMASNNTASIAQARKLVEQLKMEANIDRIKEVH

SEQ ID NO: 18057 - protein, 105 aa, Artificial Sequence
  Synthetic polypeptide
KLLCNQSQQDFNHGSPPRGPRPSVSAGGKTCWSTTVAPPGMTSTCPSAMTWATSSPCSATERATSAGVWTKMAERCRAPAPSQAPPLRVYPPSLHPWSGPRPGQM

SEQ ID NO: 18058 - protein, 23 aa, Artificial Sequence
  Synthetic polypeptide
NCFATKASRTSTMEAHPEAPDHL

SEQ ID NO: 18059 - protein, 379 aa, Artificial Sequence
  Synthetic polypeptide
TALQPKPAGLQPWKPTQRPPTICERWRENLLEHYGGTPRDDQYVPQCDDLGHFIPLQCHGKSDFCWCVDKDGREVQGTRSQPGTTPACIPTVAPPMVRPTPRPDVTPPSVGTFLLYTQGQQIGYLPLNGTRLQKDAAKTLLSLHGSIIVGIDYDCRERMVYWTDVAGRTISRAGLELGAEPETIVNSGLISPEGLAIDHIRRTMYWTDSVLDKIESALLDGSERKVLFYTDLVNPRAIAVDPIRGNLYWTDWNREAPKIETSSLDGENRRILINTDIGLPNGLTFDPFSKLLCWADAGTKKLECTLPDGTGRRVIQNNLKYPFSIVSYADHFYHTDWRRDGVVSVNKHSGQFTDEYLPEQRSHLYGITAVYPYCPTGRK

SEQ ID NO: 18060 - protein, 33 aa, Artificial Sequence
  Synthetic polypeptide
VVSPYLRFPFHDFSYCSQPQSENRLQDLILSYG

SEQ ID NO: 18061 - protein, 33 aa, Artificial Sequence
  Synthetic polypeptide
SPLICGFLSTISVTAVNLSLKIDYRISFFLMAE

SEQ ID NO: 18062 - protein, 14 aa, Artificial Sequence
  Synthetic polypeptide
PQARPSLRGLSTAF

SEQ ID NO: 18063 - protein, 46 aa, Artificial Sequence
  Synthetic polypeptide
GLTSGKTISERTFDCILEIFQELWIVLVVLNVVCGESFRLRVWALL

SEQ ID NO: 18064 - protein, 237 aa, Artificial Sequence
  Synthetic polypeptide
GRAWWLTPVIPALWEAEADGSRGQEIKTILANTEWTYPMRREMQEILPGLFLGPYSSAMKSKLPVLQKHGITHIICIRQNIEANFIKPNFQQLFRYLVLDIADNPVENIIRFFPMTKEFIDGSLQMGGKVLVHGNAGISRSAAFVIAYIMETFGMKYRDAFAYVQERRFCINPNAGFVHQLQEYEAIYLAKLTIQMMSPLQIERSLSVHSGTTGSLKRTHEEEDDFGTMQVATAQNG

SEQ ID NO: 18065 - protein, 29 aa, Artificial Sequence
  Synthetic polypeptide
SQHFGRPRRTDHEVRRSRPSWLTRSGPTL

SEQ ID NO: 18066 - protein, 49 aa, Artificial Sequence
  Synthetic polypeptide
HGVDLPYETRDAGNFTWIVLRPIFICYEKQATCTTETWNNPYNMHTTKY

SEQ ID NO: 18067 - protein, 83 aa, Artificial Sequence
  Synthetic polypeptide
ESTGTMSGTGCYGGLGRSCLVAACLLLYLSDTISPEQAIDSLRDLRGSGAIQTIKQYNYLHEFRDKLAAHLSSRDSQSRSVSR

SEQ ID NO: 18068 - protein, 23 aa, Artificial Sequence
  Synthetic polypeptide
CTRKALAQCLVQAAMEDLGDLVL

SEQ ID NO: 18069 - protein, 38 aa, Artificial Sequence
  Synthetic polypeptide
GLKGNNALGKHWHNVWYRLLWRTWEILSCSCLSPTIPV

SEQ ID NO: 18070 - protein, 82 aa, Artificial Sequence
  Synthetic polypeptide
ESTGTMSGTGCYGGLGRSCLAACLLLYLSDTISPEQAIDSLRDLRGSGAIQTIKQYNYLHEFRDKLAAHLSSRDSQSRSVSR

SEQ ID NO: 18071 - protein, 40 aa, Artificial Sequence
  Synthetic polypeptide
CTRKALAQCLVQAAMEDLGDLVLLLVSYYTCLTQYHQSKP

SEQ ID NO: 18072 - protein, 37 aa, Artificial Sequence
  Synthetic polypeptide
GLKGNNALGKHWHNVWYRLLWRTWEILSCCLSPTIPV

SEQ ID NO: 18073 - protein, 74 aa, Artificial Sequence
  Synthetic polypeptide
ESTGTMSGTGCYGGLGRSCLVAACLLLYLSDTISPEQAIDSLRDLRGSGAIQTIKDLPTSQFLPQSVLGMDPLT

SEQ ID NO: 18074 - protein, 56 aa, Artificial Sequence
  Synthetic polypeptide
SSVCYTRQSVIPARSLVYLSESLVVCDVAEDLVEKLRKFRFRKETNNAAIIRHFTR

SEQ ID NO: 18075 - protein, 29 aa, Artificial Sequence
  Synthetic polypeptide
NSCPFSSNLVFCLLYKTICYTSQKPSISE

SEQ ID NO: 18076 - protein, 160 aa, Artificial Sequence
  Synthetic polypeptide
SSVCYTRQSVIPARSLVYLSESLVVCDVAEDLVEKLRKFRFRKETNNAAIIMKIDKDKRLVVLDEELEGISPDELKDELPERQPRFIVYSYKYQHDDGRVSYPLCFIFSSPVGCKPEQQMMYAGSKNKLVQTAELTKVFEIRNTEDLTEEWLREKLGFFH

SEQ ID NO: 18077 - protein, 156 aa, Artificial Sequence
  Synthetic polypeptide
SSVCYTRQSVIPARSLVYLSESLVVCDVAEDLVEKLRKFRFRKETNNAAIIMKIDKDKRLVVLDEELEGISPDELKDELPERQPRTFIVYSYKYQHDDGRVSYPLCFIFSSPVGCKPEQQMMYAGSKNKLVQTAELTKVFEIRNTEDLTEEWLREK

SEQ ID NO: 18078 - protein, 70 aa, Artificial Sequence
  Synthetic polypeptide
PFSCIPECYTLLFLKHSLPSFFPFGFWDTELLLLLLLVHLFPFQTILLSLDNARRSPRVSLWLFVMLPKI

SEQ ID NO: 18079 - protein, 44 aa, Artificial Sequence
  Synthetic polypeptide
SILFLHSSPLASGIQSSSYFSYWSICFPFRLFSFPWTMLEGVPE

SEQ ID NO: 18080 - protein, 92 aa, Artificial Sequence
  Synthetic polypeptide
LHSRVLYSLVFEAFSSFILPLWLLGYRAPPTSPIGPSVSLSDYSPFPGQCSKESQSESLVVCDVAEDLVEKLRKFRFRKETNNAAIIRHFTR

SEQ ID NO: 18081 - protein, 196 aa, Artificial Sequence
  Synthetic polypeptide
LHSRVLYSLVFEAFSSFILPLWLLGYRAPPTSPIGPSVSLSDYSPFPGQCSKESQSESLVVCDVAEDLVEKLRKFRFRKETNNAAIIMKIDKDKRLVVLDEELEGISPDELKDELPERQPRFIVYSYKYQHDDGRVSYPLCFIFSSPVGCKPEQQMMYAGSKNKLVQTAELTKVFEIRNTEDLTEEWLREKLGFFH

SEQ ID NO: 18082 - protein, 192 aa, Artificial Sequence
  Synthetic polypeptide
LHSRVLYSLVFEAFSSFILPLWLLGYRAPPTSPIGPSVSLSDYSPFPGQCSKESQSESLVVCDVAEDLVEKLRKFRFRKETNNAAIIMKIDKDKRLVVLDEELEGISPDELKDELPERQPRTFIVYSYKYQHDDGRVSYPLCFIFSSPVGCKPEQQMMYAGSKNKLVQTAELTKVFEIRNTEDLTEEWLREK

SEQ ID NO: 18083 - protein, 54 aa, Artificial Sequence
  Synthetic polypeptide
PGVWWHTAVVPATGEAESESLVVCDVAEDLVEKLRKFRFRKETNNAAIIRHFTR

SEQ ID NO: 18084 - protein, 20 aa, Artificial Sequence
  Synthetic polypeptide
SQLLGRLRVSLWLFVMLPKI

SEQ ID NO: 18085 - protein, 158 aa, Artificial Sequence
  Synthetic polypeptide
PGVWWHTAVVPATGEAESESLVVCDVAEDLVEKLRKFRFRKETNNAAIIMKIDKDKRLVVLDEELEGISPDELKDELPERQPRFIVYSYKYQHDDGRVSYPLCFIFSSPVGCKPEQQMMYAGSKNKLVQTAELTKVFEIRNTEDLTEEWLREKLGFFH

SEQ ID NO: 18086 - protein, 154 aa, Artificial Sequence
  Synthetic polypeptide
PGVWWHTAVVPATGEAESESLVVCDVAEDLVEKLRKFRFRKETNNAAIIMKIDKDKRLVVLDEELEGISPDELKDELPERQPRTFIVYSYKYQHDDGRVSYPLCFIFSSPVGCKPEQQMMYAGSKNKLVQTAELTKVFEIRNTEDLTEEWLREK

SEQ ID NO: 18087 - protein, 66 aa, Artificial Sequence
  Synthetic polypeptide
IQECHFLTGPEAPSYPGMSRGEEFTQFIQSESLVVCDVAEDLVEKLRKFRFRKETNNAAIIRHFTR

SEQ ID NO: 18088 - protein, 34 aa, Artificial Sequence
  Synthetic polypeptide
QAQKLQVILGCPEERNSPSLYRVSLWLFVMLPKI

SEQ ID NO: 18089 - protein, 29 aa, Artificial Sequence
  Synthetic polypeptide
PRMSLSNRPRSSKLSWDVQRRGIHPVYTE

SEQ ID NO: 18090 - protein, 170 aa, Artificial Sequence
  Synthetic polypeptide
IQECHFLTGPEAPSYPGMSRGEEFTQFIQSESLVVCDVAEDLVEKLRKFRFRKETNNAAIIMKIDKDKRLVVLDEELEGISPDELKDELPERQPRFIVYSYKYQHDDGRVSYPLCFIFSSPVGCKPEQQMMYAGSKNKLVQTAELTKVFEIRNTEDLTEEWLREKLGFFH

SEQ ID NO: 18091 - protein, 166 aa, Artificial Sequence
  Synthetic polypeptide
IQECHFLTGPEAPSYPGMSRGEEFTQFIQSESLVVCDVAEDLVEKLRKFRFRKETNNAAIIMKIDKDKRLVVLDEELEGISPDELKDELPERQPRTFIVYSYKYQHDDGRVSYPLCFIFSSPVGCKPEQQMMYAGSKNKLVQTAELTKVFEIRNTEDLTEEWLREK

SEQ ID NO: 18092 - protein, 88 aa, Artificial Sequence
  Synthetic polypeptide
REPWDRSQTSCDPDSAVFLLCGLSKAFEALGNPTPSRRLALWAVAWADGTRASTRSPLGTSLPPAWASWAPVDSSAPTSATPQLPPPS

SEQ ID NO: 18093 - protein, 104 aa, Artificial Sequence
  Synthetic polypeptide
GSPGTGVRPVVTLTLLFSCYVASQKHSRLWAIQLPPDGWLCGRWHGQTEPAPVPDPLSERPFRPPGPLGHQWIRQLQPAQHHSYPHHHETRKTEPVVCQPRGQQ

SEQ ID NO: 18094 - protein, 159 aa, Artificial Sequence
  Synthetic polypeptide
LCCFLAMWPLKSIRGFGQSNSLPTAGSVGGGMGRRNPRQYQIPSRNVPSARLGLLGTSGFVSSNQRNTTATPTIMKQGRQNLWFANPGGSNSMPSRTHSSVQRTRSLPVHTSPQNMLMFQQPEFQLPVTEPDINNRLESLCLSMTEHALGDGVDRTSTI

SEQ ID NO: 18095 - protein, 195 aa, Artificial Sequence
  Synthetic polypeptide
LCCFLAMWPLKSIRGFGQSNSLPTAGSVGGGMGRRNPRQYQIPSRNVPSARLGLLGTSGFVSSNQRNTTATPTIMKQGRQNLWFANPGGSNSMPSRTHSSVQRTRSLPVHTSPQNMLMFQQPGSQVHSGLCLTDLRGWLSLSGAPSMPALTVPKSSQGEFQLPVTEPDINNRLESLCLSMTEHALGDGVDRTSTI

SEQ ID NO: 18096 - protein, 228 aa, Artificial Sequence
  Synthetic polypeptide
RVTFSSQGRVNPFKVSASSKEPAMSMNSARSTNILDNMGKSSKKSTALSRTTNNEKSPIIKPLIPKPKPKQASAASYFQKRNSQTNKTEEVKEENLKNVLSETPAICPPQNTENQRPKTGFQMWLEENRSNILSDNPDFSDEADIIKEGMIRFRVLSTEERKVWANKAKGETASEGTEAKKRKRVVDESDETENQEEKAKENLNLSKKQKPLDFSTNQKLSAFAFKQE

SEQ ID NO: 18097 - protein, 21 aa, Artificial Sequence
  Synthetic polypeptide
SQHFGRPEWADNELPLAAKDE

SEQ ID NO: 18098 - protein, 24 aa, Artificial Sequence
  Synthetic polypeptide
MGAVAHACNPSTLGGRSGRITSYL

SEQ ID NO: 18099 - protein, 230 aa, Artificial Sequence
  Synthetic polypeptide
RGAVTFSSQGRVNPFKVSASSKEPAMSMNSARSTNILDNMGKSSKKSTALSRTTNNEKSPIIKPLIPKPKPKQASAASYFQKRNSQTNKTEEVKEENLKNVLSETPAICPPQNTENQRPKTGFQMWLEENRSNILSDNPDFSDEADIIKEGMIRFRVLSTEERKVWANKAKGETASEGTEAKKRKRVVDESDETENQEEKAKENLNLSKKQKPLDFSTNQKLSAFAFKQE

SEQ ID NO: 18100 - protein, 23 aa, Artificial Sequence
  Synthetic polypeptide
SQHFGRPEWADNEVQLPLAAKDE

SEQ ID NO: 18101 - protein, 26 aa, Artificial Sequence
  Synthetic polypeptide
MGAVAHACNPSTLGGRSGRITRCSYL

SEQ ID NO: 18102 - protein, 35 aa, Artificial Sequence
  Synthetic polypeptide
LPGRLRQEDCLSFRVESCNPQYSNLVSLWAIFSCR

SEQ ID NO: 18103 - protein, 905 aa, Artificial Sequence
  Synthetic polypeptide
ASELKVATLNIVTWSPCGQYLAAGSINGLIIVWNVETKDCMERVKHEKGYAICGLAWHPTCGRISYTDAEGNLGLLENVCDPSGKTSSSKVSSRVEKDYNDLFDGDDMSNAGDFLNDNAVEIPSFSKGIINDDEDDEDLMMASGRPRQRSHILEDDENSVDISMLKTGSSLLKEEEEDGQEGSIHNLPLVTSQRPFYDGPMPTPRQKPFQSGSTPLHLTHRFMVWNSIGIIRCYNDEQDNAIDVEFHDTSIHHATHLSNTLNYTIADLSHEAILLACESTDELASKLHCLHFSSWDSSKEWIIDLPQNEDIEAICLGQGWAAAATSALLLRLFTIGGVQKEVFSLAGPVVSMAGHGEQLFIVYHRGTGFDGDQCLGVQLLELGKKKKQILHGDPLPLTRKSYLAWIGFSAEGTPCYVDSEGIVRMLNRGLGNTWTPICNTREHCKGKSDHYWVVGIHENPQQLRCIPCKGSRFPPTLPRPAVAILSFKLPYCQIATEKGQMEEQFWRSVIFHNHLDYLAKNGYEYEESTKNQATKEQQELLMKMLALSCKLEREFRCVELADLMTQNAVNLAIKYASRSRKLILAQKLSELAVEKAAELTATQVEEEEEEEDFRKKLNAGYSNTATEWSQPRFRNQVEEDAEDSGEADDEEKPEIHKPGQNSFSKSTNSSDVSAKSGAVTFSSQGRVNPFKVSASSKEPAMSMNSARSTNILDNMGKSSKKSTALSRTTNNEKSPIIKPLIPKPKPKQASAASYFQKRNSQTNKTEEVKEENLKNVLSETPAICPPQNTENQRPKTGFQMWLEENRSNILSDNPDFSDEADIIKEGMIRFRVLSTEERKVWANKAKGETASEGTEAKKRKRVVDESDETENQEEKAKENLNLSKKQKPLDFSTNQKLSAFAFKQE

SEQ ID NO: 18104 - protein, 6 aa, Artificial Sequence
  Synthetic polypeptide
KLQPSI

SEQ ID NO: 18105 - protein, 34 aa, Artificial Sequence
  Synthetic polypeptide
DQLLFVFPVSLLTVKTIRMKTFMMIYFHLINILL

SEQ ID NO: 18106 - protein, 8 aa, Artificial Sequence
  Synthetic polypeptide
IFYCDLWK

SEQ ID NO: 18107 - protein, 1196 aa, Artificial Sequence
  Synthetic polypeptide
ALKLKEMVEEGLVLYRNIFREIKKEKSQTEIMMCFYKVTPSMPASPASSSTSSPSSTSETVRPTPLRVPRQPSHCEDDKDEDLYDDLLPLNKYFIVTCGSDGDVRIWEDLDDDDPKFINVGEKAYSCALKSGKLVTAVSNNTIQVHTFPEGVPDGILTRFTTNANHVVFNGDGTKIAAGSSDFLVKIVDVMDSSQQKTFRGHDAPVLSLSFDPKDIFLASASCDGSVRVWQISDQTCAISWPLLQKCNDVINAKSICRLAWQPKSGKLLAIPVEKSVKLYRRESWSHQFDLSDNFISQTLNIVTWSPCGQYLAAGSINGLIIVWNVETKDCMERVKHEKGYAICGLAWHPTCGRISYTDAEGNLGLLENVCDPSGKTSSSKVSSRVEKDYNDLFDGDDMSNAGDFLNDNAVEIPSFSKGIINDDEDDEDLMMASGRPRQRSHILEDDENSVDISMLKTGSSLLKEEEEDGQEGSIHNLPLVTSQRPFYDGPMPTPRQKPFQSGSTPLHLTHRFMVWNSIGIIRCYNDEQDNAIDVEFHDTSIHHATHLSNTLNYTIADLSHEAILLACESTDELASKLHCLHFSSWDSSKEWIIDLPQNEDIEAICLGQGWAAAATSALLLRLFTIGGVQKEVFSLAGPVVSMAGHGEQLFIVYHRGTGFDGDQCLGVQLLELGKKKKQILHGDPLPLTRKSYLAWIGFSAEGTPCYVDSEGIVRMLNRGLGNTWTPICNTREHCKGKSDHYWVVGIHENPQQLRCIPCKGSRFPPTLPRPAVAILSFKLPYCQIATEKGQMEEQFWRSVIFHNHLDYLAKNGYEYEESTKNQATKEQQELLMKMLALSCKLEREFRCVELADLMTQNAVNLAIKYASRSRKLILAQKLSELAVEKAAELTATQVEEEEEEEDFRKKLNAGYSNTATEWSQPRFRNQVEEDAEDSGEADDEEKPEIHKPGQNSFSKSTNSSDVSAKSGAVTFSSQGRVNPFKVSASSKEPAMSMNSARSTNILDNMGKSSKKSTALSRTTNNEKSPIIKPLIPKPKPKQASAASYFQKRNSQTNKTEEVKEENLKNVLSETPAICPPQNTENQRPKTGFQMWLEENRSNILSDNPDFSDEADIIKEGMIRFRVLSTEERKVWANKAKGETASEGTEAKKRKRVVDESDETENQEEKAKENLNLSKKQKPLDFSTNQKLSAFAFKQE

SEQ ID NO: 18108 - protein, 235 aa, Artificial Sequence
  Synthetic polypeptide
ALKLKEMVEEGLVLYRNIFREIKKEKSQTEIMMCFYKVTPSMPASPASSSTSSPSSTSETVRPTPLRVPRQPSHCEDDKDEDLYDDLLPLNKYFIVTCGSDGDVRIWEDLDDDDPKFINVGEKAYSCALKSGKLVTAVSNNTIQVHTFPEGVPDGILTRFTTNANHVVFNGDGTKIAAGSSDFLVKIVDVMDSSQQKTFRGHDAPVLSLSFDPKDIFLASASCDGSVRVWQISDQ

SEQ ID NO: 18109 - protein, 15 aa, Artificial Sequence
  Synthetic polypeptide
DLLSHAELGTDHSRT

SEQ ID NO: 18110 - protein, 62 aa, Artificial Sequence
  Synthetic polypeptide
AMLSWELITAAHELGVAHPPGYPLFTLVAKLAITLFPFGSIAYRVNLLCGLFGAVAASLLFF

SEQ ID NO: 18111 - protein, 3 aa, Artificial Sequence
  Synthetic polypeptide
AGN

SEQ ID NO: 18112 - protein, 658 aa, Artificial Sequence
  Synthetic polypeptide
AMLSWELITAAHELGVAHPPGYPLFTLVAKLAITLFPFGSIAYRVNLLCGLFGAVAASLLFFTVFRLSGSSAGGILAAGVFSFSRLTWQWSIAAEVFSLNNLFVGLLMALTVHFEEAATAKERSKVAKIGAFCCGLSLCNQHTIILYVLCIIPWILFQLLKKKELSLGSLLKLSLYFSAGLLPYVHLPISSYLNHARWTWGDQTTLQGFLTHFLREEYGTFSLAKSEIGSSMSEILLSQVTNMRTELSFNIQALAVCANICLATKDRQNPSLVWLFTGMFCIYSLFFAWRANLDISKPLFMGVVERFWMQSNAVVAVLAGIGLAAVVSETNRVLNSNGLQCLEWLSATLFVVYQIYSNYSVCDQRTNYVIDKFAKNLLTSMPHDAIILLRGDLPGNSLRYMHYCEGLRPDISLVDQEMMTYEWYLPKMAKHLPGVNFPGNRWNPVEGILPSGMVTFNLYHFLEVNKQKETFVCIGIHEGDPTWKKNYSLWPWGSCDKLVPLEIVFNPEEWIKLTKSIYNWTEEYGRFDPSSWESVANEEMWQARMKTPFFIFNLAETAHMPSKVKAQLYAQAYDLYKEIVYLQKEHPVNWHKNYAIACERMLRLQARDADPEVLLSETIRHFRLYSQKAPNDPQQADILGALKHLRKELQSLRNRKNV

SEQ ID NO: 18113 - protein, 66 aa, Artificial Sequence
  Synthetic polypeptide
AMLSWELITAAHELGVAHPPGYPLFTLVAKLAITLFPFGSIAYRVNLLCGLFGAVAASLLFFTVFR

SEQ ID NO: 18114 - protein, 275 aa, Artificial Sequence
  Synthetic polypeptide
AMLSWELITAAHELGVAHPPGYPLFTLVAKLAITLFPFGSIAYRVNLLCGLFGAVAASLLFFTVFRLSGSSAGGILAAGVFSFSRLTWQWSIAAEVFSLNNLFVGLLMALTVHFEEAATAKERSKVAKIGAFCCGLSLCNQHTIILYVLCIIPWILFQLLKKKELSLGSLLKLSLYFSAGLLPYVHLPISSYLNHARWTWGDQTTLQGFLTHFLREEYGTFSLAKSEIGSSMSEILLSQVTNMRTELSFNIQALAVCANICLATKWNDSGCRAMQ

SEQ ID NO: 18115 - protein, 360 aa, Artificial Sequence
  Synthetic polypeptide
AMLSWELITAAHELGVAHPPGYPLFTLVAKLAITLFPFGSIAYRVNLLCGLFGAVAASLLFFTVFRLSGSSAGGILAAGVFSFSRLTWQWSIAAEVFSLNNLFVGLLMALTVHFEEAATAKERSKVAKIGAFCCGLSLCNQHTIILYVLCIIPWILFQLLKKKELSLGSLLKLSLYFSAGLLPYVHLPISSYLNHARWTWGDQTTLQGFLTHFLREEYGTFSLAKSEIGSSMSEILLSQVTNMRTELSFNIQALAVCANICLATKDRQNPSLVWLFTGMFCIYSLFFAWRANLDISKPLFMGVVERFWMQSNAVVAVLAGIGLAAVVSETNRVLNSNGLQCLEWLSATLFVVYQIYSNYR

SEQ ID NO: 18116 - protein, 44 aa, Artificial Sequence
  Synthetic polypeptide
TYLPGTLGMGPNNLHFSWLHVWDAGACRGWDSWSLVHLGSPLQH

SEQ ID NO: 18117 - protein, 112 aa, Artificial Sequence
  Synthetic polypeptide
SDSQCMVWTSSISITWSLLDMQILRLHHRHTSQELWEWGPTICILAGYMSGMLVPVGVGIAGALFILGALYSIKVMNRRRRNGFKRHKRKQREFNSMQDRVMLLADSSEDEF

SEQ ID NO: 18118 - protein, 24 aa, Artificial Sequence
  Synthetic polypeptide
GWARWLTPVIPALWDAKVQFRKVS

SEQ ID NO: 18119 - protein, 18 aa, Artificial Sequence
  Synthetic polypeptide
SQHFGTPRFSSGRCLRGH

SEQ ID NO: 18120 - protein, 234 aa, Artificial Sequence
  Synthetic polypeptide
MGTVAHACNPSTLGRQGSVPEGVLEDIKARTCFVSDLKRGLKIQAAKFNIDGNNERPSPPPNVDYPLDGEKILHILGSIRDSVVEILFEQDNEEQSVATLILDSLIQCPIDTRKQLAENLVVIGGTSMLPGFLHRLLAEIRYLVEKPKYKKALGTKTFRIHTPPAKANCVAWLGGAIFGALQDILGSRSVSKEYYNQTGRIPDWCSLNNPPLEMMFDVGKTQPPLMKRAFSTEK

SEQ ID NO: 18121 - protein, 119 aa, Artificial Sequence
  Synthetic polypeptide
MGTVAHACNPSTLGRQGSVPEGVLEDIKARTCFVSDLKRGLKIQAAKFNIDGNNERPSPPPNVDYPLDGEKILHILGSIRDSVVEILFEQDNEEQSVATLILDSLIQCCSCCPGWSAMA

SEQ ID NO: 18122 - protein, 51 aa, Artificial Sequence
  Synthetic polypeptide
LSSVKPDMKQEAKCGDFKAVIVEVSGQAHYTGTASFIIEDDDPLRDGFLLK

SEQ ID NO: 18123 - protein, 12 aa, Artificial Sequence
  Synthetic polypeptide
NRKRNVVILKLL

SEQ ID NO: 18124 - protein, 10 aa, Artificial Sequence
  Synthetic polypeptide
ARHETGSEMW

SEQ ID NO: 18125 - protein, 13 aa, Artificial Sequence
  Synthetic polypeptide
LSSVKPDMKQELL

SEQ ID NO: 18126 - protein, 5 aa, Artificial Sequence
  Synthetic polypeptide
NRSCY

SEQ ID NO: 18127 - protein, 9 aa, Artificial Sequence
  Synthetic polypeptide
ARHETGAVM

SEQ ID NO: 18128 - protein, 634 aa, Artificial Sequence
  Synthetic polypeptide
APPPVTSVAAFDSYRGANPIVNRTCEGSGLCAPYENLMPDDMSLVSQHPQMGPSRCRKTRSGLPLILHYGILLITKVFLGQSVQAHEKESISQSNYPMVNSVFIPRKYLLNSVMGQRNCDCSVRQCKWFVFDHDLVLPEYVVEFEYITMVKAPSLFSVFNNVILEESKKNPEVSVFSKDLKFDDEVIKMEPRIKARPKLISLDDKTILSLAKTSVYSHIVSLNLHGNSLSKLRDLSKLTGLRKLNISFNEFTCLDDVYHLYNLEYLDASHNHVITLEGFRGLMKLKHLDLSWNQLKKSGNEINMLCKHTTSLLTLDIQHNPWQKPATLRLSVIGRLKTLTHLNGVFISEEEATAAMKFIAGTRITQLSLLRHSSTKEERPRILSIWPSAKILTQVSKLGPHLHLSGNCYLKITALNLDGQHLFEITNLEKLENLKWASFSNNNLTKMEGLESCINLEELTLDGNCISKIEGISKMTKLTRLSINNNLLTGWEEHTFDNMLHLHSLSLENNRITSLSGLQKSFTLVELYISNNYIAVNQEMHNLKGLCNLVILDMCGNIIIWNQENYRLFVIFHLPELKALDGIPIEPSETDSAKDLFGGRLTSDMIAERQGHSNFKQMQELNWTSSSISCIYFV

SEQ ID NO: 18129 - protein, 44 aa, Artificial Sequence
  Synthetic polypeptide
FYIMASSSLQKFSLARVFRPMKKNPSVNPTIQWLIQCSFLGNIY

SEQ ID NO: 18130 - protein, 31 aa, Artificial Sequence
  Synthetic polypeptide
MQENTLRAPTDSTLWHPPHYKSFPWPECSGP

SEQ ID NO: 18131 - protein, 976 aa, Artificial Sequence
  Synthetic polypeptide
APPPVTSVAAFDSYRGANPIVNRTCEGSGLCAPYENLMPDDMSLVSQHPQMGPSRCRKTRSGLPLILHYGILLITKVFLGQSVQAHEKESISQSNYPMVNSVFIPRKYLLNSVMGQRNCDCSVRQCKWFVFDHDLVLPEYVVEFEYITMVKAPSLFSVFNNVILEESKKNPEVSVFSKDLKFDDEVIKMEPRIKARPKLISLDDKTILSLAKTSVYSHIVSLNLHGNSLSKLRDLSKLTGLRKLNISFNEFTCLDDVYHLYNLEYLDASHNHVITLEGFRGLMKLKHLDLSWNQLKKSGNEINMLCKHTTSLLTLDIQHNPWQKPATLRLSVIGRLKTLTHLNGVFISEEEATAAMKFIAGTRITQLSLLRHSSTKEERPRILSIWPSAKILTQVSKLGPHLHLSGNCYLKITALNLDGQHLFEITNLEKLENLKWASFSNNNLTKMEGLESCINLEELTLDGNCISKIEGISKMTKLTRLSINNNLLTGWEEHTFDNMLHLHSLSLENNRITSLSGLQKSFTLVELYISNNYIAVNQEMHNLKGLCNLVILDMCGNIIIWNQENYRLFVIFHLPELKALDGIPIEPSETDSAKDLFGGRLTSDMIAERQGHSNFKQMQELNWTSSSIRTVDLIPVDQFRNVCNVNLQNNHLTSFSGLIYLPNVKVLCLNYNHIESIMPRLKPQTHLTSRQLLYQKVPSSGYGQQGISKTNRDIMSSENLPPIMHSLEVLHLGYNGICNLIQLQLNRLRNLKFLFLQGNEISQVEGLDNLVVLQELVVDHNRIRSFNDSAFAKPSSLLALHLEENRLRELGKLQSLVKLEKLFLGYNKIQDITELEKLDVISTLRELTVYGNPICRKMLHRHMLIFRLPNLQMLDGSPVNSDDRAKAEFHLAELQAKKNSLIPVTHSPMDGRSFGQVKTPPIEITNVLLPSGFSHYLGSDVTLTPEVEEFLGATFQDQIECNCLKRNEHTPRNSPV

SEQ ID NO: 18132 - protein, 42 aa, Artificial Sequence
  Synthetic polypeptide
GIYPFAWLSLFSLACCHVRRDCSSLPSTVIVRPPQPCGTNGS

SEQ ID NO: 18133 - protein, 12 aa, Artificial Sequence
  Synthetic polypeptide
GLPSLVELMGAD

SEQ ID NO: 18134 - protein, 281 aa, Artificial Sequence
  Synthetic polypeptide
PGAVAHACNPSNLGGRGNISVSSSTSDGSTFTSESTTVQQGKVFLSSLAPSAVVYTVPNTGQTIGSVKQEGLERSLVFSQLMPVNQNAQVNANLSSENISGSGLHPLASSLVNVSPTHNFSLSPSTLLNPTELNRDIADSQPMSAPVASKSTVTSVSNTNYATLQNCSLITGQDLLSVPMTQAALGEIVPTAEDQVGHPSPAVHQDFVQEHRLVLQSVANMKENFLSNSESKATSSLMMLDSKSKYVLDGMVDTVCEDLETDKKELAKLQTVQLDEDMQDL

SEQ ID NO: 18135 - protein, 20 aa, Artificial Sequence
  Synthetic polypeptide
RVLWLTPVIPAIWEAEVISQ

SEQ ID NO: 18136 - protein, 8 aa, Artificial Sequence
  Synthetic polypeptide
SQQFGRPR

SEQ ID NO: 18137 - protein, 12 aa, Artificial Sequence
  Synthetic polypeptide
AAPGFLTLRNFL

SEQ ID NO: 18138 - protein, 282 aa, Artificial Sequence
  Synthetic polypeptide
EIFCESCVDLLFVRGAGNCPECGTPLRKSNFRVQLFEDPTVDKEVEIRKKVLKIYNKREEDFPSLREYNDFLEEVEEIVFNLTNNVDLDNTKKKMEIYQKENKDVIQKNKLKLTREQEELEEALEVERQENEQRRLFIQKEEQLQQILKRKNKQAFLDELESSDLPVALLLAQHKDRSTQLEMQLEKPKPVKPVTFSTGIKMGQHISLAPIHKLEEALYEYQPLQIETYGPHVPELEMLGRLGYLNHVRAASPQDLAGGYTSSLACHRALQDAFSGLFWQPS

SEQ ID NO: 18139 - protein, 18 aa, Artificial Sequence
  Synthetic polypeptide
QISCSWIPDTEKFSVKVV

SEQ ID NO: 18140 - protein, 240 aa, Artificial Sequence
  Synthetic polypeptide
EIFCESCVDLLFVRGAGNCPECGTPLRKSNFRVQLFEDPTVDKEVEIRKKVLKIYNKREEDFPSLREYNDFLEEVEEIVFNLTNNVDLDNTKKKMEIYQKENKDVIQKNKLKLTREQEELEEALEVERQENEQRRLFIQKEEQLQQILKRKNKQAFLDELGQHISLAPIHKLEEALYEYQPLQIETYGPHVPELEMLGRLGYLNHVRAASPQDLAGGYTSSLACHRALQDAFSGLFWQPS

SEQ ID NO: 18141 - protein, 46 aa, Artificial Sequence
  Synthetic polypeptide
RTKLSQVFKPCQSCLTTGPCWRLYFFSCLSQSTTGCIQWAFLAAQL

SEQ ID NO: 18142 - protein, 79 aa, Artificial Sequence
  Synthetic polypeptide
FQPFGRPRQEDCLRTGIQDQLGQHCKNPSLQKFKEQNLARYLNHVRAASPQDLAGGYTSSLACHRALQDAFSGLFWQPS

SEQ ID NO: 18143 - protein, 3 aa, Artificial Sequence
  Synthetic polypeptide
PGI

SEQ ID NO: 18144 - protein, 227 aa, Artificial Sequence
  Synthetic polypeptide
CGIEEKMLSLAPKRNKVESELLKGYSKYLSHDVVVMTVKLCILFAVLLTVPLIHFPARKAVTMMFFSNFPFSWIRHFLITLALNIIIVLLAIYVPDIRNVFGVVGASTSTCLIFIFPGLFYLKLSREDFLSWKKLGGLILSHRLACSGVISAHCNLCLPDSSNPPTSASRVAETTGRDTMEMCTQRKGHARTQQEGNCLQAKGRGLRRTKRVHTLILHFPTSRTVSK

SEQ ID NO: 18145 - protein, 11 aa, Artificial Sequence
  Synthetic polypeptide
HQKETKWSQNY

SEQ ID NO: 18146 - protein, 21 aa, Artificial Sequence
  Synthetic polypeptide
GKDAVSSTKKKQSGVRITKRL

SEQ ID NO: 18147 - protein, 162 aa, Artificial Sequence
  Synthetic polypeptide
CGIEEKMLSLAPKRNKVESELLKGYSKYLSHDVVVMTVKLCILFAVLLTVPLIHFPARKAVTMMFFSNFPFSWIRHFLITLALNIIIVLLAIYVPDIRNVFGVVGASTSTCLIFIFPGLFYLKLSREDFLSWKKLGAFVLLIFGILVGNFSLALIIFDWINK

SEQ ID NO: 18148 - protein, 216 aa, Artificial Sequence
  Synthetic polypeptide
CGIEEKMLSLAPKRNKVESELLKGYSKYLSHDVVVMTVKLCILFAVLLTVPLIHFPARKAVTMMFFSNFPFSWIRHFLITLALNIIIVLLAIYVPDIRNVFGVVGASTSTCLIFIFPGLFYLKLSREDFLSWKKLGGLILSHRLACSGVISAHCNLCLPDSSNPPTSASRVAETTEKEEIPWRCAPRGKATQGHSKKATVYKPREEASGEPNVSTP

SEQ ID NO: 18149 - protein, 89 aa, Artificial Sequence
  Synthetic polypeptide
QLTLEQHGFSNCVGPLIWGFFSASATPRRQDQPLPCLLLSLLNMKTMRMKTFMMIQFHLIVGVQWCDLSSLQPLPPGLKQSSHLSLQSS

SEQ ID NO: 18150 - protein, 55 aa, Artificial Sequence
  Synthetic polypeptide
LCGSTYMGIFFCLCHPEKARPTPPLPSSQPPQHEDNENEDLYDDPVSLNSWRAVV

SEQ ID NO: 18151 - protein, 569 aa, Artificial Sequence
  Synthetic polypeptide
ACPVEHPCGGLQPCDTDPESTPSRPSPRWNALPEQCAADPHGGLTQRLNTGKESVLGVLTSGTWILWRPFGFSGRFLKLESHSITESKSLIPVAWTSLTQMLLEAPGIFLLGQRKRFSTMPETETHERETELFSPPSDVRGMTKLDRTAFKKTVNIPVLKVRKEIVSKLMRSLKRAALQRPGIRRVIEDPEDKESRLIMLDPYKIFTHDSFEKAELSVLEQLNVSPQISKYNLELTYEHFKSEEILRAVLPEGQDVTSGFSRIGHIAHLNLRDHQLSFKHLIGQVMIDKNPGITSAVNKINNIDNMYRNFQMEVLSGEQNMMTKVRENNYTYEFDFSKVYWNPRLSTEHSRITELLKPGDVLFDVFAGVGPFAIPVAKKNCTVFANDLNPESHKWLLYNCKLNKVDQKVKVFNLDGKDFLQGPVKEELMQLLGLSKERKPSVHVVMNLPAKAIEFLSAFKWLLDGQPCSSEFLPIVHCYSFSKDANPAEDVRQRAGAVLGISLEACSSVHLVRNVAPNKEMLCITFQIPASVLYKNQTRNPENHEDPPLKRQRTAEAFSDEKTQIVSNT

SEQ ID NO: 18152 - protein, 17 aa, Artificial Sequence
  Synthetic polypeptide
HLEHGSYGGHLDSQEDF

SEQ ID NO: 18153 - protein, 58 aa, Artificial Sequence
  Synthetic polypeptide
AIAQVECFARAVRGRPPWRINTAAEHWEGIRAWSPDIWNMDLMEAIWILRKISETGKP

SEQ ID NO: 18154 - protein, 201 aa, Artificial Sequence
  Synthetic polypeptide
ACPVEHPCGGLQPCDTDPESTPSRPSPRWNALPEQCAADPHGGLTQRLNTGKESVLGVLTSGTWILWRPFGFSGRFLKLESHSITESKSLIPVAWTSLTQMLLEAPGIFLLGQRKRFSTMPETETHERETELFSPPSDVRGMTKLDRTAFKKTVNIPVLKVRKEIVSKLMRSLKRAALQRPGIRRVIEDPEDKESRLIMLD

SEQ ID NO: 18155 - protein, 185 aa, Artificial Sequence
  Synthetic polypeptide
ACPVEHPCGGLQPCDTDPESTPSRPSPRWNALPEQCAADPHGGLTQRLNTGKESVLGVLTSGTWILWRPFGFSGRFLKLESHSITESKSLIPVAWTSLTQMLLEAPGIFLLGQRKRFSTMPETETHERETELFSPPSDVRGMTKLDRTAFKKTVNIPVLKVRKEIVSKLMRSLKRAALQRPGIRR

SEQ ID NO: 18156 - protein, 23 aa, Artificial Sequence
  Synthetic polypeptide
GCISELGLHHCIPAWMTKIVCFL

SEQ ID NO: 18157 - protein, 14 aa, Artificial Sequence
  Synthetic polypeptide
QRSSVFCDGVCEWG

SEQ ID NO: 18158 - protein, 271 aa, Artificial Sequence
  Synthetic polypeptide
RTGTAPLHSSLDDKDRLFFVMEFVNGGDLMFHIQKSRRFDEARARFYAAEIISALMFLHDKGIIYRDLKLDNVLLDHEGHCKLADFGMCKEGICNGVTTATFCGTPDYIAPEILQEMLYGPAVDWWAMGVLLYEMLCGHAPFEAENEDDLFEAILNDEVVYPTWLHEDATGILKSFMTKNPTMRLGSLTQGGEHAILRHPFFKEIDWAQLNHRQIEPPFRPRIKSREDVSNFDPDFIKEEPVLTPIDEGHLPMINQDEFRNFSYVSPELQP

SEQ ID NO: 18159 - protein, 22 aa, Artificial Sequence
  Synthetic polypeptide
SQEIETILANTTFHPQSSLNCS

SEQ ID NO: 18160 - protein, 29 aa, Artificial Sequence
  Synthetic polypeptide
HFGRPRWADHEVRRLRPSWLTRRSILRAA

SEQ ID NO: 18161 - protein, 416 aa, Artificial Sequence
  Synthetic polypeptide
HDVPSSEQPELFLKKLQQCCVIFDFMDTLSDLKMKEYKRSTLNELVDYITISRGCLTEQTYPEVVRMVSCNIFRTLPPSDSNEFDPEEDEPTLEASWPHLQLVYEFFIRFLESQEFQPSIAKKYIDQKFVLQLLELFDSEDPRERDYLKTVLHRIYGKFLGLRAFIRKQINNIFLRFVYETEHFNGVAELLEILGSIINGFALPLKAEHKQFLVKVLIPLHTVRSLSLFHAQLAYCIVQFLEKDPSLTEPVIRGLMKFWPKTCSQKEVMFLGELEEILDVIEPSQFVKIQEPLFKQIAKCVSSPHFQVAERALYYWNNEYIMSLIEENSNVILPIMFSSLYRISKEHWNPAIVALVYNVLKAFMEMNSTMFDELTATYKSDRQREKKKEKEREELWKKLEDLELKRGLRRDGIIPT

SEQ ID NO: 18162 - protein, 411 aa, Artificial Sequence
  Synthetic polypeptide
HDVPSSEQPELFLKKLQQCCVIFDFMDTLSDLKMKEYKRSTLNELVDYITISRGCLTEQTYPEVVRMVSCNIFRTLPPSDSNEFDPEEDEPTLEASWPHLQLVYEFFIRFLESQEFQPSIAKKYIDQKFVLQLLELFDSEDPRERDYLKTVLHRIYGKFLGLRAFIRKQINNIFLRFVYETEHFNGVAELLEILGSIINGFALPLKAEHKQFLVKVLIPLHTVRSLSLFHAQLAYCIVQFLEKDPSLTEPVIRGLMKFWPKTCSQKEVMFLGELEEILDVIEPSQFVKIQEPLFKQIAKCVSSPHFQVAERALYYWNNEYIMSLIEENSNVILPIMFSSLYRISKEHWNPAIVALVYNVLKAFMEMNSTMFDELTATYNEKKKEKEREELWKKLEDLELKRGLRRDGIIPT

SEQ ID NO: 18163 - protein, 30 aa, Artificial Sequence
  Synthetic polypeptide
RHSLRIGGLQVPSYIWTDSYSLLVFSSLPK

SEQ ID NO: 18164 - protein, 217 aa, Artificial Sequence
  Synthetic polypeptide
EAFRYPLIYGLILIPCWCSLVCLSRIYMGMHSILDIIAGFLYTILILAVFYPFVDLIDNFNQTHKYAPFIIIGLHLALGIFSFTLDTWSTSRGDTAEILGSGAGIACGSHVTYNMGLVLDPSLDTLPLAGPPITVTLFGKAILRILIGMVFVLIIRDVMKKITIPLACKIFNIPCDDIRKARQHMEVELPYRYITYGMVGFSITFFVPYIFFFIGIS

SEQ ID NO: 18165 - protein, 24 aa, Artificial Sequence
  Synthetic polypeptide
PAESHSLKALAEDRRPSGTLLYMD

SEQ ID NO: 18166 - protein, 34 aa, Artificial Sequence
  Synthetic polypeptide
DVRSASARPRPRLRSEEPLRPAAAPSENTLLYMD

SEQ ID NO: 18167 - protein, 34 aa, Artificial Sequence
  Synthetic polypeptide
EVRSPSARQPPRLRIPSYIWTDSYSLLVFSSLPK

SEQ ID NO: 18168 - protein, 214 aa, Artificial Sequence
  Synthetic polypeptide
EYPLIYGLILIPCWCSLVCLSRIYMGMHSILDIIAGFLYTILILAVFYPFVDLIDNFNQTHKYAPFIIIGLHLALGIFSFTLDTWSTSRGDTAEILGSGAGIACGSHVTYNMGLVLDPSLDTLPLAGPPITVTLFGKAILRILIGMVFVLIIRDVMKKITIPLACKIFNIPCDDIRKARQHMEVELPYRYITYGMVGFSITFFVPYIFFFIGIS

SEQ ID NO: 18169 - protein, 55 aa, Artificial Sequence
  Synthetic polypeptide
SSKRTPSSRWHRTASLWLPVRRTHLSYAWTPYPWTLWLWKIQNRSTIFYIQSLWI

SEQ ID NO: 18170 - protein, 42 aa, Artificial Sequence
  Synthetic polypeptide
GGLTSAMPGLLTLGHYGFGRFRTEAQSFTFNLYGSRRPVNNF

SEQ ID NO: 18171 - protein, 3094 aa, Artificial Sequence
  Synthetic polypeptide
MIFKENPKLQMAPDCILVAPCKEDSPQLCLDSLPLDTMALEDSEQKHNLLHSIFMDLEDLSIIFETDELTQSIQELSNQVTALQQKIMESLPQIQRMADDVVAIESEVKSMEKRVSKIKTILLSKEIFDFSPEEHLKHGEVILENIRPMKKTIAEIVSYQVELRLPQTGMKPLPVFQRTNQLLQDIKLLENVTQEQNELLKVVIKQTNEWDEEIENLKQILNNYSAQFSLEHMSPDQADKLPQLQGEIERMEKQILSLNQRKEDLLVDLKATVLNLHQHLKQEQEGVERDRLPAVTSEEGGVAERDASERKLNRRGSMSYLAAVEEEVEESSVKSDNGDEKAEPSPQSWSSLWKHDKDMEEDRASSSSGTIVQEAYGKISTSDNSMAQILTPDSLNTEQGPECSLRPNQTEEGTTPPIEADTLDSSDAQGGLEPRVEKTRPEPTEVLHACKTQVAELELWLQQANVAVEPETLNADMQQVLEQQLVGCQAMLTEIEHKVAFLLETCKDQGLGDNGATQHEAEALSLKLKTVKCNLEKVQMMLQEKHSEDQHPTILKKSSEPEHQEALQPVNLSELESIVTERPQFSRQKDFQQQQVLELKPMEQKDFIKFIEFNAKKMWPQYCQHDNDTTQESSASNQASSPENDVPDSILSPQGQNGDKWQYLHHELSSKIKLPLPQLVEPQVSTNMGILPSVTMYNFRYPTTEELKTYTTQLEDLRQEASNLQTQENMTEEAYINLDKKLFELFLTLSQCLSSVEEMLEMPRLYREDGSGQQVHYETLALELKKLYLALSDKKGDLLKAMTWPGENTNLLLECFDNLQVCLEHTQAAAVCRSKSLKAGLDYNRSYQNEIKRLYHQLIKSKTSLQQSLNEISGQSVAEQLQKADAYTVELENAESRVAKLRDEGERLHLPYALLQEVYKLEDVLDSMWGMLRARYTELSSPFVTESQQDALLQGMVELVKIGKEKLAHGHLKQTKSKVALQAQIENHKVFFQKLVADMLLIQAYSAKILPSLLQNRETFWAEQVTEVKILEEKSRQCGMKLQSLLQKWEEFDENYASLEKDLEILISTLPSVSLVEETEERLVERISFYQQIKRNIGGKHARLYQTLNEGKQLVASVSCPELEGQIAKLEEQWLSLNKKIDHELHRLQALLKHLLSYNRDSDQLTKWLESSQHTLNYWKEQSLNVSQDLDTIRSNINNFFEFSKEVDEKSSLKTAVISIGNQLLHLKETDTATLRASLAQFEQKWTMLITQLPDIQEKLHQLQMEKLPSRKAITEMISWMNNVEHQTSDEDSVHSPSSASQVKHLLQKHKEFRMEMDYKQWIVDFVNQSLLQLSTCDVESKRYERTEFAEHLGEMNRQWHRVHGMLNRKIQHLEQLLESITESENKIQILNNWLEAQEERLKTLQKPESVISVQKLLLDCQDIENQLAIKSKALDELKQSYLTLESGAVPLLEDTASRIDELFQKRSSVLTQVNQLKTSMQSVLQEWKIYDQLYDEVNMMTIRFWYCMEHSKPVVLSLETLRCQVENLQSLQDEAESSEGSWEKLQEVIGKLKGLCPSVAEIIEEKCQNTHKRWTQVNQAIADQLQKAQSLLQLWKAYSNAHGEAAARLKQQEAKFQQLANISMSGNNLAEILPPALQDIKELQHDVQKTKEAFLQNSSVLDRLPQPAESSTHMLLPGPLHSLQRAAYLEKMLLVKANEFEFVLSQFKDFGVRLESLKGLIMHEEENLDRLHQQEKENPDSFLNHVLALTAQSPDIEHLNEVSLKLPLSDVAVKTLQNMNRQWIRATATALERCSELQGIGLNEKFLYCCEKWIQLLEKIEEALKVDVANSLPELLEQQKTYKMLEAEVSINQTIADSYVTQSLQLLDTTEIENRPEFITEFSKLTDRWQNAVQGVRQRKGDVDGLVRQWQDFTTSVENLFRFLTDTSHLLSAVKGQERFSLYQTRSLIHELKNKEIHFQRRRTTCALTLEAGEKLLLTTDLKTKESVGRRISQLQDSWKDMEPQLAEMIKQFQSTVETWDQCEKKIKELKSRLQVLKAQSEDPLPELHEDLHNEKELIKELEQSLASWTQNLKELQTMKADLTRHVLVEDVMVLKEQIEHLHRQWEDLCLRVAIRKQEIEDRLNTWVVFNEKNKELCAWLVQMENKVLQTADISIEEMIEKLQKDCMEEINLFSENKLQLKQMGDQLIKASNKSRAAEIDDKLNKINDRWQHLFDVIGSRVKKLKETFAFIQQLDKNMSNLRTWLARIESELSKPVVYDVCDDQEIQKRLAEQQDLQRDIEQHSAGVESVFNICDVLLHDSDACANETECDSIQQTTRSLDRRWRNICAMSMERRMKIEETWRLWQKFLDDYSRFEDWLKSAERTAACPNSSEVLYTSAKEELKRFEAFQRQIHERLTQLELINKQYRRLARENRTDTASRLKQMVHEGNQRWDNLQRRVTAVLRRLRHFTNQREEFEGTRESILVWLTEMDLQLTNVEHFSESDADDKMRQLNGFQQEITLNTNKIDQLIVFGEQLIQKSEPLDAVLIEDELEELHRYCQEVFGRVSRFHRRLTSCTPGLEDEKEASENETDMEDPREIQTDSWRKRGESEEPSSPQSLCHLVAPGHERSGCETPVSVDSIPLEWDHTGDVGGSSSHEEDEEGPYYSALSGKSISDGHSWHVPDSPSCPEHHYKQMEGDRNVPPVPPASSTPYKPPYGKLLLPPGTDGGKEGPRVLNGNPQQEDGGLAGITEQQSGAFDRWEMIQAQELHNKLKIKQNLQQLNSDISAITTWLKKTEAELEMLKMAKPPSDIQEIELRVKRLQEILKAFDTYKALVVSVNVSSKEFLQTESPESTELQSRLRQLSLLWEAAQGAVDSWRGGLRQSLMQCQDFHQLSQNLLLWLASAKNRRQKAHVTDPKADPRALLECRRELMQLEKELVERQPQVDMLQEISNSLLIKGHGEDCIEAEEKVHVIEKKLKQLREQVSQDLMALQGTQNPASPLPSFDEVDSGDQPPATSVPAPRAKQFRAVRTTEGEEETESRVPGSTRPQRSFLSRVVRAALPLQLLLLLLLLLACLLPSSEEDYSCTQANNFARSFYPMLRYTNGPPPT

SEQ ID NO: 18172 - protein, 3116 aa, Artificial Sequence
  Synthetic polypeptide
MIFKENPKLQMAPDCILVAPCKEDSPQLCLDSLPLDTMALEDSEQKHNLLHSIFMDLEDLSIIFETDELTQSIQELSNQVTALQQKIMESLPQIQRMADDVVAIESEVKSMEKRVSKIKTILLSKEIFDFSPEEHLKHGEVILENIRPMKKTIAEIVSYQVELRLPQTGMKPLPVFQRTNQLLQDIKLLENVTQEQNELLKVVIKQTNEWDEEIENLKQILNNYSAQFSLEHMSPDQADKLPQLQGEIERMEKQILSLNQRKEDLLVDLKATVLNLHQHLKQEQEGVERDRLPAVTSEEGGVAERDASERKLNRRGSMSYLAAVEEEVEESSVKSDNGDEKAEPSPQSWSSLWKHDKDMEEDRASSSSGTIVQEAYGKISTSDNSMAQILTPDSLNTEQGPECSLRPNQTEEGTTPPIEADTLDSSDAQGGLEPRVEKTRPEPTEVLHACKTQVAELELWLQQANVAVEPETLNADMQQVLEQQLVGCQAMLTEIEHKVAFLLETCKDQGLGDNGATQHEAEALSLKLKTVKCNLEKVQMMLQEKHSEDQHPTILKKSSEPEHQEALQPVNLSELESIVTERPQFSRQKDFQQQQVLELKPMEQKDFIKFIEFNAKKMWPQYCQHDNDTTQESSASNQASSPENDVPDSILSPQGQNGDKWQYLHHELSSKIKLPLPQLVEPQVSTNMGILPSVTMYNFRYPTTEELKTYTTQLEDLRQEASNLQTQENMTEEAYINLDKKLFELFLTLSQCLSSVEEMLEMPRLYREDGSGQQVHYETLALELKKLYLALSDKKGDLLKAMTWPGENTNLLLECFDNLQVCLEHTQAAAVCRSKSLKAGLDYNRSYQNEIKRLYHQLIKSKTSLQQSLNEISGQSVAEQLQKADAYTVELENAESRVAKLRDEGERLHLPYALLQEVYKLEDVLDSMWGMLRARYTELSSPFVTESQQDALLQGMVELVKIGKEKLAHGHLKQTKSKVALQAQIENHKVFFQKLVADMLLIQAYSAKILPSLLQNRETFWAEQVTEVKILEEKSRQCGMKLQSLLQKWEEFDENYASLEKDLEILISTLPSVSLVEETEERLVERISFYQQIKRNIGGKHARLYQTLNEGKQLVASVSCPELEGQIAKLEEQWLSLNKKIDHELHRLQALLKHLLSYNRDSDQLTKWLESSQHTLNYWKEQSLNVSQDLDTIRSNINNFFEFSKEVDEKSSLKTAVISIGNQLLHLKETDTATLRASLAQFEQKWTMLITQLPDIQEKLHQLQMEKLPSRKAITEMISWMNNVEHQTSDEDSVHSPSSASQVKHLLQKHKEFRMEMDYKQWIVDFVNQSLLQLSTCDVESKRYERTEFAEHLGEMNRQWHRVHGMLNRKIQHLEQLLESITESENKIQILNNWLEAQEERLKTLQKPESVISVQKLLLDCQDIENQLAIKSKALDELKQSYLTLESGAVPLLEDTASRIDELFQKRSSVLTQVNQLKTSMQSVLQEWKIYDQLYDEVNMMTIRFWYCMEHSKPVVLSLETLRCQVENLQSLQDEAESSEGSWEKLQEVIGKLKGLCPSVAEIIEEKCQNTHKRWTQVNQAIADQLQKAQSLLQLWKAYSNAHGEAAARLKQQEAKFQQLANISMSGNNLAEILPPALQDIKELQHDVQKTKEAFLQNSSVLDRLPQPAESSTHMLLPGPLHSLQRAAYLEKMLLVKANEFEFVLSQFKDFGVRLESLKGLIMHEEENLDRLHQQEKENPDSFLNHVLALTAQSPDIEHLNEVSLKLPLSDVAVKTLQNMNRQWIRATATALERCSELQGIGLNEKFLYCCEKWIQLLEKIEEALKVDVANSLPELLEQQKTYKMLEAEVSINQTIADSYVTQSLQLLDTTEIENRPEFITEFSKLTDRWQNAVQGVRQRKGDVDGLVRQWQDFTTSVENLFRFLTDTSHLLSAVKGQERFSLYQTRSLIHELKNKEIHFQRRRTTCALTLEAGEKLLLTTDLKTKESVGRRISQLQDSWKDMEPQLAEMIKQFQSTVETWDQCEKKIKELKSRLQVLKAQSEDPLPELHEDLHNEKELIKELEQSLASWTQNLKELQTMKADLTRHVLVEDVMVLKEQIEHLHRQWEDLCLRVAIRKQEIEDRLNTWVVFNEKNKELCAWLVQMENKVLQTADISIEEMIEKLQKDCMEEINLFSENKLQLKQMGDQLIKASNKSRAAEIDDKLNKINDRWQHLFDVIGSRVKKLKETFAFIQQLDKNMSNLRTWLARIESELSKPVVYDVCDDQEIQKRLAEQQDLQRDIEQHSAGVESVFNICDVLLHDSDACANETECDSIQQTTRSLDRRWRNICAMSMERRMKIEETWRLWQKFLDDYSRFEDWLKSAERTAACPNSSEVLYTSAKEELKRFEAFQRQIHERLTQLELINKQYRRLARENRTDTASRLKQMVHEGNQRWDNLQRRVTAVLRRLRHFTNQREEFEGTRESILVWLTEMDLQLTNVEHFSESDADDKMRQLNGFQQEITLNTNKIDQLIVFGEQLIQKSEPLDAVLIEDELEELHRYCQEVFGRVSRFHRRLTSCTPGLEDEKEASENETDMEDPREIQTDSWRKRGESEEPSSPQSLCHLVAPGHERSGCETPVSVDSIPLEWDHTGDVGGSSSHEEDEEGPYYSALSDVEIPENPEAYLKMTTKTLKASSGKSISDGHSWHVPDSPSCPEHHYKQMEGDRNVPPVPPASSTPYKPPYGKLLLPPGTDGGKEGPRVLNGNPQQEDGGLAGITEQQSGAFDRWEMIQAQELHNKLKIKQNLQQLNSDISAITTWLKKTEAELEMLKMAKPPSDIQEIELRVKRLQEILKAFDTYKALVVSVNVSSKEFLQTESPESTELQSRLRQLSLLWEAAQGAVDSWRGGLRQSLMQCQDFHQLSQNLLLWLASAKNRRQKAHVTDPKADPRALLECRRELMQLEKELVERQPQVDMLQEISNSLLIKGHGEDCIEAEEKVHVIEKKLKQLREQVSQDLMALQGTQNPASPLPSFDEVDSGDQPPATSVPAPRAKFRAVRTTEGEEETESRVPGSTRPQRSFLSRVVRAALPLQLLLLLLLLLACLLPSSEEDYSCTQANNFARSFYPMLRYTNGPPPT

SEQ ID NO: 18173 - protein, 2994 aa, Artificial Sequence
  Synthetic polypeptide
MIFKENPKLQMAPDCILVAPCKEDSPQLCLDSLPLDTMALEDSEQKHNLLHSIFMDLEDLSIIFETDELTQSIQELSNQVTALQQKIMESLPQIQRMADDVVAIESEVKSMEKRVSKIKTILLSKEIFDFSPEEHLKHGEVILENIRPMKKTIAEIVSYQVELRLPQTGMKPLPVFQRTNQLLQDIKLLENVTQEQNELLKVVIKQTNEWDEEIENLKQILNNYSAQFSLEHMSPDQADKLPQLQGEIERMEKQILSLNQRKEDLLVDLKATVLNLHQHLKQEQEGVERDRLPAVTSEEGGVAERDASERKLNRRGSMSYLAAVEEEVEESSVKSDHDKDMEEDRASSSSGTIVQEAYGKISTSDNSMAQILTPDSLNTEQGPECSLRPNQTEEGTTPPIEADTLDSSDAQGGLEPRVEKTRPEPTEVLHACKTQVAELELWLQQANVAVEPETLNADMQQVLEQQLVGCQAMLTEIEHKVAFLLETCKDQGLGDNGATQHEAEALSLKLKTVKCNLEKVQMMLQEKHSEDQHPTILKKSSEPEHQEALQPVNLSELESIVTERPQFSRQKDFQQQQVLELKPMEQKDFIKFIEFNAKKMWPQYCQHDNDTTQESSARYPTTEELKTYTTQLEDLRQEASNLQTQENMTEEAYINLDKKLFELFLTLSQCLSSVEEMLEMPRLYREDGSGQQVHYETLALELKKLYLALSDKKGDLLKAMTWPGENTNLLLECFDNLQVCLEHTQAAAVCRSKSLKAGLDYNRSYQKADAYTVELENAESRVAKLRDEGERLHLPYALLQEVYKLEDVLDSMWGMLRARYTELSSPFVTESQQDALLQGMVELVKIGKEKLAHGHLKQTKSKVALQAQIENHKVFFQKLVADMLLIQAYSAKILPSLLQNRETFWAEQVTEVKILEEKSRQCGMKLQSLLQKWEEFDENYASLEKDLEILISTLPSVSLVEETEERLVERISFYQQIKRNIGGKHARLYQTLNEGKQLVASVSCPELEGQIAKLEEQWLSLNKKIDHELHRLQALLKHLLSYNRDSDQLTKWLESSQHTLNYWKEQSLNVSQDLDTIRSNINNFFEFSKEVDEKSSLKTAVISIGNQLLHLKETDTATLRASLAQFEQKWTMLITQLPDIQEKLHQLQMEKLPSRKAITEMISWMNNVEHQTSDEDSVHSPSSASQVKHLLQKHKEFRMEMDYKQWIVDFVNQSLLQLSTCDVESKRYERTEFAEHLGEMNRQWHRVHGMLNRKIQHLEQLLESITESENKIQILNNWLEAQEERLKTLQKPESVISVQKLLLDCQDIENQLAIKSKALDELKQSYLTLESGAVPLLEDTASRIDELFQKRSSVLTQVNQLKTSMQSVLQEWKIYDQLYDEVNMMTIRFWYCMEHSKPVVLSLETLRCQVENLQSLQDEAESSEGSWEKLQEVIGKLKGLCPSVAEIIEEKCQNTHKRWTQVNQAIADQLQKAQSLLQLWKAYSNAHGEAAARLKQQEAKFQQLANISMSGNNLAEILPPALQDIKELQHDVQKTKEAFLQNSSVLDRLPQPAESSTHMLLPGPLHSLQRAAYLEKMLLVKANEFENHVLALTAQSPDIEHLNEVSLKLPLSDVAVKTLQNMNRQWIRATATALERCSELQGIGLNEKFLYCCEKWIQLLEKIEEALKVDVANSLPELLEQQKTYKMLEAEVSINQTIADSYVTQSLQLLDTTEIENRPEFITEFSKLTDRWQNAVQGVRQRKGDVDGLNAHVARCGGASLKKQDLRYSLHTACGAALLCRSSHGANKEIHFQRRRTTCALTLEAGEKLLLTTDLKTKESVGRRISQLQDSWKDMEPQLAEMIKQFQSTVETWDQCEKKIKELKSRLQVLKAQSEDPLPELHEDLHNEKELIKVAIRKQEIEDRLNTWVVFNEKNKELCAWLVQMENKVLQTADISIEEMIEKLQKRTVGREEVPERWECETIVSGHGTEESCFLSIRKFHQGRGLHILTCQLIPQDCMEEINLFSENKLQLKQMGDQLIKASNKSRAAEIDDKLNKINDRWQHLFDVIGSSMADQTNSRWMFFQWPRGIQRTVTWPWDHLCSCASTGHTGPFHSSVLRCFEQHIEFGIYRRTYKVNKELGGDKNGQRCPIIYPHGLVQCIRLGEPLILKRVKKLKETFAFIQQLDKNMSNLRTWLARIESELSKPVVYDVCDDQEIQKRLAEQQDLQRDIEQHSAGVESVFNICDVLLHDSDACANETECDSIQQTTRSLDRRWRNICAMSMERRMKIEETWRLWQKFLDDYSRFEDWLKSAERTAACPNSSEVLYTSAKEELKRFERQIHERLTQLELINKQYRRLARENRTDTASRLKQMVHEGNQRWDNLQRRVTAVLRRLRHFTNQREEFEGTRESILVWLTEMDLQLTNVEHFSESDADDKMRQLNGFQQEITLNTNKIDQLIVFGEQLIQKSEPLDAVLIEDELEELHRYCQEGLEDEKEASENETDMEDPREIQTDSWRKRGESEEPSSPQSLCHLVAPGHERSGCETPVSVDSIPLEWDHTGDVGGSSSHEEDEEGPYYSALSGKSISDGHSWHVPDSPSCPEHHYKQMEGDRNVPPVPPASSTPYKPPYVSLNFTGSTAYVCAFDRWEMIQAQELHNKLKIKQNLQQLNSDISAITTWLKKTEAELEMLKMAKPPSDIQEIELRVKRLQEILKAFDTYKALVVSVNVSSKEFLQTESPESTELQSRLRQLSLLWEAAQGAVDSWRGGLRQSLMQCQDFHQLSQNLLLWLASAKNRRQKAHVTDPKADPRALLECRRELMQLEKELVERQPQVDMLQEISNSLLIKGHGEDCIEAEEKVHVIEKKLKQLREQVSQDLMALQGTQNPASPLPSFDEVDSGDQPPATSVPAPRAKFLYPAVQSSENYRRRGGDREQGPRQHTATALLPLKGGPGSPTPAAAPPAAAAPGLPAALLRRRLQLHSGQQLCPVLLPHAEVHQWATPHIEGIAGHSATPPA

SEQ ID NO: 18174 - protein, 19 aa, Artificial Sequence
  Synthetic polypeptide
SWTSQSPELEKSNVWRNRF

SEQ ID NO: 18175 - protein, 79 aa, Artificial Sequence
  Synthetic polypeptide
EDVVFNAPSWKQRTALTRHQTYQYFDPGLPSLQNWRNRTYGETDSEFEPEKRRPVGGLEGHRTKPSPAFEARTRRSRKR

SEQ ID NO: 18176 - protein, 2880 aa, Artificial Sequence
  Synthetic polypeptide
SSMRHLGNREQPSPDTKRTNTLILDFPVSRTGEIERMEKQILSLNQRKEDLLVDLKATVLNLHQHLKQEQEGVERDRLPAVTSEEGGVAERDASERKLNRRGSMSYLAAVEEEVEESSVKSDNGDEKAEPSPQSWSSLWKHDKDMEEDRASSSSGTIVQEAYGKISTSDNSMAQILTPDSLNTEQGPECSLRPNQTEEGTTPPIEADTLDSSDAQGGLEPRVEKTRPEPTEVLHACKTQVAELELWLQQANVAVEPETLNADMQQVLEQQLVGCQAMLTEIEHKVAFLLETCKDQGLGDNGATQHEAEALSLKLKTVKCNLEKVQMMLQEKHSEDQHPTILKKSSEPEHQEALQPVNLSELESIVTERPQFSRQKDFQQQQVLELKPMEQKDFIKFIEFNAKKMWPQYCQHDNDTTQESSASNQASSPENDVPDSILSPQGQNGDKWQYLHHELSSKIKLPLPQLVEPQVSTNMGILPSVTMYNFRYPTTEELKTYTTQLEDLRQEASNLQTQENMTEEAYINLDKKLFELFLTLSQCLSSVEEMLEMPRLYREDGSGQQVHYETLALELKKLYLALSDKKGDLLKAMTWPGENTNLLLECFDNLQVCLEHTQAAAVCRSKSLKAGLDYNRSYQNEIKRLYHQLIKSKTSLQQSLNEISGQSVAEQLQKADAYTVELENAESRVAKLRDEGERLHLPYALLQEVYKLEDVLDSMWGMLRARYTELSSPFVTESQQDALLQGMVELVKIGKEKLAHGHLKQTKSKVALQAQIENHKVFFQKLVADMLLIQAYSAKILPSLLQNRETFWAEQVTEVKILEEKSRQCGMKLQSLLQKWEEFDENYASLEKDLEILISTLPSVSLVEETEERLVERISFYQQIKRNIGGKHARLYQTLNEGKQLVASVSCPELEGQIAKLEEQWLSLNKKIDHELHRLQALLKHLLSYNRDSDQLTKWLESSQHTLNYWKEQSLNVSQDLDTIRSNINNFFEFSKEVDEKSSLKTAVISIGNQLLHLKETDTATLRASLAQFEQKWTMLITQLPDIQEKLHQLQMEKLPSRKAITEMISWMNNVEHQTSDEDSVHSPSSASQVKHLLQKHKEFRMEMDYKQWIVDFVNQSLLQLSTCDVESKRYERTEFAEHLGEMNRQWHRVHGMLNRKIQHLEQLLESITESENKIQILNNWLEAQEERLKTLQKPESVISVQKLLLDCQDIENQLAIKSKALDELKQSYLTLESGAVPLLEDTASRIDELFQKRSSVLTQVNQLKTSMQSVLQEWKIYDQLYDEVNMMTIRFWYCMEHSKPVVLSLETLRCQVENLQSLQDEAESSEGSWEKLQEVIGKLKGLCPSVAEIIEEKCQNTHKRWTQVNQAIADQLQKAQSLLQLWKAYSNAHGEAAARLKQQEAKFQQLANISMSGNNLAEILPPALQDIKELQHDVQKTKEAFLQNSSVLDRLPQPAESSTHMLLPGPLHSLQRAAYLEKMLLVKANEFEFVLSQFKDFGVRLESLKGLIMHEEENLDRLHQQEKENPDSFLNHVLALTAQSPDIEHLNEVSLKLPLSDVAVKTLQNMNRQWIRATATALERCSELQGIGLNEKFLYCCEKWIQLLEKIEEALKVDVANSLPELLEQQKTYKMLEAEVSINQTIADSYVTQSLQLLDTTEIENRPEFITEFSKLTDRWQNAVQGVRQRKGDVDGLVRQWQDFTTSVENLFRFLTDTSHLLSAVKGQERFSLYQTRSLIHELKNKEIHFQRRRTTCALTLEAGEKLLLTTDLKTKESVGRRISQLQDSWKDMEPQLAEMIKQFQSTVETWDQCEKKIKELKSRLQVLKAQSEDPLPELHEDLHNEKELIKELEQSLASWTQNLKELQTMKADLTRHVLVEDVMVLKEQIEHLHRQWEDLCLRVAIRKQEIEDRLNTWVVFNEKNKELCAWLVQMENKVLQTADISIEEMIEKLQKDCMEEINLFSENKLQLKQMGDQLIKASNKSRAAEIDDKLNKINDRWQHLFDVIGSRVKKLKETFAFIQQLDKNMSNLRTWLARIESELSKPVVYDVCDDQEIQKRLAEQQDLQRDIEQHSAGVESVFNICDVLLHDSDACANETECDSIQQTTRSLDRRWRNICAMSMERRMKIEETWRLWQKFLDDYSRFEDWLKSAERTAACPNSSEVLYTSAKEELKRFEAFQRQIHERLTQLELINKQYRRLARENRTDTASRLKQMVHEGNQRWDNLQRRVTAVLRRLRHFTNQREEFEGTRESILVWLTEMDLQLTNVEHFSESDADDKMRQLNGFQQEITLNTNKIDQLIVFGEQLIQKSEPLDAVLIEDELEELHRYCQEVFGRVSRFHRRLTSCTPGLEDEKEASENETDMEDPREIQTDSWRKRGESEEPSSPQSLCHLVAPGHERSGCETPVSVDSIPLEWDHTGDVGGSSSHEEDEEGPYYSALSGKSISDGHSWHVPDSPSCPEHHYKQMEGDRNVPPVPPASSTPYKPPYGKLLLPPGTDGGKEGPRVLNGNPQQEDGGLAGITEQQSGAFDRWEMIQAQELHNKLKIKQNLQQLNSDISAITTWLKKTEAELEMLKMAKPPSDIQEIELRVKRLQEILKAFDTYKALVVSVNVSSKEFLQTESPESTELQSRLRQLSLLWEAAQGAVDSWRGGLRQSLMQCQDFHQLSQNLLLWLASAKNRRQKAHVTDPKADPRALLECRRELMQLEKELVERQPQVDMLQEISNSLLIKGHGEDCIEAEEKVHVIEKKLKQLREQVSQDLMALQGTQNPASPLPSFDEVDSGDQPPATSVPAPRAKQFRAVRTTEGEEETESRVPGSTRPQRSFLSRVVRAALPLQLLLLLLLLLACLLPSSEEDYSCTQANNFARSFYPMLRYTNGPPPT

SEQ ID NO: 18177 - protein, 2902 aa, Artificial Sequence
  Synthetic polypeptide
SSMRHLGNREQPSPDTKRTNTLILDFPVSRTGEIERMEKQILSLNQRKEDLLVDLKATVLNLHQHLKQEQEGVERDRLPAVTSEEGGVAERDASERKLNRRGSMSYLAAVEEEVEESSVKSDNGDEKAEPSPQSWSSLWKHDKDMEEDRASSSSGTIVQEAYGKISTSDNSMAQILTPDSLNTEQGPECSLRPNQTEEGTTPPIEADTLDSSDAQGGLEPRVEKTRPEPTEVLHACKTQVAELELWLQQANVAVEPETLNADMQQVLEQQLVGCQAMLTEIEHKVAFLLETCKDQGLGDNGATQHEAEALSLKLKTVKCNLEKVQMMLQEKHSEDQHPTILKKSSEPEHQEALQPVNLSELESIVTERPQFSRQKDFQQQQVLELKPMEQKDFIKFIEFNAKKMWPQYCQHDNDTTQESSASNQASSPENDVPDSILSPQGQNGDKWQYLHHELSSKIKLPLPQLVEPQVSTNMGILPSVTMYNFRYPTTEELKTYTTQLEDLRQEASNLQTQENMTEEAYINLDKKLFELFLTLSQCLSSVEEMLEMPRLYREDGSGQQVHYETLALELKKLYLALSDKKGDLLKAMTWPGENTNLLLECFDNLQVCLEHTQAAAVCRSKSLKAGLDYNRSYQNEIKRLYHQLIKSKTSLQQSLNEISGQSVAEQLQKADAYTVELENAESRVAKLRDEGERLHLPYALLQEVYKLEDVLDSMWGMLRARYTELSSPFVTESQQDALLQGMVELVKIGKEKLAHGHLKQTKSKVALQAQIENHKVFFQKLVADMLLIQAYSAKILPSLLQNRETFWAEQVTEVKILEEKSRQCGMKLQSLLQKWEEFDENYASLEKDLEILISTLPSVSLVEETEERLVERISFYQQIKRNIGGKHARLYQTLNEGKQLVASVSCPELEGQIAKLEEQWLSLNKKIDHELHRLQALLKHLLSYNRDSDQLTKWLESSQHTLNYWKEQSLNVSQDLDTIRSNINNFFEFSKEVDEKSSLKTAVISIGNQLLHLKETDTATLRASLAQFEQKWTMLITQLPDIQEKLHQLQMEKLPSRKAITEMISWMNNVEHQTSDEDSVHSPSSASQVKHLLQKHKEFRMEMDYKQWIVDFVNQSLLQLSTCDVESKRYERTEFAEHLGEMNRQWHRVHGMLNRKIQHLEQLLESITESENKIQILNNWLEAQEERLKTLQKPESVISVQKLLLDCQDIENQLAIKSKALDELKQSYLTLESGAVPLLEDTASRIDELFQKRSSVLTQVNQLKTSMQSVLQEWKIYDQLYDEVNMMTIRFWYCMEHSKPVVLSLETLRCQVENLQSLQDEAESSEGSWEKLQEVIGKLKGLCPSVAEIIEEKCQNTHKRWTQVNQAIADQLQKAQSLLQLWKAYSNAHGEAAARLKQQEAKFQQLANISMSGNNLAEILPPALQDIKELQHDVQKTKEAFLQNSSVLDRLPQPAESSTHMLLPGPLHSLQRAAYLEKMLLVKANEFEFVLSQFKDFGVRLESLKGLIMHEEENLDRLHQQEKENPDSFLNHVLALTAQSPDIEHLNEVSLKLPLSDVAVKTLQNMNRQWIRATATALERCSELQGIGLNEKFLYCCEKWIQLLEKIEEALKVDVANSLPELLEQQKTYKMLEAEVSINQTIADSYVTQSLQLLDTTEIENRPEFITEFSKLTDRWQNAVQGVRQRKGDVDGLVRQWQDFTTSVENLFRFLTDTSHLLSAVKGQERFSLYQTRSLIHELKNKEIHFQRRRTTCALTLEAGEKLLLTTDLKTKESVGRRISQLQDSWKDMEPQLAEMIKQFQSTVETWDQCEKKIKELKSRLQVLKAQSEDPLPELHEDLHNEKELIKELEQSLASWTQNLKELQTMKADLTRHVLVEDVMVLKEQIEHLHRQWEDLCLRVAIRKQEIEDRLNTWVVFNEKNKELCAWLVQMENKVLQTADISIEEMIEKLQKDCMEEINLFSENKLQLKQMGDQLIKASNKSRAAEIDDKLNKINDRWQHLFDVIGSRVKKLKETFAFIQQLDKNMSNLRTWLARIESELSKPVVYDVCDDQEIQKRLAEQQDLQRDIEQHSAGVESVFNICDVLLHDSDACANETECDSIQQTTRSLDRRWRNICAMSMERRMKIEETWRLWQKFLDDYSRFEDWLKSAERTAACPNSSEVLYTSAKEELKRFEAFQRQIHERLTQLELINKQYRRLARENRTDTASRLKQMVHEGNQRWDNLQRRVTAVLRRLRHFTNQREEFEGTRESILVWLTEMDLQLTNVEHFSESDADDKMRQLNGFQQEITLNTNKIDQLIVFGEQLIQKSEPLDAVLIEDELEELHRYCQEVFGRVSRFHRRLTSCTPGLEDEKEASENETDMEDPREIQTDSWRKRGESEEPSSPQSLCHLVAPGHERSGCETPVSVDSIPLEWDHTGDVGGSSSHEEDEEGPYYSALSDVEIPENPEAYLKMTTKTLKASSGKSISDGHSWHVPDSPSCPEHHYKQMEGDRNVPPVPPASSTPYKPPYGKLLLPPGTDGGKEGPRVLNGNPQQEDGGLAGITEQQSGAFDRWEMIQAQELHNKLKIKQNLQQLNSDISAITTWLKKTEAELEMLKMAKPPSDIQEIELRVKRLQEILKAFDTYKALVVSVNVSSKEFLQTESPESTELQSRLRQLSLLWEAAQGAVDSWRGGLRQSLMQCQDFHQLSQNLLLWLASAKNRRQKAHVTDPKADPRALLECRRELMQLEKELVERQPQVDMLQEISNSLLIKGHGEDCIEAEEKVHVIEKKLKQLREQVSQDLMALQGTQNPASPLPSFDEVDSGDQPPATSVPAPRAKFRAVRTTEGEEETESRVPGSTRPQRSFLSRVVRAALPLQLLLLLLLLLACLLPSSEEDYSCTQANNFARSFYPMLRYTNGPPPT

SEQ ID NO: 18178 - protein, 2780 aa, Artificial Sequence
  Synthetic polypeptide
SSMRHLGNREQPSPDTKRTNTLILDFPVSRTGEIERMEKQILSLNQRKEDLLVDLKATVLNLHQHLKQEQEGVERDRLPAVTSEEGGVAERDASERKLNRRGSMSYLAAVEEEVEESSVKSDHDKDMEEDRASSSSGTIVQEAYGKISTSDNSMAQILTPDSLNTEQGPECSLRPNQTEEGTTPPIEADTLDSSDAQGGLEPRVEKTRPEPTEVLHACKTQVAELELWLQQANVAVEPETLNADMQQVLEQQLVGCQAMLTEIEHKVAFLLETCKDQGLGDNGATQHEAEALSLKLKTVKCNLEKVQMMLQEKHSEDQHPTILKKSSEPEHQEALQPVNLSELESIVTERPQFSRQKDFQQQQVLELKPMEQKDFIKFIEFNAKKMWPQYCQHDNDTTQESSARYPTTEELKTYTTQLEDLRQEASNLQTQENMTEEAYINLDKKLFELFLTLSQCLSSVEEMLEMPRLYREDGSGQQVHYETLALELKKLYLALSDKKGDLLKAMTWPGENTNLLLECFDNLQVCLEHTQAAAVCRSKSLKAGLDYNRSYQKADAYTVELENAESRVAKLRDEGERLHLPYALLQEVYKLEDVLDSMWGMLRARYTELSSPFVTESQQDALLQGMVELVKIGKEKLAHGHLKQTKSKVALQAQIENHKVFFQKLVADMLLIQAYSAKILPSLLQNRETFWAEQVTEVKILEEKSRQCGMKLQSLLQKWEEFDENYASLEKDLEILISTLPSVSLVEETEERLVERISFYQQIKRNIGGKHARLYQTLNEGKQLVASVSCPELEGQIAKLEEQWLSLNKKIDHELHRLQALLKHLLSYNRDSDQLTKWLESSQHTLNYWKEQSLNVSQDLDTIRSNINNFFEFSKEVDEKSSLKTAVISIGNQLLHLKETDTATLRASLAQFEQKWTMLITQLPDIQEKLHQLQMEKLPSRKAITEMISWMNNVEHQTSDEDSVHSPSSASQVKHLLQKHKEFRMEMDYKQWIVDFVNQSLLQLSTCDVESKRYERTEFAEHLGEMNRQWHRVHGMLNRKIQHLEQLLESITESENKIQILNNWLEAQEERLKTLQKPESVISVQKLLLDCQDIENQLAIKSKALDELKQSYLTLESGAVPLLEDTASRIDELFQKRSSVLTQVNQLKTSMQSVLQEWKIYDQLYDEVNMMTIRFWYCMEHSKPVVLSLETLRCQVENLQSLQDEAESSEGSWEKLQEVIGKLKGLCPSVAEIIEEKCQNTHKRWTQVNQAIADQLQKAQSLLQLWKAYSNAHGEAAARLKQQEAKFQQLANISMSGNNLAEILPPALQDIKELQHDVQKTKEAFLQNSSVLDRLPQPAESSTHMLLPGPLHSLQRAAYLEKMLLVKANEFENHVLALTAQSPDIEHLNEVSLKLPLSDVAVKTLQNMNRQWIRATATALERCSELQGIGLNEKFLYCCEKWIQLLEKIEEALKVDVANSLPELLEQQKTYKMLEAEVSINQTIADSYVTQSLQLLDTTEIENRPEFITEFSKLTDRWQNAVQGVRQRKGDVDGLNAHVARCGGASLKKQDLRYSLHTACGAALLCRSSHGANKEIHFQRRRTTCALTLEAGEKLLLTTDLKTKESVGRRISQLQDSWKDMEPQLAEMIKQFQSTVETWDQCEKKIKELKSRLQVLKAQSEDPLPELHEDLHNEKELIKVAIRKQEIEDRLNTWVVFNEKNKELCAWLVQMENKVLQTADISIEEMIEKLQKRTVGREEVPERWECETIVSGHGTEESCFLSIRKFHQGRGLHILTCQLIPQDCMEEINLFSENKLQLKQMGDQLIKASNKSRAAEIDDKLNKINDRWQHLFDVIGSSMADQTNSRWMFFQWPRGIQRTVTWPWDHLCSCASTGHTGPFHSSVLRCFEQHIEFGIYRRTYKVNKELGGDKNGQRCPIIYPHGLVQCIRLGEPLILKRVKKLKETFAFIQQLDKNMSNLRTWLARIESELSKPVVYDVCDDQEIQKRLAEQQDLQRDIEQHSAGVESVFNICDVLLHDSDACANETECDSIQQTTRSLDRRWRNICAMSMERRMKIEETWRLWQKFLDDYSRFEDWLKSAERTAACPNSSEVLYTSAKEELKRFERQIHERLTQLELINKQYRRLARENRTDTASRLKQMVHEGNQRWDNLQRRVTAVLRRLRHFTNQREEFEGTRESILVWLTEMDLQLTNVEHFSESDADDKMRQLNGFQQEITLNTNKIDQLIVFGEQLIQKSEPLDAVLIEDELEELHRYCQEGLEDEKEASENETDMEDPREIQTDSWRKRGESEEPSSPQSLCHLVAPGHERSGCETPVSVDSIPLEWDHTGDVGGSSSHEEDEEGPYYSALSGKSISDGHSWHVPDSPSCPEHHYKQMEGDRNVPPVPPASSTPYKPPYVSLNFTGSTAYVCAFDRWEMIQAQELHNKLKIKQNLQQLNSDISAITTWLKKTEAELEMLKMAKPPSDIQEIELRVKRLQEILKAFDTYKALVVSVNVSSKEFLQTESPESTELQSRLRQLSLLWEAAQGAVDSWRGGLRQSLMQCQDFHQLSQNLLLWLASAKNRRQKAHVTDPKADPRALLECRRELMQLEKELVERQPQVDMLQEISNSLLIKGHGEDCIEAEEKVHVIEKKLKQLREQVSQDLMALQGTQNPASPLPSFDEVDSGDQPPATSVPAPRAKFLYPAVQSSENYRRRGGDREQGPRQHTATALLPLKGGPGSPTPAAAPPAAAAPGLPAALLRRRLQLHSGQQLCPVLLPHAEVHQWATPHIEGIAGHSATPPA

SEQ ID NO: 18179 - protein, 68 aa, Artificial Sequence
  Synthetic polypeptide
GAVAHTCNPSTLGGQGHSSVCPCWPVCQHRTWQFLHHCRPDRTQACWPRRVCSDGSRIWSRHWNGKVF

SEQ ID NO: 18180 - protein, 351 aa, Artificial Sequence
  Synthetic polypeptide
ARWLTPVIPALWEAKGTPVFVHAGPFANIAHGNSSIIADRIALKLVGPEGFVVTEAGFGADIGMEKFFNIKCRYSGLCPHVVVLVATVRALKMHGGGPTVTAGLPLPKAYIQENLELVEKGFSNLKKQIENARMFGIPVVVAVNAFKTDTESELDLISRLSREHGAFDAVKCTHWAEGGKGALALAQAVQRAAQAPSSFQLLYDLKLPVEDKIRIIAQKIYGADDIELLPEAQHKAEVYTKQGFGNLPICMAKTHLSLSHNPEQKGVPTGFILPIRDIRASVGAGFLYPLVGTITIHLQEATLKVWPVSIQAHWELGSISKPREVSPCPEDLKLIVGVSPEVIFSLNSHHV

SEQ ID NO: 18181 - protein, 44 aa, Artificial Sequence
  Synthetic polypeptide
SQHFGRPRALQCLSMLARLPTSHMAIPPSLQTGSHSSLLAQKGL

SEQ ID NO: 18182 - protein, 322 aa, Artificial Sequence
  Synthetic polypeptide
ARWLTPVIPALWEAKGTPVFVHAGPFANIAHGNSSIIADRIALKLVGPEGFVVTEAGFGADIGMEKFFNIKCRYSGLCPHVVVLVATVRALKMHGGGPTVTAGLPLPKAYIQENLELVEKGFSNLKKQIENARMFGIPVVVAVNAFKTDTESELDLISRLSREHGAFDAVKCTHWAEGGKGALALAQAVQRAAQAPSSFQLLYDLKLPVEDKIRIIAQKIYGADDIELLPEAQHKAEVYTKQGFGNLPICMAKTHLSLSHNPEQKGVPTGFILPIRDIRASVGAGFLYPLVGTMSTMPGLPTRPCFYDIDLDPETEQVNGLF

SEQ ID NO: 18183 - protein, 10 aa, Artificial Sequence
  Synthetic polypeptide
EEATPTLTTS

SEQ ID NO: 18184 - protein, 111 aa, Artificial Sequence
  Synthetic polypeptide
RLNGVKTWALGLAPCIPCPVVSWLCGASGSSSVRGSDTYLDYLLKIIDTPGLLKPEQVSALFGNIENIYALNSQLLRDLDSCNSDPVAVASCFVERSQEFDIYTQYCNNYP

SEQ ID NO: 18185 - protein, 1142 aa, Artificial Sequence
  Synthetic polypeptide
RLNGVKTWALGLAPCIPCPVVSWLCGASGSSSVRGSDTYLDYLLKIIDTPGLLKPEQVSALFGNIENIYALNSQLLRDLDSCNSDPVAVASCFVERSQEFDIYTQYCNNYPNSVAALTECMRDKQQAKFFRDRQELLQHSLPLGSYLLKPVQRILKYHLLLQEIAKHFDEEEDGFEVVEDAIDTMTCVAWYINDMKRRHEHAVRLQEIQSLLINWKGPDLTTYGELVLEGTFRVHRVRNERTFFLFDKTLLITKKRGDHFVYKGNIPCSSLMLIESTRDSLCFTVTHYKHSKQQYSIQAKTVEEKRNWTHHIKRLILENHHATIPQKAKEAILEMDSYYPNRYRCSPERLKKAWSSQDEVSTNVRQGRRQSEPTKHLLRQLNEKARAAGMKGKGRRESESSRSSRRPSGRSPTSTEKRMSFESISSLPEVEPDPEAGSEQEVFSAVEGPSAEETPSDTESPEVLETQLDAHQGLLGMDPPGDMVDFVAAESTEDLKALSSEEEEEMGGAAQEPESLLPPSVLDQASVIAERFVSSFSRRSSVAQEDSKSSGFGSPRLVSRSSSVLSLEGSEKGLARHGSATDSLSCQLSPEVDISVGVATEDSPSVNGMEPPSPGCPVEPDRSSCKKKESALSTRDRLLLDKIKSYYENAEHHDAGFSVRRRESLSYIPKGLVRNSISRFNSLPRPDPEPVPPVGSKRQVGSRPTSWALFELPGPSQAVKGDPPPISDAEFRPSSEIVKIWEGMESSGGSPGKGPGQGQANGFDLHEPLFILEEHELGAITEESATASPESSSPTEGRSPAHLARELKELVKELSSSTQGELVAPLHPRIVQLSHVMDSHVSERVKNKVYQLARQYSLRIKSNKPVMARPPLQWEKVAPERDGKSPTVPCLQEEAGEPLGGKGKRKPVLSLFDYEQLMAQEHSPPKPSSAGEMSPQRFFFNPSAVSQRTTSPGGRPSARSPLSPTETFSWPDVRELCSKYASRDEARRAGGGRPRGPPVNRSHSVPENMVEPPLSGRVGRCRSLSTKRGRGGGEAAQSPGPLPQSKPDGGETLYVTADLTLEDNRRVIVMEKGPLPSPTAGLEESSGQGPSSPVALLGQVQDFQQSAECQPKEEGSRDPADPSQQGRVRNLREKFQALNSVG

SEQ ID NO: 18186 - protein, 84 aa, Artificial Sequence
  Synthetic polypeptide
RLNGVKTWALGLAPCIPCPVVSWLCGASGSSSVRGSDTYLDYLLKIIDTPGLLKPEQVSALFGNIENIYALNSQLLRDLDSCNS

SEQ ID NO: 18187 - protein, 25 aa, Artificial Sequence
  Synthetic polypeptide
SQLLKRLKQEECLSPEVQGCRELSE

SEQ ID NO: 18188 - protein, 123 aa, Artificial Sequence
  Synthetic polypeptide
AQKFKAAENCQNEEILNSLKYVRPGGGYQPTFTLVQKCEVNGQNEHPVFAYLKDKLPYPYDDPFSLMTDPKLIIWSPVRRSDVAWNFEKFLIGPEGEPFRRYSRTFPTINIEPDIKRLLKVAI

SEQ ID NO: 18189 - protein, 54 aa, Artificial Sequence
  Synthetic polypeptide
HGQQSETPSLQKKKKISRAWWPVSVVSATKEAEAGGMLEPRSSRLQRTVRMRRS

SEQ ID NO: 18190 - protein, 12 aa, Artificial Sequence
  Synthetic polypeptide
SQRFGRLRTAQG

SEQ ID NO: 18191 - protein, 19 aa, Artificial Sequence
  Synthetic polypeptide
VQWLTPIIPALWEAKNCSG

SEQ ID NO: 18192 - protein, 59 aa, Artificial Sequence
  Synthetic polypeptide
DVGSASAPPPRLGCEERLCPATTPSGRIPRTAAKPKSWCVISTKAVAMAVSSIMWSTAS

SEQ ID NO: 18193 - protein, 50 aa, Artificial Sequence
  Synthetic polypeptide
GASLPGRPSSEMWGAPLPRRPVWDVRSASARPRPRLGESQGLQQSQKAGV

SEQ ID NO: 18194 - protein, 388 aa, Artificial Sequence
  Synthetic polypeptide
GAPLPGHDPVWENPKDCSKAKKLVCNINKGCGYGCQLHHVVYCFMIAYGTQRTLILESQNWRYATGGWETVFRPVSETCTDRSGISTGHWSGEVKDKNVQVVELPIVDSLHPRPPYLPLAVPEDLADRLVRVHGDPAVWWVSQFVKYLIRPQPWLEKEIEEATKKLGFKHPVIGVHVRRTDKVGTEAAFHPIEEYMVHVEEHFQLLARRMQVDKKRVYLATDDPSLLKEAKTKYPNYEFISDNSISWSAGLHNRYTENSLRGVILDIHFLSQADFLVCTFSSQVCRVAYEIMQTLHPDASANFHSLDDIYYFGGQNAHNQIAIYAHQPRTADEIPMEPGDIIGVAGNHWDGYSKGVNRKLGRTGLYPSYKVREKIETVKYPTYPEAEK

SEQ ID NO: 18195 - protein, 121 aa, Artificial Sequence
  Synthetic polypeptide
GAPLPGHDPVWENPKDCSKAKKLVCNINKGCGYGCQLHHVVYCFMIAYGTQRTLILESQNWRYATGGWETVFRPVSETCTDRSGISTGHWSGTPIMNLLVITLFPGQLDCTIDTQKIHFVE

SEQ ID NO: 18196 - protein, 37 aa, Artificial Sequence
  Synthetic polypeptide
DRTQWLTIVIPALWEAEVGGSLGQEIETILANMVPQL

SEQ ID NO: 18197 - protein, 166 aa, Artificial Sequence
  Synthetic polypeptide
VRRLRPSWLTWYPNYEFISDNSISWSAGLHNRYTENSLRGVILDIHFLSQADFLVCTFSSQVCRVAYEIMQTLHPDASANFHSLDDIYYFGGQNAHNQIAIYAHQPRTADEIPMEPGDIIGVAGNHWDGYSKGVNRKLGRTGLYPSYKVREKIETVKYPTYPEAEK

SEQ ID NO: 18198 - protein, 31 aa, Artificial Sequence
  Synthetic polypeptide
HGTPIMNLLVITLFPGQLDCTIDTQKIHFVE

SEQ ID NO: 18199 - protein, 41 aa, Artificial Sequence
  Synthetic polypeptide
VRRLRPSWLTWYPNYEFISDNSISWSAGLHNRYTENSLRGV

SEQ ID NO: 18200 - protein, 34 aa, Artificial Sequence
  Synthetic polypeptide
RCASFLFAFCHDDAVSLCLPGWSAMAPSRLTATR

SEQ ID NO: 18201 - protein, 112 aa, Artificial Sequence
  Synthetic polypeptide
HFPFPLFLLLWPCEDVPPSSLLSAMMMQSRSVSQAGVQWRHLGSLQPGEEPGPGRRKARCSRSWCQPDQVFLLLERMWQEEEEERGDFGRSGVILGRGNVEKGTALRSLCKG

SEQ ID NO: 18202 - protein, 7 aa, Artificial Sequence
  Synthetic polypeptide
GIFKLSE

SEQ ID NO: 18203 - protein, 34 aa, Artificial Sequence
  Synthetic polypeptide
NMACSSLPSTMIVRPPQPHQTVGWDYISIQDSTR

SEQ ID NO: 18204 - protein, 696 aa, Artificial Sequence
  Synthetic polypeptide
GLPSHIKLLGGTISAYKIVPDEIEEIKETLIDWCDEKELNLILTTGGTGFAPRDVTPEATKEVIEREAPGMALAMLMGSLNVTPLGMLSRPVCGIRGKTLIINLPGSKKGSQECFQFILPALPHAIDLLRDAIVKVKEVHDELEDLPSPPPPLSPPPTTSPHKQTEDKGVQCEEEEEEKKDSGVASTEDSSSSHITAAAIAAKIPDSIISRGVQVLPRDTASLSTTPSESPRAQATSRLSTASCPTPKVQSRCSSKENILRASHSAVDITKVARRHRMSPFPLTSMDKAFITVLEMTPVLGTEIINYRDGMGRVLAQDVYAKDNLPPFPASVKDGYAVRAADGPGDRFIIGESQAGEQPTQTVMPGQVMRVTTGAPIPCGADAVVQVEDTELIRESDDGTEELEVRILVQARPGQDIRPIGHDIKRGECVLAKGTHMGPSEIGLLATVGVTEVEVNKFPVVAVMSTGNELLNPEDDLLPGKIRDSNRSTLLATIQEHGYPTINLGIVGDNPDDLLNALNEGISRADVIITSGGVSMGEKDYLKQVLDIDLHAQIHFGRVFMKPGLPTTFATLDIDGVRKIIFALPGNPVSAVVTCNLFVVPALRKMQGILDPRPTIIKARLSCDVKLDPRPEYHRCILTWHHQEPLPWAQSTGNQMSSRLMSMRSANGLLMLPPKTEQYVELHKGEVVDVMVIGRL

SEQ ID NO: 18205 - protein, 49 aa, Artificial Sequence
  Synthetic polypeptide
KQEFPCTGSLLACSHPHIKHGLLLLAFHHDCEASPATSNCWVGLYQHTR

SEQ ID NO: 18206 - protein, 729 aa, Artificial Sequence
  Synthetic polypeptide
GLPSHIKLLGGTISAYKIVPDEIEEIKETLIDWCDEKELNLILTTGGTGFAPRDVTPEATKEVIEREAPGMALAMLMGSLNVTPLGMLSRPVCGIRGKTLIINLPGSKKGSQECFQFILPALPHAIDLLRDAIVKVKEVHDELEDLPSPPPPLSPPPTTSPHKQTEDKGVQCEEEEEEKKDSGVASTEDSSSSHITAAAIAAKKHPFYTSPAVVMAHGEQPIPGLINYSHHSTDERIPDSIISRGVQVLPRDTASLSTTPSESPRAQATSRLSTASCPTPKVQSRCSSKENILRASHSAVDITKVARRHRMSPFPLTSMDKAFITVLEMTPVLGTEIINYRDGMGRVLAQDVYAKDNLPPFPASVKDGYAVRAADGPGDRFIIGESQAGEQPTQTVMPGQVMRVTTGAPIPCGADAVVQVEDTELIRESDDGTEELEVRILVQARPGQDIRPIGHDIKRGECVLAKGTHMGPSEIGLLATVGVTEVEVNKFPVVAVMSTGNELLNPEDDLLPGKIRDSNRSTLLATIQEHGYPTINLGIVGDNPDDLLNALNEGISRADVIITSGGVSMGEKDYLKQVLDIDLHAQIHFGRVFMKPGLPTTFATLDIDGVRKIIFALPGNPVSAVVTCNLFVVPALRKMQGILDPRPTIIKARLSCDVKLDPRPEYHRCILTWHHQEPLPWAQSTGNQMSSRLMSMRSANGLLMLPPKTEQYVELHKGEVVDVMVIGRL

SEQ ID NO: 18207 - protein, 340 aa, Artificial Sequence
  Synthetic polypeptide
GLPSHIKLLGGTISAYKIVPDEIEEIKKFPTFPFCGLQKGATKEVIEREAPGMALAMLMGSLNVTPLGMLSRPVCGIRGKTLIINLPGSKKGSQECFQFILPALPHAIDLLRDAIVKVKEVHDELEDLPSPPPPLSPPPTTSPHKQTEDKGVQCEEEEEEKKDSGVASTEDSSSSHITAAAIAAKKHPFYTSPAVVMAHGEQPIPGLINYSHHSTDERIPDSIISRGVQVLPRDTASLSTTPSESPRAQATSRLSTASCPTPKVQSRCSSKENILRASHSAVDITKVARRHRMSPFPLTSMDKAFITVLEMTPVLGTEIINYRGTIIFDHCPFFSSFFSK

SEQ ID NO: 18208 - protein, 742 aa, Artificial Sequence
  Synthetic polypeptide
GLPSHIKLLGGTISAYKIVPDEIEEIKETLIDWCDEKELNLILTTGGTGFAPRDVTPEKFPTFPFCGLQKGATKEVIEREAPGMALAMLMGSLNVTPLGMLSRPVCGIRGKTLIINLPGSKKGSQECFQFILPALPHAIDLLRDAIVKVKEVHDELEDLPSPPPPLSPPPTTSPHKQTEDKGVQCEEEEEEKKDSGVASTEDSSSSHITAAAIAAKIPDSIISRGVQVLPRDTASLSTTPSESPRAQATSRLSTASCPTPKQIRRPDESKGVASRVGSLKARLPSCSSTYSVSEVQSRCSSKENILRASHSAVDITKVARRHRMSPFPLTSMDKAFITVLEMTPVLGTEIINYRDGMGRVLAQDVYAKDNLPPFPASVKDGYAVRAADGPGDRFIIGESQAGEQPTQTVMPGQVMRVTTGAPIPCGADAVVQVEDTELIRESDDGTEELEVRILVQARPGQDIRPIGHDIKRGECVLAKGTHMGPSEIGLLATVGVTEVEVNKFPVVAVMSTGNELLNPEDDLLPGKIRDSNRSTLLATIQEHGYPTINLGIVGDNPDDLLNALNEGISRADVIITSGGVSMGEKDYLKQVLDIDLHAQIHFGRVFMKPGLPTTFATLDIDGVRKIIFALPGNPVSAVVTCNLFVVPALRKMQGILDPRPTIIKARLSCDVKLDPRPEYHRCILTWHHQEPLPWAQSTGNQMSSRLMSMRSANGLLMLPPKTEQYVELHKGEVVDVMVIGRL

SEQ ID NO: 18209 - protein, 665 aa, Artificial Sequence
  Synthetic polypeptide
GLPSHIKLLGGTISAYKIVPDEIEEIKATKEVIEREAPGMALAMLMGSLNVTPLGMLSRPVCGIRGKTLIINLPGSKKGSQECFQFILPALPHAIDLLRDAIVKVKEVHDELEDLPSPPPPLSPPPTTSPHKQTEDKGVQCEEEEEEKKDSGVASTEDSSSSHITAAAIAAKIPDSIISRGVQVLPRDTASLSTTPSESPRAQATSRLSTASCPTPKVQSRCSSKENILRASHSAVDITKVARRHRMSPFPLTSMDKAFITVLEMTPVLGTEIINYRDGMGRVLAQDVYAKDNLPPFPASVKDGYAVRAADGPGDRFIIGESQAGEQPTQTVMPGQVMRVTTGAPIPCGADAVVQVEDTELIRESDDGTEELEVRILVQARPGQDIRPIGHDIKRGECVLAKGTHMGPSEIGLLATVGVTEVEVNKFPVVAVMSTGNELLNPEDDLLPGKIRDSNRSTLLATIQEHGYPTINLGIVGDNPDDLLNALNEGISRADVIITSGGVSMGEKDYLKQVLDIDLHAQIHFGRVFMKPGLPTTFATLDIDGVRKIIFALPGNPVSAVVTCNLFVVPALRKMQGILDPRPTIIKARLSCDVKLDPRPEYHRCILTWHHQEPLPWAQSTGNQMSSRLMSMRSANGLLMLPPKTEQYVELHKGEVVDVMVIGRL

SEQ ID NO: 18210 - protein, 56 aa, Artificial Sequence
  Synthetic polypeptide
DNRHAFNRSLQGRHQEWTRRRHRSWAKGRESWERCMDFCAPGLIFEPQQLQEHGKP

SEQ ID NO: 18211 - protein, 81 aa, Artificial Sequence
  Synthetic polypeptide
GQGQDGQLDTDKWNSSHGSTETTGMLLTDLYREGIKSGPGEDIEAGLKEEKAGNAAWTFVHQDSFLNHNSSRSMGNPDRLV

SEQ ID NO: 18212 - protein, 677 aa, Artificial Sequence
  Synthetic polypeptide
TTTAPGAWETLIDWCDEKELNLILTTGGTGFAPRDVTPEATKEVIEREAPGMALAMLMGSLNVTPLGMLSRPVCGIRGKTLIINLPGSKKGSQECFQFILPALPHAIDLLRDAIVKVKEVHDELEDLPSPPPPLSPPPTTSPHKQTEDKGVQCEEEEEEKKDSGVASTEDSSSSHITAAAIAAKIPDSIISRGVQVLPRDTASLSTTPSESPRAQATSRLSTASCPTPKVQSRCSSKENILRASHSAVDITKVARRHRMSPFPLTSMDKAFITVLEMTPVLGTEIINYRDGMGRVLAQDVYAKDNLPPFPASVKDGYAVRAADGPGDRFIIGESQAGEQPTQTVMPGQVMRVTTGAPIPCGADAVVQVEDTELIRESDDGTEELEVRILVQARPGQDIRPIGHDIKRGECVLAKGTHMGPSEIGLLATVGVTEVEVNKFPVVAVMSTGNELLNPEDDLLPGKIRDSNRSTLLATIQEHGYPTINLGIVGDNPDDLLNALNEGISRADVIITSGGVSMGEKDYLKQVLDIDLHAQIHFGRVFMKPGLPTTFATLDIDGVRKIIFALPGNPVSAVVTCNLFVVPALRKMQGILDPRPTIIKARLSCDVKLDPRPEYHRCILTWHHQEPLPWAQSTGNQMSSRLMSMRSANGLLMLPPKTEQYVELHKGEVVDVMVIGRL

SEQ ID NO: 18213 - protein, 710 aa, Artificial Sequence
  Synthetic polypeptide
TTTAPGAWETLIDWCDEKELNLILTTGGTGFAPRDVTPEATKEVIEREAPGMALAMLMGSLNVTPLGMLSRPVCGIRGKTLIINLPGSKKGSQECFQFILPALPHAIDLLRDAIVKVKEVHDELEDLPSPPPPLSPPPTTSPHKQTEDKGVQCEEEEEEKKDSGVASTEDSSSSHITAAAIAAKKHPFYTSPAVVMAHGEQPIPGLINYSHHSTDERIPDSIISRGVQVLPRDTASLSTTPSESPRAQATSRLSTASCPTPKVQSRCSSKENILRASHSAVDITKVARRHRMSPFPLTSMDKAFITVLEMTPVLGTEIINYRDGMGRVLAQDVYAKDNLPPFPASVKDGYAVRAADGPGDRFIIGESQAGEQPTQTVMPGQVMRVTTGAPIPCGADAVVQVEDTELIRESDDGTEELEVRILVQARPGQDIRPIGHDIKRGECVLAKGTHMGPSEIGLLATVGVTEVEVNKFPVVAVMSTGNELLNPEDDLLPGKIRDSNRSTLLATIQEHGYPTINLGIVGDNPDDLLNALNEGISRADVIITSGGVSMGEKDYLKQVLDIDLHAQIHFGRVFMKPGLPTTFATLDIDGVRKIIFALPGNPVSAVVTCNLFVVPALRKMQGILDPRPTIIKARLSCDVKLDPRPEYHRCILTWHHQEPLPWAQSTGNQMSSRLMSMRSANGLLMLPPKTEQYVELHKGEVVDVMVIGRL

SEQ ID NO: 18214 - protein, 723 aa, Artificial Sequence
  Synthetic polypeptide
TTTAPGAWETLIDWCDEKELNLILTTGGTGFAPRDVTPEKFPTFPFCGLQKGATKEVIEREAPGMALAMLMGSLNVTPLGMLSRPVCGIRGKTLIINLPGSKKGSQECFQFILPALPHAIDLLRDAIVKVKEVHDELEDLPSPPPPLSPPPTTSPHKQTEDKGVQCEEEEEEKKDSGVASTEDSSSSHITAAAIAAKIPDSIISRGVQVLPRDTASLSTTPSESPRAQATSRLSTASCPTPKQIRRPDESKGVASRVGSLKARLPSCSSTYSVSEVQSRCSSKENILRASHSAVDITKVARRHRMSPFPLTSMDKAFITVLEMTPVLGTEIINYRDGMGRVLAQDVYAKDNLPPFPASVKDGYAVRAADGPGDRFIIGESQAGEQPTQTVMPGQVMRVTTGAPIPCGADAVVQVEDTELIRESDDGTEELEVRILVQARPGQDIRPIGHDIKRGECVLAKGTHMGPSEIGLLATVGVTEVEVNKFPVVAVMSTGNELLNPEDDLLPGKIRDSNRSTLLATIQEHGYPTINLGIVGDNPDDLLNALNEGISRADVIITSGGVSMGEKDYLKQVLDIDLHAQIHFGRVFMKPGLPTTFATLDIDGVRKIIFALPGNPVSAVVTCNLFVVPALRKMQGILDPRPTIIKARLSCDVKLDPRPEYHRCILTWHHQEPLPWAQSTGNQMSSRLMSMRSANGLLMLPPKTEQYVELHKGEVVDVMVIGRL

SEQ ID NO: 18215 - protein, 77 aa, Artificial Sequence
  Synthetic polypeptide
GQGQDGQLDTDKWNSSHGSTETTGMLLTDLYREGIKSGPGEDIEAGLKEEKAGNAAWTFVHQDSFLNHNSSRSMGNP

SEQ ID NO: 18216 - protein, 11 aa, Artificial Sequence
  Synthetic polypeptide
TTTAPGAWETL

SEQ ID NO: 18217 - protein, 288 aa, Artificial Sequence
  Synthetic polypeptide
TTTAPGAWETLIDWCDEKELNLILTTGGTGFAPRDVTPEATKEVIEREAPGMALAMLMGSLNVTPLGMLSRPVCGIRGKTLIINLPGSKKGSQECFQFILPALPHAIDLLRDAIVKVKEVHDELEDLPSPPPPLSPPPTTSPHKQTEDKGVQCEEEEEEKKDSGVASTEDSSSSHITAAAIAAKIPDSIISRGVQVLPRDTASLSTTPSESPRAQATSRLSTASCPTPKQIRRPDESKGVASRVGSLKVQSRCSSKENILRASHSAVDITKVARRHRMSPFPLTSMDK

SEQ ID NO: 18218 - protein, 238 aa, Artificial Sequence
  Synthetic polypeptide
KFEGYIDLSKRRVSPEEAIKCEDKFTKSKTVYSILRHVAEVLEYTKDEQLESLFQRTAWVFDDKYKRPGYGAYDAFKHAVSDPSILDSLDLNEDEREVLINNINRRLTPQAVKIRADIEVACYGYEGIDAVKEALRAGLNCSTENMPIKINLIAPPRYVMTTTTLERTEGLSVLSQAMAVIKEKIEEKRGVFNVQMEPKVVTDTDETELARQMERLERENAEVDGDDDAEEMEAKAED

SEQ ID NO: 18219 - protein, 62 aa, Artificial Sequence
  Synthetic polypeptide
TSMKNNYLKTMRSSQKQAKIENLKDILICQKEEFLQRKQSNVKTNSQNPKLFIAFFVMLLRC

SEQ ID NO: 18220 - protein, 196 aa, Artificial Sequence
  Synthetic polypeptide
KFEGYIDLSKRRVSPEEAIKCEDKFTKSKTVYSILRHVAEVLEYTKDEQLESLFQRTAWVFDDKYKRPGYGAYDAFKHAVSDPSILDSLDLNEDEREVLINNINRRLTPQAVKIRADIEVACYGYEGIDAVKEALRAGLNCSTENMPIKINLIAPPRYVMTTTTLERTEGLSVLSQAMAVIKEKIEEKRGVFNVQM

SEQ ID NO: 18221 - protein, 218 aa, Artificial Sequence
  Synthetic polypeptide
KFEGYIDLSKRRVSPEEAIKCEDKFTKSKTVYSILRHVAEVLEYTKDEQLESLFQRTAWVFDDKYKRPGYGAYDAFKHAVSDPSILDSLDLNEDEREVLINNINRRLTPQAVKIRADIEVACYGYEGIDAVKEALRAGLNCSTENMPIKINLIAPPRYVMTTTTLERTEGLSVLSQAMAVIKEKIEEKRGVFNVQMEVRSIDSFLIMTQEVPKRSSCR

SEQ ID NO: 18222 - protein, 43 aa, Artificial Sequence
  Synthetic polypeptide
AFALFFLPSIQPWINVPAFSVLVDCWVLLGKISLAETHLFWIV

SEQ ID NO: 18223 - protein, 12 aa, Artificial Sequence
  Synthetic polypeptide
EKSVLQRPIYFG

SEQ ID NO: 18224 - protein, 232 aa, Artificial Sequence
  Synthetic polypeptide
DLIPNLFSPCLFAISCLFSLIQHRHTMIHHFNDFVAIIVSFCLVFPSIHPALDQCSCLLCTCRLLGATRKNQSCRDPSILDSLDLNEDEREVLINNINRRLTPQAVKIRADIEVACYGYEGIDAVKEALRAGLNCSTENMPIKINLIAPPRYVMTTTTLERTEGLSVLSQAMAVIKEKIEEKRGVFNVQMEPKVVTDTDETELARQMERLERENAEVDGDDDAEEMEAKAED

SEQ ID NO: 18225 - protein, 190 aa, Artificial Sequence
  Synthetic polypeptide
DLIPNLFSPCLFAISCLFSLIQHRHTMIHHFNDFVAIIVSFCLVFPSIHPALDQCSCLLCTCRLLGATRKNQSCRDPSILDSLDLNEDEREVLINNINRRLTPQAVKIRADIEVACYGYEGIDAVKEALRAGLNCSTENMPIKINLIAPPRYVMTTTTLERTEGLSVLSQAMAVIKEKIEEKRGVFNVQM

SEQ ID NO: 18226 - protein, 212 aa, Artificial Sequence
  Synthetic polypeptide
DLIPNLFSPCLFAISCLFSLIQHRHTMIHHFNDFVAIIVSFCLVFPSIHPALDQCSCLLCTCRLLGATRKNQSCRDPSILDSLDLNEDEREVLINNINRRLTPQAVKIRADIEVACYGYEGIDAVKEALRAGLNCSTENMPIKINLIAPPRYVMTTTTLERTEGLSVLSQAMAVIKEKIEEKRGVFNVQMEVRSIDSFLIMTQEVPKRSSCR

SEQ ID NO: 18227 - protein, 40 aa, Artificial Sequence
  Synthetic polypeptide
GLARWLTPVIPAFWEAEADGSLEMAETEVQTHPWKVQVVS

SEQ ID NO: 18228 - protein, 28 aa, Artificial Sequence
  Synthetic polypeptide
SQHSGRLRQMDHLRWPRQRFKPIPGKYK

SEQ ID NO: 18229 - protein, 281 aa, Artificial Sequence
  Synthetic polypeptide
FLHFHLRLVEIAESRFPRYFNTEEKLLLTSSKVHLYRELTCDEVLQRIESLEEEIISKGIKLVILDSVASVVRKEFDAQLQGNLKERNKFLAREASSLKYLAEEFSIPVILTNQITTHLSGALASQADLVSPADDLSLSEGTSGSSCVIAALGNTWSHSVNTRLILQYLDSERRQILIAKSPLAPFTSFVYTIKEEGLVLQVVRTVARVSPRSECWSAADSHPSPTFLIPDVVLRKTRNPRLLPSVSMCPPQMHSTVLSSALPPTNWATGIRTETLDEHPV

SEQ ID NO: 18230 - protein, 34 aa, Artificial Sequence
  Synthetic polypeptide
GRSQDGRIGTALVYSSQHERRRRWVISAFPSETG

SEQ ID NO: 18231 - protein, 206 aa, Artificial Sequence
  Synthetic polypeptide
FLHFHLRLVEIAESRFPRYFNTEEKLLLTSSKVHLYRELTCDEVLQRIESLEEEIISKGIKLVILDSVASVVRKEFDAQLQGNLKERNKFLAREASSLKYLAEEFSIPVILTNQITTHLSGALASQADLVSPADDLSLSEGTSGSSCVIAALGNTWSHSVNTRLILQYLDSERRQILIAKSPLAPFTSFVYTIKEEGLVLQGQEKP

SEQ ID NO: 18232 - protein, 240 aa, Artificial Sequence
  Synthetic polypeptide
FLHFHLRLVEIAESRFPRYFNTEEKLLLTSSKVHLYRELTCDEVLQRIESLEEEIISKGIKLVILDSVASVVRKEFDAQLQGNLKERNKFLAREASSLKYLAEEFSIPVILTNQITTHLSGALASQADLVSPADDLSLSEGTSGSSCVIAALGNTWSHSVNTRLILQYLDSERRQILIAKSPLAPFTSFVYTIKEEGLVLQETTFCSVTQAELNWAPEILPPQPPEQLGLQMCHHTQLIF

SEQ ID NO: 18233 - protein, 222 aa, Artificial Sequence
  Synthetic polypeptide
FLHFHLRLVEIAESRFPRYFNTEEKLLLTSSKVHLYRELTCDEVLQRIESLEEEIISKGIKLVILDSVASVVRKEFDAQLQGNLKERNKFLAREASSLKYLAEEFSIPVILTNQITTHLSGALASQADLVSPADDLSLSEGTSGSSCVIAALGNTWSHSVNTRLILQYLDSERRQILIAKSPLAPFTSFVYTIKEEGLVLQEFWHICISGFSIQNRLKENES

SEQ ID NO: 18234 - protein, 28 aa, Artificial Sequence
  Synthetic polypeptide
GRTWWLMPVIPALWEAKAARSQDIHGMV

SEQ ID NO: 18235 - protein, 870 aa, Artificial Sequence
  Synthetic polypeptide
SQHFGRPRQPDHKTFTAWCNSHLRKAGTQIENIEEDFRDGLKLMLLLEVISGERLAKPERGKMRVHKISNVNKALDFIASKGVKLVSIGAEEIVDGNVKMTLGMIWTIILRFAIQDISVEETSAKEGLLLWCQRKTAPYKNVNIQNFHISWKDGLGFCALIHRHRPELIDYGKLRKDDPLTNLNTAFDVAEKYLDIPKMLDAEDIVGTARPDEKAIMTYVSSFYHAFSGAQKAETAANRICKVLAVNQENEQLMEDYEKLASDLLEWIRRTIPWLENRVPENTMHAMQQKLEDFRDYRRLHKPPKVQEKCQLEINFNTLQTKLRLSNRPAFMPSEGRMVSDINNAWGCLEQVEKGYEEWLLNEIRRLERLDHLAEKFRQKASIHEAWTDGKEAMLRQKDYETATLSEIKALLKKHEAFESDLAAHQDRVEQIAAIAQELNELDYYDSPSVNARCQKICDQWDNLGALTQKRREALERTEKLLETIDQLYLEYAKRAAPFNNWMEGAMEDLQDTFIVHTIEEIQGLTTAHEQFKATLPDADKERLAILGIHNEVSKIVQTYHVNMAGTNPYTTITPQEINGKWDHVRQLVPRRDQALTEEHARQQHNERLRKQFGAQANVIGPWIQTKMEEIGRISIEMHGTLEDQLSHLRQYEKSIVNYKPKIDQLEGDHQLIQEALIFDNKHTNYTMEHIRVGWEQLLTTIARTINEVENQILTRDAKGISQEQMNEFRASFNHFDRDHSGTLGPEEFKACLISLGYDIGNDPQGEAEFARIMSIVDPNRLGVVTFQAFIDFMSRETADTDTADQVMASFKILAGDKNYITMDELRRELPPDQAEYCIARMAPYTGPDSVPGALDYMSFSTALYGESDL

SEQ ID NO: 18236 - protein, 49 aa, Artificial Sequence
  Synthetic polypeptide
PDVVAHACNPSTLGGQGSQITRHSRHGVTPTSGRRGHRSRTSKRTSGMA

SEQ ID NO: 18237 - protein, 892 aa, Artificial Sequence
  Synthetic polypeptide
SQHFGRPRQPDHKTFTAWCNSHLRKAGTQIENIEEDFRDGLKLMLLLEVISGERLAKPERGKMRVHKISNVNKALDFIASKGVKLVSIGAEEIVDGNVKMTLGMIWTIILRFAIQDISVEETSAKEGLLLWCQRKTAPYKNVNIQNFHISWKDGLGFCALIHRHRPELIDYGKLRKDDPLTNLNTAFDVAEKYLDIPKMLDAEDIVGTARPDEKAIMTYVSSFYHAFSGAQKAETAANRICKVLAVNQENEQLMEDYEKLASDLLEWIRRTIPWLENRVPENTMHAMQQKLEDFRDYRRLHKPPKVQEKCQLEINFNTLQTKLRLSNRPAFMPSEGRMVSDINNAWGCLEQVEKGYEEWLLNEIRRLERLDHLAEKFRQKASIHEAWTDGKEAMLRQKDYETATLSEIKALLKKHEAFESDLAAHQDRVEQIAAIAQELNELDYYDSPSVNARCQKICDQWDNLGALTQKRREALERTEKLLETIDQLYLEYAKRAAPFNNWMEGAMEDLQDTFIVHTIEEIQGLTTAHEQFKATLPDADKERLAILGIHNEVSKIVQTYHVNMAGTNPYTTITPQEINGKWDHVRQLVPRRDQALTEEHARQQHNERLRKQFGAQANVIGPWIQTKMEEIGRISIEMHGTLEDQLSHLRQYEKSIVNYKPKIDQLEGDHQLIQEALIFDNKHTNYTMEHIRVGWEQLLTTIARTINEVENQILTRDAKGISQEQMNEFRASFNHFDRDHSGTLGPEEFKACLISLGYDIGNDPQKKTGMMDTDDFRACLISMGYNMGEAEFARIMSIVDPNRLGVVTFQAFIDFMSRETADTDTADQVMASFKILAGDKNYITMDELRRELPPDQAEYCIARMAPYTGPDSVPGALDYMSFSTALYGESDL

SEQ ID NO: 18238 - protein, 865 aa, Artificial Sequence
  Synthetic polypeptide
SQHFGRPRQPDHKTFTAWCNSHLRKAGTQIENIEEDFRDGLKLMLLLEVISGERLAKPERGKMRVHKISNVNKALDFIASKGVKLVSIGAEEIVDGNVKMTLGMIWTIILRFAIQDISVEETSAKEGLLLWCQRKTAPYKNVNIQNFHISWKDGLGFCALIHRHRPELIDYGKLRKDDPLTNLNTAFDVAEKYLDIPKMLDAEDIVGTARPDEKAIMTYVSSFYHAFSGAQKAETAANRICKVLAVNQENEQLMEDYEKLASDLLEWIRRTIPWLENRVPENTMHAMQQKLEDFRDYRRLHKPPKVQEKCQLEINFNTLQTKLRLSNRPAFMPSEGRMVSDINNAWGCLEQVEKGYEEWLLNEIRRLERLDHLAEKFRQKASIHEAWTDGKEAMLRQKDYETATLSEIKALLKKHEAFESDLAAHQDRVEQIAAIAQELNELDYYDSPSVNARCQKICDQWDNLGALTQKRREALERTEKLLETIDQLYLEYAKRAAPFNNWMEGAMEDLQDTFIVHTIEEIQGLTTAHEQFKATLPDADKERLAILGIHNEVSKIVQTYHVNMAGTNPYTTITPQEINGKWDHVRQLVPRRDQALTEEHARQQHNERLRKQFGAQANVIGPWIQTKMEEIGRISIEMHGTLEDQLSHLRQYEKSIVNYKPKIDQLEGDHQLIQEALIFDNKHTNYTMEHIRVGWEQLLTTIARTINEVENQILTRDAKGISQEQMNEFRASFNHFDRKKTGMMDTDDFRACLISMGYNMGEAEFARIMSIVDPNRLGVVTFQAFIDFMSRETADTDTADQVMASFKILAGDKNYITMDELRRELPPDQAEYCIARMAPYTGPDSVPGALDYMSFSTALYGESDL

SEQ ID NO: 18239 - protein, 908 aa, Artificial Sequence
  Synthetic polypeptide
SQHFGRPRQPDHKTFTAWCNSHLRKAGTQIENIEEDFRDGLKLMLLLEVISGERLAKPERGKMRVHKISNVNKALDFIASKGVKLVSIGAEEIVDGNVKMTLGMIWTIILRFAIQDISVEETSAKEGLLLWCQRKTAPYKNVNIQNFHISWKDGLGFCALIHRHRPELIDYGKLRKDDPLTNLNTAFDVAEKYLDIPKMLDAEDIVGTARPDEKAIMTYVSSFYHAFSGAQKAETAANRICKVLAVNQENEQLMEDYEKLASDLLEWIRRTIPWLENRVPENTMHAMQQKLEDFRDYRRLHKPPKVQEKCQLEINFNTLQTKLRLSNRPAFMPSEGRMVSDINNAWGCLEQVEKGYEEWLLNEIRRLERLDHLAEKFRQKASIHEAWTDGKEAMLRQKDYETATLSEIKALLKKHEAFESDLAAHQDRVEQIAAIAQELNELDYYDSPSVNARCQKICDQWDNLGALTQKRREALERTEKLLETIDQLYLEYAKRAAPFNNWMEGAMEDLQDTFIVHTIEEIQGLTTAHEQFKATLPDADKERLAILGIHNEVSKIVQTYHVNMAGTNPYTTITPQEINGKWDHVRQLVPRRDQALTEEHARQQHNERLRKQFGAQANVIGPWIQTKMEEIGRISIEMHGTLEDQLSHLRQYEKSIVNYKPKIDQLEGDHQLIQEALIFDNKHTNYTMEHIRVGWEQLLTTIARTINEVENQILTRDAKGISQEQMNEFRASFNHFDRKKTGMMDTDDFRACLISMGYNMGEAEFARIMSIVDPNRLGVVTFQAFIDFMSRETADTDTADQVMASFKILAGDKLQEGGKMQTAHAAFTPPGFAAVSGRAALRLLDFAAFLTTLSSQNYITMDELRRELPPDQAEYCIARMAPYTGPDSVPGALDYMSFSTALYGESDL

SEQ ID NO: 18240 - protein, 259 aa, Artificial Sequence
  Synthetic polypeptide
SQHFGRPRQPDHKTFTAWCNSHLRKAGTQIENIEEDFRDGLKLMLLLEVISGERLAKPERGKMRVHKISNVNKALDFIASKGVKLVSIGAEEIVDGNVKMTLGMIWTIILRFAIQDISVEETSAKEGLLLWCQRKTAPYKNVNIQNFHISWKDGLGFCALIHRHRPELIDYGKLRKDDPLTNLNTAFDVAEKYLDIPKMLDAEDIVGTARPDEKAIMTYVSSFYHAFSGAQKAETAANRICKVLAVNQENEQLMEDYEK

SEQ ID NO: 18241 - protein, 127 aa, Artificial Sequence
  Synthetic polypeptide
SQHFGRPRQPDHKTFTAWCNSHLRKAGTQIENIEEDFRDGLKLMLLLEVISGERLAKPERGKMRVHKISNVNKALDFIASKGVKLVSIGAEEIVDGNVKMTLGMIWTIILRFAIQDISVEETSAKEG

SEQ ID NO: 18242 - protein, 51 aa, Artificial Sequence
  Synthetic polypeptide
SQHFGRPRQPDHKTFTAWCNSHLRKAGTQIENIEEDFRDGLKLMLLLEVIS

SEQ ID NO: 18243 - protein, 75 aa, Artificial Sequence
  Synthetic polypeptide
TYSSKFGRQSQPSVTSTNGLPKWPVCLGSPAQANLWRKNTTKNVIGYFGRWHHFESWSGMLRRCQQASAGLWPRC

SEQ ID NO: 18244 - protein, 524 aa, Artificial Sequence
  Synthetic polypeptide
ITPIKDSAQCEHIVVNLEGKASPLSLLQMASPSGLCVLVRLPKLICGGKTLPRTLLDILADGTILKVGVGCSEDASKLLQDYGLVVRGCLDLRYLAMRQRNNLLCNGLSLKSLAETVLNFPLDKSLLLRCSNWDAETLTEDQVIYAARDAQISVALFLHLLGYPFSRNSPGEKNDDHSSWRKVLEKCQGVVDIPFRSKGMSRLGEEVNGEATESQQKPRNKKSKMDGMVPGNHQGRDPRKHKRKPLGVGYSARKSPLYDNCFLHAPDGQPLCTCDRRKAQWYLDKGIGELVSEEPFVVKLRFEPAGRPESPGDYYLMVKENLCVVCGKRDSYIRKNVIPHEYRKHFPIEMKDHNSHDVLLLCTSCHAISNYYDNHLKQQLAKEFQAPIGSEEGLRLLEDPERRQVRSGARALLNAESLPTQRKEELLQALREFYNTDVVTEEMLQEAASLETRISNENYVPHGLKVVQCHSQGGLRSLMQLESRWRQHFLDSMQPKHLPQQWSVDHNHQKLLRKFGEDLPIQLS

SEQ ID NO: 18245 - protein, 96 aa, Artificial Sequence
  Synthetic polypeptide
AEIVPMHSSLGNKSKKSISKKKSVCKMYEEHLKRMNPNSPSITYDISQLFDFIDDLADLSCLVYRADTQTYQPYNKDWIKEKIYVLLRRQAQQAGK

SEQ ID NO: 18246 - protein, 55 aa, Artificial Sequence
  Synthetic polypeptide
SQLLGRLSLRQENRLNPGGRGCSEPRLCQCTPAWATRAKNPSQKKKVFVKCMKNI

SEQ ID NO: 18247 - protein, 33 aa, Artificial Sequence
  Synthetic polypeptide
IREAEVAVSRDCANALQPGQQEQKIHLKKKKCL

SEQ ID NO: 18248 - protein, 63 aa, Artificial Sequence
  Synthetic polypeptide
AEIVPMHSSLGNKSKKSISKKKSVCKMYEEHLKRMNPNSPSITYDISQLFDFIDDLADLSCLV

SEQ ID NO: 18249 - protein, 24 aa, Artificial Sequence
  Synthetic polypeptide
DPQIRASWTACRTENTTKQVKHIM

SEQ ID NO: 18250 - protein, 32 aa, Artificial Sequence
  Synthetic polypeptide
LLFPFCNDWKLPEILRFVLLGQPAELKTPPSK

SEQ ID NO: 18251 - protein, 51 aa, Artificial Sequence
  Synthetic polypeptide
NPGPLTKGQQRAGLQHRRWDRSAVCLQRQWHLRQPHQRKWGCGPGWAAPGG

SEQ ID NO: 18252 - protein, 129 aa, Artificial Sequence
  Synthetic polypeptide
QKASKGLGFNIVGGTDQQYVSNDSGIYVSRIKENGAAALDGRLQEGDKILSVNGQDLKNLLHQDAVDLFRNAGYAVSLRVQHRLQVQNGPIGHRGEGDPSGIPIFMVLVPVFALTMVAAWAFMRYRQQL

SEQ ID NO: 18253 - protein, 65 aa, Artificial Sequence
  Synthetic polypeptide
ACSKLLHLKSWPSDKRPAKGWASTSSVGQISSMSPTTVASTSAASKKMGLRPWMGGSRRVIRSFR

SEQ ID NO: 18254 - protein, 14 aa, Artificial Sequence
  Synthetic polypeptide
DQHLYKPACSRLSW

SEQ ID NO: 18255 - protein, 14 aa, Artificial Sequence
  Synthetic polypeptide
NNETSICTSLPAPG

SEQ ID NO: 18256 - protein, 143 aa, Artificial Sequence
  Synthetic polypeptide
IPSLSLSRCVDLGNFFSSLGLSFLTYKIETVIVPTLEYSEDYISNTCKTMRPASVQACLLQAELVNYERVKEYCLKVLKKEGENFKALYRSGVAFYHLGDYDKALYYLKEARTQQPTDTNVIRYIQLTEMKLSRCSQREKEAM

SEQ ID NO: 18257 - protein, 42 aa, Artificial Sequence
  Synthetic polypeptide
QGSPTPRPWTGMDLRPVRNRAAQQEVSSLLRCMRLVAVICHL

SEQ ID NO: 18258 - protein, 25 aa, Artificial Sequence
  Synthetic polypeptide
RGPQLPGHGLAWICGLLGTGLHSRR

SEQ ID NO: 18259 - protein, 1400 aa, Artificial Sequence
  Synthetic polypeptide
EQGCTAGGKFSSTLYETGGCDMSLVNFEPAARRASNICDTDSHVSSSTSVRFYPHDVLSLPQIRLNRLLTIDTDLLEQQDIDLSPDLAATYGPTEEAAQKVKHYYRFWILPQLWIGINFDRLTLLALFDRNREILENVLAVILAILVAFLGSILLIQGFFRDIWVFQFCLVIASCQYSLLKSVQPDSSSPRHGHNRIIAYSRPVYFCICCGLIWLLDYGSRNLTATKFKLYGITFTNPLVFISARDLVIVFTLCFPIVFFIGLLPQVNTFVMYLCEQLDIHIFGGNATTSLLAALYSFICSIVAVALLYGLCYGALKDSWDGQHIPVLFSIFCGLLVAVSYHLSRQSSDPSVLFSLVQSKIFPKTEEKNPEDPLSEVKDPLPEKLRNSVSERLQSDLVVCIVIGVLYFAIHVSTVFTVLQPALKYVLYTLVGFVGFVTHYVLPQVRKQLPWHCFSHPLLKTLEYNQYEVRNAATMMWFEKLHVWLLFVEKNIIYPLIVLNELSSSAETIASPKKLNTELGALMITVAGLKLLRSSFSSPTYQYVTVIFTVLFFKFDYEAFSETMLLDLFFMSILFNKLWELLYKLQFVYTYIAPWQITWGSAFHAFAQPFAVPHSAMLFIQAAVSAFFSTPLNPFLGSAIFITSYVRPVKFWERDYNTKRVDHSNTRLASQLDRNPGTYCQQREVEAITEGVEEDEGFCCCEPGHIPHMLSFNAAFSQRWLAWEVIVTKYILEGYSITDNSAASMLQVFDLRKVLTTYYVKGIIYYVTTSSKLEEWLANETMQEGLRLCADRNYVDVDPTFNPNIDEDYDHRLAGISRESFCVIYLNWIEYCSSRRAKPVDVDKDSSLVTLCYGLCVLGRRALGTASHHMSSNLESFLYGLHALFKGDFRISSIRDEWIFADMELLRKVVVPGIRMSIKLHQDHFTSPDEYDDPTVLYEAIVSHEKNLVIAHEGDPAWRSAVLANSPSLLALRHVMDDGTNEYKIIMLNRRYLSFRVIKVNKECVRGLWAGQQQELVFLRNRNPERGSIQNAKQALRNMINSSCDQPIGYPIFVSPLTTSYSDSHEQLKDILGGPISLGNIRNFIVSTWHRLRKGCGAGCNSGGNIEDSDTGGGTSCTGNNATTANNPHSNVTQGSIGNPGQGSGTGLHPPVTSYPPTLGTSHSSHSVQSGLVRQSPARASVASQSSYCYSSRHSSLRMSTTGFVPCRRSSTSQISLRNLPSSIQSRLSMVNQMEPSGQSGLACVQHGLPSSSSSSQSIPACKHHTLVGFLATEGGQSSATDAQPGNTLSPANNSHSRKAEVIYRVQIVDPSQILEGINLSKRKELQWPDEGIRLKAGRNSWKDWSPQEGMEGHVIHRWVPCSRDPGTRSHIDKAVLLVQIDDKYVTVIETGVLELGAEV

SEQ ID NO: 18260 - protein, 1472 aa, Artificial Sequence
  Synthetic polypeptide
EQGCTAGGKFSSTLYETGGCDMSLVNFEPAARRASNICDTDSHVSSSTSVRFYPHDVLSLPQIRLNRLLTIDTDLLEQQDIDLSPDLAATYGPTEEAAQKVKHYYRFWILPQLWIGINFDRLTLLALFDRNREILENVLAVILAILVAFLGSILLIQGFFRDIWVFQFCLVIASCQYSLLKSVQPDSSSPRHGHNRIIAYSRPVYFCICCGLIWLLDYGSRNLTATKFKLYGITFTNPLVFISARDLVIVFTLCFPIVFFIGLLPQVNTFVMYLCEQLDIHIFGGNATTSLLAALYSFICSIVAVALLYGLCYGALKDSWDGQHIPVLFSIFCGLLVAVSYHLSRQSSDPSVLFSLVQSKIFPKTEEKNPEDPLSEVKDPLPEKLRNSVSERLQSDLVVCIVIGVLYFAIHVSTVFTVLQPALKYVLYTLVGFVGFVTHYVLPQVRKQLPWHCFSHPLLKTLEYNQYEVRNAATMMWFEKLHVWLLFVEKNIIYPLIVLNELSSSAETIASPKKLNTELGALMITVAGLKLLRSSFSSPTYQYVTVIFTVLFFKFDYEAFSETMLLDLFFMSILFNKLWELLYKLQFVYTYIAPWQITWGSAFHAFAQPFAVPHSAMLFIQAAVSAFFSTPLNPFLGSAIFITSYVRPVKFWERDYNTKRVDHSNTRLASQLDRNPGSDDNNLNSIFYEHLTRSLQHSLCGDLLLGRWGNYSTGDCFILASDYLNALVHLIEIGNGLVTFQLRGLEFRGTYCQQREVEAITEGVEEDEGFCCCEPGHIPHMLSFNAAFSQRWLAWEVIVTKYILEGYSITDNSAASMLQVFDLRKVLTTYYVKGIIYYVTTSSKLEEWLANETMQEGLRLCADRNYVDVDPTFNPNIDEDYDHRLAGISRESFCVIYLNWIEYCSSRRAKPVDVDKDSSLVTLCYGLCVLGRRALGTASHHMSSNLESFLYGLHALFKGDFRISSIRDEWIFADMELLRKVVVPGIRMSIKLHQDHFTSPDEYDDPTVLYEAIVSHEKNLVIAHEGDPAWRSAVLANSPSLLALRHVMDDGTNEYKIIMLNRRYLSFRVIKVNKECVRGLWAGQQQELVFLRNRNPERGSIQNAKQALRNMINSSCDQPIGYPIFVSPLTTSYSDSHEQLKDILGGPISLGNIRNFIVSTWHRLRKGCGAGCNSGGNIEDSDTGGGTSCTGNNATTANNPHSNVTQGSIGNPGQGSGTGLHPPVTSYPPTLGTSHSSHSVQSGLVRQSPARASVASQSSYCYSSRHSSLRMSTTGFVPCRRSSTSQISLRNLPSSIQSRLSMVNQMEPSGQSGLACVQHGLPSSSSSSQSIPACKHHTLVGFLATEGGQSSATDAQPGNTLSPANNSHSRKAEVIYRVQIVDPSQILEGINLSKRKELQWPDEGIRLKAGRNSWKDWSPQEGMEGHVIHRWVPCSRDPGTRSHIDKAVLLVQIDDKYVTVIETGVLELGAEV

SEQ ID NO: 18261 - protein, 1467 aa, Artificial Sequence
  Synthetic polypeptide
EQGCTAGGKFSSTLYETGGCDMSLVNFEPAARRASNICDTDSHVSSSTSVRFYPHDVIRLNRLLTIDTDLLEQQDIDLSPDLAATYGPTEEAAQKVKHYYRFWILPQLWIGINFDRLTLLALFDRNREILENVLAVILAILVAFLGSILLIQGFFRDIWVFQFCLVIASCQYSLLKSVQPDSSSPRHGHNRIIAYSRPVYFCICCGLIWLLDYGSRNLTATKFKLYGITFTNPLVFISARDLVIVFTLCFPIVFFIGLLPQVNTFVMYLCEQLDIHIFGGNATTSLLAALYSFICSIVAVALLYGLCYGALKDSWDGQHIPVLFSIFCGLLVAVSYHLSRQSSDPSVLFSLVQSKIFPKTEEKNPEDPLSEVKDPLPEKLRNSVSERLQSDLVVCIVIGVLYFAIHVSTVFTVLQPALKYVLYTLVGFVGFVTHYVLPQVRKQLPWHCFSHPLLKTLEYNQYEVRNAATMMWFEKLHVWLLFVEKNIIYPLIVLNELSSSAETIASPKKLNTELGALMITVAGLKLLRSSFSSPTYQYVTVIFTVLFFKFDYEAFSETMLLDLFFMSILFNKLWELLYKLQFVYTYIAPWQITWGSAFHAFAQPFAVPHSAMLFIQAAVSAFFSTPLNPFLGSAIFITSYVRPVKFWERDYNTKRVDHSNTRLASQLDRNPGSDDNNLNSIFYEHLTRSLQHSLCGDLLLGRWGNYSTGDCFILASDYLNALVHLIEIGNGLVTFQLRGLEFRGTYCQQREVEAITEGVEEDEGFCCCEPGHIPHMLSFNAAFSQRWLAWEVIVTKYILEGYSITDNSAASMLQVFDLRKVLTTYYVKGIIYYVTTSSKLEEWLANETMQEGLRLCADRNYVDVDPTFNPNIDEDYDHRLAGISRESFCVIYLNWIEYCSSRRAKPVDVDKDSSLVTLCYGLCVLGRRALGTASHHMSSNLESFLYGLHALFKGDFRISSIRDEWIFADMELLRKVVVPGIRMSIKLHQDHFTSPDEYDDPTVLYEAIVSHEKNLVIAHEGDPAWRSAVLANSPSLLALRHVMDDGTNEYKIIMLNRRYLSFRVIKVNKECVRGLWAGQQQELVFLRNRNPERGSIQNAKQALRNMINSSCDQPIGYPIFVSPLTTSYSDSHEQLKDILGGPISLGNIRNFIVSTWHRLRKGCGAGCNSGGNIEDSDTGGGTSCTGNNATTANNPHSNVTQGSIGNPGQGSGTGLHPPVTSYPPTLGTSHSSHSVQSGLVRQSPARASVASQSSYCYSSRHSSLRMSTTGFVPCRRSSTSQISLRNLPSSIQSRLSMVNQMEPSGQSGLACVQHGLPSSSSSSQSIPACKHHTLVGFLATEGGQSSATDAQPGNTLSPANNSHSRKAEVIYRVQIVDPSQILEGINLSKRKELQWPDEGIRLKAGRNSWKDWSPQEGMEGHVIHRWVPCSRDPGTRSHIDKAVLLVQIDDKYVTVIETGVLELGAEV

SEQ ID NO: 18262 - protein, 6 aa, Artificial Sequence
  Synthetic polypeptide
APLPVR

SEQ ID NO: 18263 - protein, 1409 aa, Artificial Sequence
  Synthetic polypeptide
AGCAERAFLPELRFLSGKFSSTLYETGGCDMSLVNFEPAARRASNICDTDSHVSSSTSVRFYPHDVLSLPQIRLNRLLTIDTDLLEQQDIDLSPDLAATYGPTEEAAQKVKHYYRFWILPQLWIGINFDRLTLLALFDRNREILENVLAVILAILVAFLGSILLIQGFFRDIWVFQFCLVIASCQYSLLKSVQPDSSSPRHGHNRIIAYSRPVYFCICCGLIWLLDYGSRNLTATKFKLYGITFTNPLVFISARDLVIVFTLCFPIVFFIGLLPQVNTFVMYLCEQLDIHIFGGNATTSLLAALYSFICSIVAVALLYGLCYGALKDSWDGQHIPVLFSIFCGLLVAVSYHLSRQSSDPSVLFSLVQSKIFPKTEEKNPEDPLSEVKDPLPEKLRNSVSERLQSDLVVCIVIGVLYFAIHVSTVFTVLQPALKYVLYTLVGFVGFVTHYVLPQVRKQLPWHCFSHPLLKTLEYNQYEVRNAATMMWFEKLHVWLLFVEKNIIYPLIVLNELSSSAETIASPKKLNTELGALMITVAGLKLLRSSFSSPTYQYVTVIFTVLFFKFDYEAFSETMLLDLFFMSILFNKLWELLYKLQFVYTYIAPWQITWGSAFHAFAQPFAVPHSAMLFIQAAVSAFFSTPLNPFLGSAIFITSYVRPVKFWERDYNTKRVDHSNTRLASQLDRNPGTYCQQREVEAITEGVEEDEGFCCCEPGHIPHMLSFNAAFSQRWLAWEVIVTKYILEGYSITDNSAASMLQVFDLRKVLTTYYVKGIIYYVTTSSKLEEWLANETMQEGLRLCADRNYVDVDPTFNPNIDEDYDHRLAGISRESFCVIYLNWIEYCSSRRAKPVDVDKDSSLVTLCYGLCVLGRRALGTASHHMSSNLESFLYGLHALFKGDFRISSIRDEWIFADMELLRKVVVPGIRMSIKLHQDHFTSPDEYDDPTVLYEAIVSHEKNLVIAHEGDPAWRSAVLANSPSLLALRHVMDDGTNEYKIIMLNRRYLSFRVIKVNKECVRGLWAGQQQELVFLRNRNPERGSIQNAKQALRNMINSSCDQPIGYPIFVSPLTTSYSDSHEQLKDILGGPISLGNIRNFIVSTWHRLRKGCGAGCNSGGNIEDSDTGGGTSCTGNNATTANNPHSNVTQGSIGNPGQGSGTGLHPPVTSYPPTLGTSHSSHSVQSGLVRQSPARASVASQSSYCYSSRHSSLRMSTTGFVPCRRSSTSQISLRNLPSSIQSRLSMVNQMEPSGQSGLACVQHGLPSSSSSSQSIPACKHHTLVGFLATEGGQSSATDAQPGNTLSPANNSHSRKAEVIYRVQIVDPSQILEGINLSKRKELQWPDEGIRLKAGRNSWKDWSPQEGMEGHVIHRWVPCSRDPGTRSHIDKAVLLVQIDDKYVTVIETGVLELGAEV

SEQ ID NO: 18264 - protein, 42 aa, Artificial Sequence
  Synthetic polypeptide
EQGCTAGGEQGVRSEHFCLSSASCQVSSLLRCMRLVAVICHL

SEQ ID NO: 18265 - protein, 1481 aa, Artificial Sequence
  Synthetic polypeptide
AGCAERAFLPELRFLSGKFSSTLYETGGCDMSLVNFEPAARRASNICDTDSHVSSSTSVRFYPHDVLSLPQIRLNRLLTIDTDLLEQQDIDLSPDLAATYGPTEEAAQKVKHYYRFWILPQLWIGINFDRLTLLALFDRNREILENVLAVILAILVAFLGSILLIQGFFRDIWVFQFCLVIASCQYSLLKSVQPDSSSPRHGHNRIIAYSRPVYFCICCGLIWLLDYGSRNLTATKFKLYGITFTNPLVFISARDLVIVFTLCFPIVFFIGLLPQVNTFVMYLCEQLDIHIFGGNATTSLLAALYSFICSIVAVALLYGLCYGALKDSWDGQHIPVLFSIFCGLLVAVSYHLSRQSSDPSVLFSLVQSKIFPKTEEKNPEDPLSEVKDPLPEKLRNSVSERLQSDLVVCIVIGVLYFAIHVSTVFTVLQPALKYVLYTLVGFVGFVTHYVLPQVRKQLPWHCFSHPLLKTLEYNQYEVRNAATMMWFEKLHVWLLFVEKNIIYPLIVLNELSSSAETIASPKKLNTELGALMITVAGLKLLRSSFSSPTYQYVTVIFTVLFFKFDYEAFSETMLLDLFFMSILFNKLWELLYKLQFVYTYIAPWQITWGSAFHAFAQPFAVPHSAMLFIQAAVSAFFSTPLNPFLGSAIFITSYVRPVKFWERDYNTKRVDHSNTRLASQLDRNPGSDDNNLNSIFYEHLTRSLQHSLCGDLLLGRWGNYSTGDCFILASDYLNALVHLIEIGNGLVTFQLRGLEFRGTYCQQREVEAITEGVEEDEGFCCCEPGHIPHMLSFNAAFSQRWLAWEVIVTKYILEGYSITDNSAASMLQVFDLRKVLTTYYVKGIIYYVTTSSKLEEWLANETMQEGLRLCADRNYVDVDPTFNPNIDEDYDHRLAGISRESFCVIYLNWIEYCSSRRAKPVDVDKDSSLVTLCYGLCVLGRRALGTASHHMSSNLESFLYGLHALFKGDFRISSIRDEWIFADMELLRKVVVPGIRMSIKLHQDHFTSPDEYDDPTVLYEAIVSHEKNLVIAHEGDPAWRSAVLANSPSLLALRHVMDDGTNEYKIIMLNRRYLSFRVIKVNKECVRGLWAGQQQELVFLRNRNPERGSIQNAKQALRNMINSSCDQPIGYPIFVSPLTTSYSDSHEQLKDILGGPISLGNIRNFIVSTWHRLRKGCGAGCNSGGNIEDSDTGGGTSCTGNNATTANNPHSNVTQGSIGNPGQGSGTGLHPPVTSYPPTLGTSHSSHSVQSGLVRQSPARASVASQSSYCYSSRHSSLRMSTTGFVPCRRSSTSQISLRNLPSSIQSRLSMVNQMEPSGQSGLACVQHGLPSSSSSSQSIPACKHHTLVGFLATEGGQSSATDAQPGNTLSPANNSHSRKAEVIYRVQIVDPSQILEGINLSKRKELQWPDEGIRLKAGRNSWKDWSPQEGMEGHVIHRWVPCSRDPGTRSHIDKAVLLVQIDDKYVTVIETGVLELGAEV

SEQ ID NO: 18266 - protein, 1476 aa, Artificial Sequence
  Synthetic polypeptide
AGCAERAFLPELRFLSGKFSSTLYETGGCDMSLVNFEPAARRASNICDTDSHVSSSTSVRFYPHDVIRLNRLLTIDTDLLEQQDIDLSPDLAATYGPTEEAAQKVKHYYRFWILPQLWIGINFDRLTLLALFDRNREILENVLAVILAILVAFLGSILLIQGFFRDIWVFQFCLVIASCQYSLLKSVQPDSSSPRHGHNRIIAYSRPVYFCICCGLIWLLDYGSRNLTATKFKLYGITFTNPLVFISARDLVIVFTLCFPIVFFIGLLPQVNTFVMYLCEQLDIHIFGGNATTSLLAALYSFICSIVAVALLYGLCYGALKDSWDGQHIPVLFSIFCGLLVAVSYHLSRQSSDPSVLFSLVQSKIFPKTEEKNPEDPLSEVKDPLPEKLRNSVSERLQSDLVVCIVIGVLYFAIHVSTVFTVLQPALKYVLYTLVGFVGFVTHYVLPQVRKQLPWHCFSHPLLKTLEYNQYEVRNAATMMWFEKLHVWLLFVEKNIIYPLIVLNELSSSAETIASPKKLNTELGALMITVAGLKLLRSSFSSPTYQYVTVIFTVLFFKFDYEAFSETMLLDLFFMSILFNKLWELLYKLQFVYTYIAPWQITWGSAFHAFAQPFAVPHSAMLFIQAAVSAFFSTPLNPFLGSAIFITSYVRPVKFWERDYNTKRVDHSNTRLASQLDRNPGSDDNNLNSIFYEHLTRSLQHSLCGDLLLGRWGNYSTGDCFILASDYLNALVHLIEIGNGLVTFQLRGLEFRGTYCQQREVEAITEGVEEDEGFCCCEPGHIPHMLSFNAAFSQRWLAWEVIVTKYILEGYSITDNSAASMLQVFDLRKVLTTYYVKGIIYYVTTSSKLEEWLANETMQEGLRLCADRNYVDVDPTFNPNIDEDYDHRLAGISRESFCVIYLNWIEYCSSRRAKPVDVDKDSSLVTLCYGLCVLGRRALGTASHHMSSNLESFLYGLHALFKGDFRISSIRDEWIFADMELLRKVVVPGIRMSIKLHQDHFTSPDEYDDPTVLYEAIVSHEKNLVIAHEGDPAWRSAVLANSPSLLALRHVMDDGTNEYKIIMLNRRYLSFRVIKVNKECVRGLWAGQQQELVFLRNRNPERGSIQNAKQALRNMINSSCDQPIGYPIFVSPLTTSYSDSHEQLKDILGGPISLGNIRNFIVSTWHRLRKGCGAGCNSGGNIEDSDTGGGTSCTGNNATTANNPHSNVTQGSIGNPGQGSGTGLHPPVTSYPPTLGTSHSSHSVQSGLVRQSPARASVASQSSYCYSSRHSSLRMSTTGFVPCRRSSTSQISLRNLPSSIQSRLSMVNQMEPSGQSGLACVQHGLPSSSSSSQSIPACKHHTLVGFLATEGGQSSATDAQPGNTLSPANNSHSRKAEVIYRVQIVDPSQILEGINLSKRKELQWPDEGIRLKAGRNSWKDWSPQEGMEGHVIHRWVPCSRDPGTRSHIDKAVLLVQIDDKYVTVIETGVLELGAEV

SEQ ID NO: 18267 - protein, 5 aa, Artificial Sequence
  Synthetic polypeptide
MEMKS

SEQ ID NO: 18268 - protein, 60 aa, Artificial Sequence
  Synthetic polypeptide
NKDIFRSEKNGKNSYEQTHTTKNVGGCLSGRRKVISDGNISLPKGTKINGNEIVRSWKMC

SEQ ID NO: 18269 - protein, 41 aa, Artificial Sequence
  Synthetic polypeptide
DCKTNPSSSSFSACSKCEMTKMKTFMMIHFYLMNRSFYFSR

SEQ ID NO: 18270 - protein, 479 aa, Artificial Sequence
  Synthetic polypeptide
TDHFTSPDEYDDPTVLYEAIVSHEKNLVIAHEGDPAWRSAVLANSPSLLALRHVMDDGTNEYKIIMLNRRYLSFRVIKVNKECVRGLWAGQQQELVFLRNRNPERGSIQNAKQALRNMINSSCDQPIGYPIFVSPLTTSYSDSHEQLKDILGGPISLGNIRNFIVSTWHRLRKGCGAGCNSGGNIEDSDTGGGTSCTGNNATTANNPHSNVTQGSIGNPGQGSGTGLHPPVTSYPPTLGTSHSSHSVQSGLVRQSPARASVASQSSYCYSSRHSSLRMSTTGFVPCRRSSTSQISLRNLPSSIQSRLSMVNQMEPSGQSGLACVQHGLPSSSSSSQSIPACKHHTLVGFLATEGGQSSATDAQPGNTLSPANNSHSRKAEVIYRVQIVDPSQILEGINLSKRKELQWPDEGIRLKAGRNSWKDWSPQEGMEGHVIHRWVPCSRDPGTRSHIDKAVLLVQIDDKYVTVIETGVLELGAEV

SEQ ID NO: 18271 - protein, 35 aa, Artificial Sequence
  Synthetic polypeptide
DDKDEDLYDDPLLLNEQIILLLQMNMMTLLCSMKP

SEQ ID NO: 18272 - protein, 32 aa, Artificial Sequence
  Synthetic polypeptide
GILELQREGKSKNMAELPAESRHHVLQSWTEH

SEQ ID NO: 18273 - protein, 1191 aa, Artificial Sequence
  Synthetic polypeptide
GSWNFREKERVKIWLNYQQKVGIMYCKAGQSTEEEMYNNESAGPAFEEFLQLLGERVRLKGFEKYRAQLDTKTDSTGTHSLYTTYKDYEIMFHVSTMLPYTPNNKQQLLRKRHIGNDIVTIVFQEPGAQPFSPKNIRSHFQHVFVIVRVHNPCSDSVCYSVAVTRSRDVPSFGPPIPKGVTFPKSNVFRDFLLAKVINAENAAHKSEKFRAMATRTRQEYLKDLAEKNVTNTPIDPSGKFPFISLASKKKEKSKPYPGAELSSMGAIVWAVRAEDYNKAMELDCLLGISNEFIVLIEQETKSVVFNCSCRDVIGWTSTDTSLKIFYERGECVSVGSFINIEEIKEIVKRLQFVSKGCESVEMTLRRNGLGQLGFHVNYEGIVADVEPYGYAWQAGLRQGSRLVEICKVAVATLSHEQMIDLLRTSVTVKVVIIPPHDDCTPRRSCSETYRMPVMEYKMNEGVSYEFKFPFRNNNKWQRNASKGPHSPQVPSQVQSPMTSRLNAGKGDGKMPPPERAANIPRSISSDGRPLERRLSPGSDIYVTVSSMALARSQCRNSPSNLSSSSDTGSVGGTYRQKSMPEGFGVSRRSPASIDRQNTQSDIGGSGKSTPSWQRSEDSIADQMEPTCHLPAVSKVLPAFRESPSGRLMRQDPVVHLSPNKQGHSDSHYSSHSSSNTLSSNASSAHSDEKWYDGDRTESELNSYNYLQGTSADSGIDTTSYGPSHGSTASLGAATSSPRSGPGKEKVAPLWHSSSEVISMADRTLETESHGLDRKTESSLSLDIHSKSQAGSTPLTRENSTFSINDAASHTSTMSSRHSASPVVFTSARSSPKEELHPAAPSQLAPSFSSSSSSSSGPRSFYPRQGATSKYLIGWKKPEGTINSVGFMDTRKRHQSDGNEIAHTRLRASTRDLRASPKPTSKSTIEEDLKKLIDLESPTPESQKSFKFHALSSPQSPFPSTPTSRRALHRTLSDESIYNSQREHFFTSRASLLDQALPNDVLFSSTYPSLPKSLPLRRPSYTLGMKSLHGEFSASDSSLTDIQETRRQPMPDPGLMPLPDTAADLDWSNLVDAAKAYEVQRASFFAASDENHRPLSAASNSDQLEDQALAQMKPYSSSKDSSPTLASKVDQLEGMLKMLREDLKKEKEDKAHLQAEVQHLREDNLRLQEESQNASDKLKKFTEWVFNTIDMS

SEQ ID NO: 18274 - protein, 3 aa, Artificial Sequence
  Synthetic polypeptide
KYG

SEQ ID NO: 18275 - protein, 1212 aa, Artificial Sequence
  Synthetic polypeptide
GSWNFREKERVKIWLNYQQKVGIMYCKAGQSTEEEMYNNESAGPAFEEFLQLLGERVRLKGFEKYRAQLDTKTDSTGTHSLYTTYKDYEIMFHVSTMLPYTPNNKQQLLRKRHIGNDIVTIVFQEPGAQPFSPKNIRSHFQHVFVIVRVHNPCSDSVCYSVAVTRSRDVPSFGPPIPKGVTFPKSNVFRDFLLAKVINAENAAHKSEKFRAMATRTRQEYLKDLAEKNVTNTPIDPSGKFPFISLASKKKEKSKPYPGAELSSMGAIVWAVRAEDYNKAMELDCLLGISNEFIVLIEQETKSVVFNCSCRDVIGWTSTDTSLKIFYERGECVSVGSFINIEEIKEIVKRLQFVSKGCESVEMTLRRNGLGQLGFHVNYEGIVADVEPYGYAWQAGLRQGSRLVEICKVAVATLSHEQMIDLLRTSVTVKVVIIPPHDDCTPRRSCSETYRMPVMEYKMNEGVSYEFKFPFRNNNKWQRNASKGPHSPQVPSQVQSPMTSRLNAGKGDGKMPPPERAANIPRSISSDGRPLERRLSPGSDIYVTVSSMALARSQCRNSPSNLSSSSDTGSVGGTYRQKSMPEGFGVSRRSPASIDRQNTQSDIGGSGKSTPSWQRSEDSIADQMAYSYRGPQDFNSFVLEQHEYTEPTCHLPAVSKVLPAFRESPSGRLMRQDPVVHLSPNKQGHSDSHYSSHSSSNTLSSNASSAHSDEKWYDGDRTESELNSYNYLQGTSADSGIDTTSYGPSHGSTASLGAATSSPRSGPGKEKVAPLWHSSSEVISMADRTLETESHGLDRKTESSLSLDIHSKSQAGSTPLTRENSTFSINDAASHTSTMSSRHSASPVVFTSARSSPKEELHPAAPSQLAPSFSSSSSSSSGPRSFYPRQGATSKYLIGWKKPEGTINSVGFMDTRKRHQSDGNEIAHTRLRASTRDLRASPKPTSKSTIEEDLKKLIDLESPTPESQKSFKFHALSSPQSPFPSTPTSRRALHRTLSDESIYNSQREHFFTSRASLLDQALPNDVLFSSTYPSLPKSLPLRRPSYTLGMKSLHGEFSASDSSLTDIQETRRQPMPDPGLMPLPDTAADLDWSNLVDAAKAYEVQRASFFAASDENHRPLSAASNSDQLEDQALAQMKPYSSSKDSSPTLASKVDQLEGMLKMLREDLKKEKEDKAHLQAEVQHLREDNLRLQEESQNASDKLKKFTEWVFNTIDMS

SEQ ID NO: 18276 - protein, 1190 aa, Artificial Sequence
  Synthetic polypeptide
GSWNFREKERVKIWLNYQQKVGIMYCKAGQSTEEEMYNNESAGPAFEEFLQLLGERVRLKGFEKYRAQLDTKTDSTGTHSLYTTYKDYEIMFHVSTMLPYTPNNKQQLLRKRHIGNDIVTIVFQEPGAQPFSPKNIRSHFQHVFVIVRVHNPCSDSVCYSVAVTRSRDVPSFGPPIPKGVTFPKSNVFRDFLLAKVINAENAAHKSEKFRAMATRTRQEYLKDLAEKNVTNTPIDPSGKFPFISLASKKKEKSKPYPGAELSSMGAIVWAVRAEDYNKAMELDCLLGISNEFIVLIEQETKSVVFNCSCRDVIGWTSTDTSLKIFYERGECVSVGSFINIEEIKEIVKRLQFVSKGCESVEMTLRRNGLGQLGFHVNYEGIVADVEPYGYAWQAGLRQGSRLVEICKVAVATLSHEQMIDLLRTSVTVKVVIIPPHDDCTPRRSCSETYRMPVMEYKMNEGVSYEFKFPFRNNNKWQRNASKGPHSPQVPSQVQSPMTSRLNAGKGDGKMPPPERAANIPRSISSDGRPLERRLSPGSDIYVTVSSMALARSQCRNSPSNLSSSSDTGSVGGTYRQKSMPEGFGVSRRSPASIDRQNTQSDIGGSGKSTPSWQRSEDSIADQMEPTCHLPAVSKVLPAFRESPSGRLMRQDPVVHLSPNKQGHSDSHYSSHSSSNTLSSNASSAHSDEKWYDGDRTESELNSYNYLQGTSADSGIDTTSYGPSHGSTASLGAATSSPRSGPGKEKVAPLWHSSSEVISMADRTLETESHGLDRKTESSLSLDIHSKSQAGSTPLTRENSTFSINDAASHTSTMSSRHSASPVVFTSARSSPKEELHPAAPSQLAPSFSSSSSSSSGPRSFYPRQGATSKYLIGWKKPEGTINSVGFMDTRKRHQSDGNEIAHTRLRASTRDLRASPKPTSKSTIEEDLKKLIDLESPTPESQKSFKFHALSSPQSPFPSTPTSRRALHRTLSDESIYNSQREHFFTSRASLLDQALPNDVLFSSTYPSLPKSLPLRRPSYTLGMKSLHGEFSASDSSLTDIQETRRQPMPDPGLMPLPDTAADLDWSNLVDAAKAYEVQRASFFAASDENHRPLSAASNSDQLEDQALAQMKPYSSKDSSPTLASKVDQLEGMLKMLREDLKKEKEDKAHLQAEVQHLREDNLRLQEESQNASDKLKKFTEWVFNTIDMS

SEQ ID NO: 18277 - protein, 153 aa, Artificial Sequence
  Synthetic polypeptide
GSWNFREKERVKIWLNYQQKVGIMYCKAGQSTEEEMYNNESAGPAFEEFLQLLGERVRLKGFEKYRAQLDTKTDSTGTHSLYTTYKDYEIMFHVSTMLPYTPNNKQQLLRKRHIGNDIVTIVFQEPGAQPFSPKNIRSHFQHVFVIVRVHNPC

SEQ ID NO: 18278 - protein, 613 aa, Artificial Sequence
  Synthetic polypeptide
ELWRFGVSRRSPASIDRQNTQSDIGGSGKSTPSWQRSEDSIADQMEPTCHLPAVSKVLPAFRESPSGRLMRQDPVVHLSPNKQGHSDSHYSSHSSSNTLSSNASSAHSDEKWYDGDRTESELNSYNYLQGTSADSGIDTTSYGPSHGSTASLGAATSSPRSGPGKEKVAPLWHSSSEVISMADRTLETESHGLDRKTESSLSLDIHSKSQAGSTPLTRENSTFSINDAASHTSTMSSRHSASPVVFTSARSSPKEELHPAAPSQLAPSFSSSSSSSSGPRSFYPRQGATSKYLIGWKKPEGTINSVGFMDTRKRHQSDGNEIAHTRLRASTRDLRASPKPTSKSTIEEDLKKLIDLESPTPESQKSFKFHALSSPQSPFPSTPTSRRALHRTLSDESIYNSQREHFFTSRASLLDQALPNDVLFSSTYPSLPKSLPLRRPSYTLGMKSLHGEFSASDSSLTDIQETRRQPMPDPGLMPLPDTAADLDWSNLVDAAKAYEVQRASFFAASDENHRPLSAASNSDQLEDQALAQMKPYSSSKDSSPTLASKVDQLEGMLKMLREDLKKEKEDKAHLQAEVQHLREDNLRLQEESQNASDKLKKFTEWVFNTIDMS

SEQ ID NO: 18279 - protein, 41 aa, Artificial Sequence
  Synthetic polypeptide
GILTRQGRSKERAPVNEEFGDHVGERTEDVQAEDENYGGLE

SEQ ID NO: 18280 - protein, 28 aa, Artificial Sequence
  Synthetic polypeptide
MRSLETMWEKELRMCKLRMRIMEVWSEP

SEQ ID NO: 18281 - protein, 634 aa, Artificial Sequence
  Synthetic polypeptide
ELWRFGVSRRSPASIDRQNTQSDIGGSGKSTPSWQRSEDSIADQMAYSYRGPQDFNSFVLEQHEYTEPTCHLPAVSKVLPAFRESPSGRLMRQDPVVHLSPNKQGHSDSHYSSHSSSNTLSSNASSAHSDEKWYDGDRTESELNSYNYLQGTSADSGIDTTSYGPSHGSTASLGAATSSPRSGPGKEKVAPLWHSSSEVISMADRTLETESHGLDRKTESSLSLDIHSKSQAGSTPLTRENSTFSINDAASHTSTMSSRHSASPVVFTSARSSPKEELHPAAPSQLAPSFSSSSSSSSGPRSFYPRQGATSKYLIGWKKPEGTINSVGFMDTRKRHQSDGNEIAHTRLRASTRDLRASPKPTSKSTIEEDLKKLIDLESPTPESQKSFKFHALSSPQSPFPSTPTSRRALHRTLSDESIYNSQREHFFTSRASLLDQALPNDVLFSSTYPSLPKSLPLRRPSYTLGMKSLHGEFSASDSSLTDIQETRRQPMPDPGLMPLPDTAADLDWSNLVDAAKAYEVQRASFFAASDENHRPLSAASNSDQLEDQALAQMKPYSSSKDSSPTLASKVDQLEGMLKMLREDLKKEKEDKAHLQAEVQHLREDNLRLQEESQNASDKLKKFTEWVFNTIDMS

SEQ ID NO: 18282 - protein, 612 aa, Artificial Sequence
  Synthetic polypeptide
ELWRFGVSRRSPASIDRQNTQSDIGGSGKSTPSWQRSEDSIADQMEPTCHLPAVSKVLPAFRESPSGRLMRQDPVVHLSPNKQGHSDSHYSSHSSSNTLSSNASSAHSDEKWYDGDRTESELNSYNYLQGTSADSGIDTTSYGPSHGSTASLGAATSSPRSGPGKEKVAPLWHSSSEVISMADRTLETESHGLDRKTESSLSLDIHSKSQAGSTPLTRENSTFSINDAASHTSTMSSRHSASPVVFTSARSSPKEELHPAAPSQLAPSFSSSSSSSSGPRSFYPRQGATSKYLIGWKKPEGTINSVGFMDTRKRHQSDGNEIAHTRLRASTRDLRASPKPTSKSTIEEDLKKLIDLESPTPESQKSFKFHALSSPQSPFPSTPTSRRALHRTLSDESIYNSQREHFFTSRASLLDQALPNDVLFSSTYPSLPKSLPLRRPSYTLGMKSLHGEFSASDSSLTDIQETRRQPMPDPGLMPLPDTAADLDWSNLVDAAKAYEVQRASFFAASDENHRPLSAASNSDQLEDQALAQMKPYSSKDSSPTLASKVDQLEGMLKMLREDLKKEKEDKAHLQAEVQHLREDNLRLQEESQNASDKLKKFTEWVFNTIDMS

SEQ ID NO: 18283 - protein, 105 aa, Artificial Sequence
  Synthetic polypeptide
EVSFTSCHDSEASPATWNCSGTSSTRKPLSTAGVTTHGCVQSAACVFPSWTHRLGWPRTTATSGWRRGTEAQALPRASCIHTLPAAGARRDDCTHLKIQNCGCWR

SEQ ID NO: 18284 - protein, 70 aa, Artificial Sequence
  Synthetic polypeptide
IMEASLSHAIFVIVNKSHKIWWVYQGFQLLLLPHFLLLLPYKKCLSLPAMIPRPPQPRGTARGPVLQGSH

SEQ ID NO: 18285 - protein, 377 aa, Artificial Sequence
  Synthetic polypeptide
FRGLPSHVELLGDQFYKEAIEHCRSYNSRLCAERSVRLPFLDSQTGVAQNNCYIWMEKRHRGPGLAPGQLYTYPARCWRKKRRLHPPEDPKLRLLEIKPEVELPLKKDGFTSESTTLEALLRGEGVEKKVDAREEESIQEIQRVLENDENVEEGNEEEDLEEDIPKRKNRTRGRARGSAGGRRRHDAASQEDHDKPYVCDICGKRYKNRPGLSYHYAHTHLASEEGDEAQDQETRSPPNHRNENHRPQKGPDGTVIPNNYCDFCLGGSNMNKKSGRPEELVSCADCGRSGHPTCLQFTLNMTEAVKTYKWQCIECKSCILCGTSENDDQLLFCDDCDRGYHMYCLNPPVAEPPEGSWSCHLCWELLKEKASAFGCQA

SEQ ID NO: 18286 - protein, 356 aa, Artificial Sequence
  Synthetic polypeptide
FRGLPSHVELLGDQFYKEAIEHCRSYNSRLCAERSVRLPFLDSQTGVAQNNCYIWMEKRHRGPGLAPGQLYTYPARCWRKKRRLHPPEDPKLRLLEIKPEVELPLKKDGFTSESTTLEALLRGEGVEKKVDAREEESIQEIQRVLENDENVEEGNEEEDLEEDIPKRKNRTRGRARGSAGGRRRHDAASQEDHDKPYVCDICGKRYKNRPGLSYHYAHTHLASEEGDEAQDQETRSPPNHRNENHRPQKGPDGTVIPNNYCDFCLGGSNMNKKSGRPEELVSCADCGRSAHLGGEGRKEKEAAAAARTTEDLFGSTSESDTSTFHGFDEDDLEEPRSCRGRRSGRGSPTADKKGSC

SEQ ID NO: 18287 - protein, 320 aa, Artificial Sequence
  Synthetic polypeptide
AEIVPLHSSLGDKVIHAWLIISSLLLLFFFSFIYLGEVFKTYNVAVDYITVALLIWNFGVVGMISIHWKGPLRLQQAYLIMISALMALVFIKYLPEWTAWLILAVISVYDLVAVLCPKGPLRMLVETAQERNETLFPALIYSSTMVWLVNMAEGDPEAQRRVSKNSKYNAESTERESQDTVAENDDGGFSEEWEAQRDSHLGPHRSTPESRAAVQELSSSILAGEDPEERGVKLGLGDFIFYSVLVGKASATASGDWNTTIACFVAILIGLCLTLLLLAIFKKALPALPISITFGLVFYFATDYLVQPFMDQLAFHQFYI

SEQ ID NO: 18288 - protein, 82 aa, Artificial Sequence
  Synthetic polypeptide
RGGAHAWFHLLRRLKHENCLNPGGRGCGELRSCHCTPVWATKSSMPGLLYHLYCCCSFFHSFTWGKCLKPITLLWTTLLLHS

SEQ ID NO: 18289 - protein, 37 aa, Artificial Sequence
  Synthetic polypeptide
DRATALQSGRQSHPCLAYYIISIVAVLFFIHLLGGSV

SEQ ID NO: 18290 - protein, 262 aa, Artificial Sequence
  Synthetic polypeptide
AEIVPLHSSLGDKVIHAWLIISSLLLLFFFSFIYLGEVFKTYNVAVDYITVALLIWNFGVVGMISIHWKGPLRLQQAYLIMISALMALVFIKYLPEWTAWLILAVISVYDLVAVLCPKGPLRMLVETAQERNETLFPALIYSSTMVWLVNMAEGDPEAQRRVSKNSKYNAERGVKLGLGDFIFYSVLVGKASATASGDWNTTIACFVAILIGLCLTLLLLAIFKKALPALPISITFGLVFYFATDYLVQPFMDQLAFHQFYI

SEQ ID NO: 18291 - protein, 231 aa, Artificial Sequence
  Synthetic polypeptide
AEIVPLHSSLGDKVIHAWLIISSLLLLFFFSFIYLGEVFKTYNVAVDYITVALLIWNFGVVGMISIHWKGPLRLQQAYLIMISALMALVFIKYLPEWTAWLILAVISVYDLVAVLCPKGPLRMLVETAQERNETLFPALIYSSTMVWLVNMAEGDPEAQRRVSKNSKYNAERACLPPAAINLLSIAPMAPRLFMPKGACRPTAQKGSHKTLLQRMMMAGSVRNGKPRGTVI

SEQ ID NO: 18292 - protein, 11 aa, Artificial Sequence
  Synthetic polypeptide
PAWPTMLKQIR

SEQ ID NO: 18293 - protein, 25 aa, Artificial Sequence
  Synthetic polypeptide
SQHLERRRQVDHLRSGVHDQPGQQC

SEQ ID NO: 18294 - protein, 396 aa, Artificial Sequence
  Synthetic polypeptide
GQEFMTSLANNAETDKIVVGSSVAPGNTAPSPSSPTSPTSDATTSLEMNNPHAIPRRHAPIEQLARQGSFRGFPALSQKMSPFKRQLSLRINELPSTMQRKTDFPIKNAVPEVEGEAESISSLCSQITNAFSTPEDPFSSAPMTKPVTVVAPQSPTFQGTEWGQSSGAASPGLFQAGHRRTPSEADRWLEEVSKSVRAQQPQASAAPLQPVLQPPPPTAISQPASPFQGNAFLTSQPVPVGVVPALQPAFVPAQSYPVANGMPYPAPNVPVVGITPSQMVANVFGTAGHPQAAHPHQSPSLVRQQTFPHYEASSATTSPFFKPPAQHLNGSAAFNGVDDGRLASADRHTEVPTGTCPVDPFEAQWAALENKSKQRTNPSPTNPFSSDLQKTFEIEL

SEQ ID NO: 18295 - protein, 444 aa, Artificial Sequence
  Synthetic polypeptide
GQEFMTSLANNAETDKIVVGSSVAPGNTAPSPSSPTSPTSDATTSLEMNNPHAIPRRHAPIEQLARQGSFRGFPALSQKMSPFKRQLSLRINELPSTMQRKTDFPIKNAVPEVEGEAESISSLCSQITNAFSTPEDPFSSAPMTKPVTVVAPQSPTFQANGTDSAFHVLAKPAHTALAPVAMPVRETNPWAHAPDAANKEIAATCSGTEWGQSSGAASPGLFQAGHRRTPSEADRWLEEVSKSVRAQQPQASAAPLQPVLQPPPPTAISQPASPFQGNAFLTSQPVPVGVVPALQPAFVPAQSYPVANGMPYPAPNVPVVGITPSQMVANVFGTAGHPQAAHPHQSPSLVRQQTFPHYEASSATTSPFFKPPAQHLNGSAAFNGVDDGRLASADRHTEVPTGTCPVDPFEAQWAALENKSKQRTNPSPTNPFSSDLQKTFEIEL

SEQ ID NO: 18296 - protein, 52 aa, Artificial Sequence
  Synthetic polypeptide
GQEFMTSLANNAETDKIVVGSSVAPGNTAPSPSSPTSPTSDATTSLEMNNPH

SEQ ID NO: 18297 - protein, 51 aa, Artificial Sequence
  Synthetic polypeptide
GQEFMTSLANNAETDKIVVGSSVAPGNTAPSPSSPTSPTSDATTSLEMNNP

SEQ ID NO: 18298 - protein, 96 aa, Artificial Sequence
  Synthetic polypeptide
NFVNDRADQRCRVGGGNGRHIPGRTQVHARPVTSSSSGATSPTPLGLPVARPRRSQGKGQGSHEGHYLFQRRRKKQRHSVRPRIRRTLSPVKNVAG

SEQ ID NO: 18299 - protein, 28 aa, Artificial Sequence
  Synthetic polypeptide
TIELTRDAELEEAMVVISLEGPKCMLGQ

SEQ ID NO: 18300 - protein, 95 aa, Artificial Sequence
  Synthetic polypeptide
NFVNDRADQRCRVGGGNGRHIPGRTQVHARPVTSSSSGATSPTPLGLPVARPRRSQGKGQGSHEGHYLFQRRRKKQRHSVRPRIRRTLSPVKNVA

SEQ ID NO: 18301 - protein, 69 aa, Artificial Sequence
  Synthetic polypeptide
NFVNDRADQRCRVGGGNGRHIPGRTQVHARPVTSSSSGATSPTPLGLPVARPRRSQGKGQGSHEGHYLF

SEQ ID NO: 18302 - protein, 330 aa, Artificial Sequence
  Synthetic polypeptide
GRVRWLTPVIPALLEAKAGGSRDRVTVLYRSKAIRYTWPCPFPMADSSPWVHITLGDGSTFQTKLLIGADGHNSGVRQAVGIQNVSWNYDQSAVVATLHLSEATENNVAWQRFLPSGPIALLPLSDTLSSLVWSTSHEHAAELVSMDEEKFVDAVNSAFWSDADHTDFIDTAGAMLQYAVSLLKPTKVSARQLPPSVARVDAKSRVLFPLGLGHAAEYVRPRVALIGDAAHRVHPLAGQGVNMGFGDISSLAHHLSTAAFNGKDLGSVSHLTGYETERQRHNTALLAATDLLKRLYSTSASPLVLLRTWGLQATNAVSPLKEQIMAFASK

SEQ ID NO: 18303 - protein, 15 aa, Artificial Sequence
  Synthetic polypeptide
SQHFWRLRRADHETE

SEQ ID NO: 18304 - protein, 39 aa, Artificial Sequence
  Synthetic polypeptide
GGRITRPSDGSLQEQSHSLYLALSISYGRLQPLGSYYPR

SEQ ID NO: 18305 - protein, 199 aa, Artificial Sequence
  Synthetic polypeptide
GRVRWLTPVIPALLEAKAGGSRDRVTVLYRSKAIRYTWPCPFPMADSSPWVHITLGDGSTFQTKLLIGADGHNSGVRQAVGIQNVSWNYDQSAVVATLHLSEATENNVAWQRFLPSGPIALLPLSDTLSSLVWSTSHEHAAELVSMDEEKFVDAVNSAFWSDADHTDFIDTAGAMLQYAVSLLKPTKVSARQLPPSVAR

SEQ ID NO: 18306 - protein, 15 aa, Artificial Sequence
  Synthetic polypeptide
MFSPRCLPQEPADLV

SEQ ID NO: 18307 - protein, 392 aa, Artificial Sequence
  Synthetic polypeptide
CFLHAVSHRNQQTWFEGIFLSSMCPINVSASTLYGIMFDAGSTGTRIHVYTFVQKMPGQLPILEGEVFDSVKPGLSAFVDQPKQGAETVQGLLEVAKDSIPRSHWKKTPVVLKATAGLRLLPEHKAKALLFEVKEIFRKSPFLVPKGSVSIMDGSDEGILAWVTVNFLTGQLHGHRQETVGTLDLGGASTQITFLPQFEKTLEQTPRGYLTSFEMFNSTYKLYTHSYLGFGLKAARLATLGALETEGTDGHTFRSACLPRWLEAEWIFGGVKYQYGGNQEGEVGFEPCYAEVLRVVRGKLHQPEEVQRGSFYAFSYYYDRAVDTDMIDYEKGGILKVEDFERKAREVCDNLENFTSGSPFLCMDLSYITALLKDGFGFADSTVLQHIISWVN

SEQ ID NO: 18308 - protein, 62 aa, Artificial Sequence
  Synthetic polypeptide
VFSTLSPTGTSRLGLRVSSCLPCAPSMSAPAPCMELCLMQGALELEFMFTPLCRKCQDSFQF

SEQ ID NO: 18309 - protein, 413 aa, Artificial Sequence
  Synthetic polypeptide
CFLHAVSHRNQQTWFEGIFLSSMCPINVSASTLYGIMFDAGSTGTRIHVYTFVQKMPGQLPILEGEVFDSVKPGLSAFVDQPKQGAETVQGLLEVAKDSIPRSHWKKTPVVLKATAGLRLLPEHKAKALLFEVKEIFRKSPFLVPKGSVSIMDGSDEGILAWVTVNFLTGQLHGHRQETVGTLDLGGASTQITFLPQFEKTLEQTPRGYLTSFEMFNSTYKLYTHSYLGFGLKAARLATLGALETEGTDGHTFRSACLPRWLEAEWIFGGVKYQYGGNQEGEVGFEPCYAEVLRVVRGKLHQPEEVQRGSFYAFSYYYDRAVDTDMIDYEKGGILKVEDFERKAREVCDNLENFTSGSPFLCMDLSYITALLKDGFGFADSTVLQLTKKVNNIETGWALGATFHLLQSLGISH

SEQ ID NO: 18310 - protein, 196 aa, Artificial Sequence
  Synthetic polypeptide
CFLHAVSHRNQQTWFEGIFLSSMCPINVSASTLYGIMFDAGSTGTRIHVYTFVQKMPGQLPILEGEVFDSVKPGLSAFVDQPKQGAETVQGLLEVAKDSIPRSHWKKTPVVLKATAGLRLLPEHKAKALLFEVKEIFRKSPFLVPKGSVSIMDGSDEGILAWVTVNFLTGQLHGHRQETVGTLDLGGASTQITFLP

SEQ ID NO: 18311 - protein, 76 aa, Artificial Sequence
  Synthetic polypeptide
CFLHAVSHRNQQTWFEGIFLSSMCPINVSASTLYGIMFDAGSTGTRIHVYTFVQKMPGHLWSLGKGGGVRCPPEKW

SEQ ID NO: 18312 - protein, 76 aa, Artificial Sequence
  Synthetic polypeptide
VFSTLSPTGTSRLGLRVSSCLPCAPSMSAPAPCMELCLMQGALELEFMFTPLCRKCQVTYGAWGKVEELGVHQRNG

SEQ ID NO: 18313 - protein, 414 aa, Artificial Sequence
  Synthetic polypeptide
LEEQKYTRQINELEGQFHQKAKEIGMIHTELKAVRQFQKRKIQVERELDDLKENLRNTERIHQETLRRLESRFFEEKHRLEQEAEKKIIMLAERAHHEAIVQLNDAGRNVFKENDYLQKALAYHLKETDALQKNSQKLQESHTLLLHQKEINDLLVKEKIMQLVQQRSQIQTLQKKVVNLETALSYMTKEFESEVLKLQQHAMIENQAGQVEIDKLQHLLQMKDREMNRVKKLAKNILDERTEVERFFLDALHQVKQQILISRKHYKQIAQAAFNLKMRAACTGRTEYPKIRTFDGREHSTNSVNQDLLEAEKWTHIEGNVDIGDLTWEQKEKVLRLLFAKMNGCPSRKYNQSSRPPVPDYVVSDSGETKEFGDESKLQDKIFITQQIAISDSSGEVVLPTIPKEPQESDTGTF

SEQ ID NO: 18314 - protein, 9 aa, Artificial Sequence
  Synthetic polypeptide
RGTKVYQAN

SEQ ID NO: 18315 - protein, 1256 aa, Artificial Sequence
  Synthetic polypeptide
RSTVEGRRKDVAFTARGPISTLPLLQQLCYLASPVIENGQLECPQGYKRLNLTHCQDINECLTLGLCKDAECVNTRGSYLCTCRPGLMLDPSRSRCVSDKAISMLQGLCYRSLGPGTCTLPLAQRITKQICCCSRVGKAWGSECEKCPLPGTEAFREICPAGHGYTYASSDIRLSMRKAEEEELARPPREQGQRSSGALPGPAERQPLRVVTDTWLEAGTIPDKGDSQAGQVTTSVTHAPAWVTGNATTPPMPEQGIAEIQEEQVTPSTDVLVTLSTPGIDRCAAGATNVCGPGTCVNLPDGYRCVCSPGYQLHPSQAYCTDDNECLRDPCKGKGRCINRVGSYSCFCYPGYTLATSGATQECQDINECEQPGVCSGGQCTNTEGSYHCECDQGYIMVRKGHCQDINECRHPGTCPDGRCVNSPGSYTCLACEEGYRGQSGSCVDVNECLTPGVCAHGKCTNLEGSFRCSCEQGYEVTSDEKGCQDVDECASRASCPTGLCLNTEGSFACSACENGYWVNEDGTACEDLDECAFPGVCPSGVCTNTAGSFSCKDCDGGYRPSPLGDSCEDVDECEDPQSSCLGGECKNTVGSYQCLCPQGFQLANGTVCEDVNECMGEEHCAPHGECLNSHGSFFCLCAPGFVSAEGGTSCQDVDECATTDPCVGGHCVNTEGSFNCLCETGFQPSPESGECVDIDECEDYGDPVCGTWKCENSPGSYRCVLGCQPGFHMAPNGDCIDIDECANDTMCGSHGFCDNTDGSFRCLCDQGFEISPSGWDCVDVNECELMLAVCGAALCENVEGSFLCLCASDLEEYDAQEGHCRPRGAGGQSMSEAPTGDHAPAPTRMDCYSGQKGHAPCSSVLGRNTTQAECCCTQGASWGDACDLCPSEDSAEFSEICPSGKGYIPVEGAWTFGQTMYTDADECVIFGPGLCPNGRCLNTVPGYVCLCNPGFHYDASHKKCEDHDECQDLACENGECVNTEGSFHCFCSPPLTLDLSQQRCMNSTSSTEDLPDHDIHMDICWKKVTNDVCSEPLRGHRTTYTECCCQDGEAWSQQCALCPPRSSEVYAQLCNVARIEAEREAGVHFRPGYEYGPGPDDLHYSIYGPDGAPFYNYLGPEDTVPEPAFPNTAGHSADRTPILESPLQPSELQPHYVASHPEPPAGFEGLQAEECGILNGCENGRCVRVREGYTCDCFEGFQLDAAHMACVDVNECDDLNGPAVLCVHGYCENTEGSYRCHCSPGYVAEAGPPHCTAKE

SEQ ID NO: 18316 - protein, 34 aa, Artificial Sequence
  Synthetic polypeptide
EAQWKVGERMWPSQLEARFQPCLCSSNFVTWPPR

SEQ ID NO: 18317 - protein, 20 aa, Artificial Sequence
  Synthetic polypeptide
RPDFNPASAPATLLPGLPGD

SEQ ID NO: 18318 - protein, 1204 aa, Artificial Sequence
  Synthetic polypeptide
RSTVEGRRKDVAFTARGPISTLPLLQQLCYLASPVIENGQLECPQGYKRLNLTHCQDINECLTLGLCKDAECVNTRGSYLCTCRPGLMLDPSRSRCVSDKAISMLQGLCYRSLGPGTCTLPLAQRITKQICCCSRVGKAWGSECEKCPLPGTEAFREICPAGHGYTYASSDIRLSMRKAEEEELARPPREQGQRSSGALPGPAERQPLRVVTDTWLEAGTIPDKGDSQAGQVTTSVTHAPAWVTGNATTPPMPEQGIAEIQEEQVTPSTDVLVTLSTPGIDRCAAGATNVCGPGTCVNLPDGYRCVCSPGYQLHPSQAYCTDDNECLRDPCKGKGRCINRVGSYSCFCYPGYTLATSGATQECQDINECEQPGVCSGGQCTNTEGSYHCECDQGYIMVRKGHCQDINECRHPGTCPDGRCVNSPGSYTCLACEEGYRGQSGSCVDVNECLTPGVCAHGKCTNLEGSFRCSCEQGYEVTSDEKGCQDVDECASRASCPTGLCLNTEGSFACSACENGYWVNEDGTACEDLDECAFPGVCPSGVCTNTAGSFSCKDCDGGYRPSPLGDSCEDVDECEDPQSSCLGGECKNTVGSYQCLCPQGFQLANGTVCEDVNECMGEEHCAPHGECLNSHGSFFCLCAPGFVSAEGGTSCQDVDECATTDPCVGGHCVNTEGSFNCLCETGFQPSPESGECVDIDECEDYGDPVCGTWKCENSPGSYRCVLGCQPGFHMAPNGDCIDIDECANDTMCGSHGFCDNTDGSFRCLCDQGFEISPSGWDCVDVNECELMLAVCGAALCENVEGSFLCLCASDLEEYDAQEGHCRPRGAGGQSMSEAPTGDHAPAPTRMDCYSGQKGHAPCSSVLGRNTTQAECCCTQGASWGDACDLCPSEDSAEFSEICPSGKGYIPVEGAWTFGQTMYTDADECVIFGPGLCPNGRCLNTVPGYVCLCNPGFHYDASHKKCEDHDECQDLACENGECVNTEGSFHCFCSPPLTLDLSQQRCMNSTSSTEDLPDHDIHMDICWKKVTNDVCSEPLRGHRTTYTECCCQDGEAWSQQCALCPPRSSEVYAQLCNVARIEAEREAGVHFRPGYEYGPGPDDLHYSIYGPDGAPFYNYLGPEDTVPEPAFPNTAGHSADRTPILESPLQPSELQPHYVASHPGLCCCKTGEEVGTKAVSLPSPPPASHIASRSPQPASKGFRRRSAAS

SEQ ID NO: 18319 - protein, 1212 aa, Artificial Sequence
  Synthetic polypeptide
RSTVEGRRKDVAFTARGPISTLPLLQQLCYLASPVIENGQLECPQGYKRLNLTHCQDINECLTLGLCKDAECVNTRGSYLCTCRPGLMLDPSRSRCVSDKAISMLQGLCYRSLGPGTCTLPLAQRITKQICCCSRVGKAWGSECEKCPLPGTEAFREICPAGHGYTYASSDIRLSMRKAEEEELARPPREQGQRSSGALPGPAERQPLRVVTDTWLEAGTIPDKGDSQAGQVTTSVTHAPAWVTGNATTPPMPEQGIAEIQEEQVTPSTDVLVTLSTPGIDRCAAGATNVCGPGTCVNLPDGYRCVCSPGYQLHPSQAYCTDDNECLRDPCKGKGRCINRVGSYSCFCYPGYTLATSGATQECQDINECEQPGVCSGGQCTNTEGSYHCECDQGYIMVRKGHCQDINECRHPGTCPDGRCVNSPGSYTCLACEEGYRGQSGSCVDVNECLTPGVCAHGKCTNLEGSFRCSCEQGYEVTSDEKGCQDVDECASRASCPTGLCLNTEGSFACSACENGYWVNEDGTACEDLDECAFPGVCPSGVCTNTAGSFSCKDCDGGYRPSPLGDSCEDVDECEDPQSSCLGGECKNTVGSYQCLCPQGFQLANGTVCEDVNECMGEEHCAPHGECLNSHGSFFCLCAPGFVSAEGGTSCQDVDECATTDPCVGGHCVNTEGSFNCLCETGFQPSPESGECVDIDECANDTMCGSHGFCDNTDGSFRCLCDQGFEISPSGWDCVDVNECELMLAVCGAALCENVEGSFLCLCASDLEEYDAQEGHCRPRGAGGQSMSEAPTGDHAPAPTRMDCYSGQKGHAPCSSVLGRNTTQAECCCTQGASWGDACDLCPSEDSAEFSEICPSGKGYIPVEGAWTFGQTMYTDADECVIFGPGLCPNGRCLNTVPGYVCLCNPGFHYDASHKKCEDHDECQDLACENGECVNTEGSFHCFCSPPLTLDLSQQRCMNSTSSTEDLPDHDIHMDICWKKVTNDVCSEPLRGHRTTYTECCCQDGEAWSQQCALCPPRSSEVYAQLCNVARIEAEREAGVHFRPGYEYGPGPDDLHYSIYGPDGAPFYNYLGPEDTVPEPAFPNTAGHSADRTPILESPLQPSELQPHYVASHPEPPAGFEGLQAEECGILNGCENGRCVRVREGYTCDCFEGFQLDAAHMACVDVNECDDLNGPAVLCVHGYCENTEGSYRCHCSPGYVAEAGPPHCTAKE

SEQ ID NO: 18320 - protein, 1606 aa, Artificial Sequence
  Synthetic polypeptide
VPMVGSPFFPSAALFTLPSDDLSICSLDQELPGSSQGLCSAHSKLCPWYLTPCLAHFCAQSVTLSGLSQTHPSQQHVGLSRTVRLHPTATASSQLSSNALPPGPGLEQRDGTQQAVPLEHPSSPWGLNLTEKIKKIKIVFTPTICKQTCARGHCANSCERGDTTTLYSQGGHGHDPKSGFRIYFCQIPCLNGGRCIGRDECWCPANSTGKFCHLPIPQPDREPPGRGSRPRALLEAPLKQSTFTLPLSNQLASVNPSLVKVHIHHPPEASVQIHQVAQVRGGVEEALVENSVETRPPPWLPASPGHSLWDSNNIPARSGEPPRPLPPAAPRPRGLLGRCYLNTVNGQCANPLLELTTQEDCCGSVGAFWGVTLCAPCPPRPASPVIENGQLECPQGYKRLNLTHCQDINECLTLGLCKDAECVNTRGSYLCTCRPGLMLDPSRSRCVSDKAISMLQGLCYRSLGPGTCTLPLAQRITKQICCCSRVGKAWGSECEKCPLPGTEAFREICPAGHGYTYASSDIRLSMRKAEEEELARPPREQGQRSSGALPGPAERQPLRVVTDTWLEAGTIPDKGDSQAGQVTTSVTHAPAWVTGNATTPPMPEQGIAEIQEEQVTPSTDVLVTLSTPGIDRCAAGATNVCGPGTCVNLPDGYRCVCSPGYQLHPSQAYCTDDNECLRDPCKGKGRCINRVGSYSCFCYPGYTLATSGATQECQDINECEQPGVCSGGQCTNTEGSYHCECDQGYIMVRKGHCQDINECRHPGTCPDGRCVNSPGSYTCLACEEGYRGQSGSCVDVNECLTPGVCAHGKCTNLEGSFRCSCEQGYEVTSDEKGCQDVDECASRASCPTGLCLNTEGSFACSACENGYWVNEDGTACEDLDECAFPGVCPSGVCTNTAGSFSCKDCDGGYRPSPLGDSCEDVDECEDPQSSCLGGECKNTVGSYQCLCPQGFQLANGTVCEDVNECMGEEHCAPHGECLNSHGSFFCLCAPGFVSAEGGTSCQDVDECATTDPCVGGHCVNTEGSFNCLCETGFQPSPESGECVDIDECEDYGDPVCGTWKCENSPGSYRCVLGCQPGFHMAPNGDCIDIDECANDTMCGSHGFCDNTDGSFRCLCDQGFEISPSGWDCVDVNECELMLAVCGAALCENVEGSFLCLCASDLEEYDAQEGHCRPRGAGGQSMSEAPTGDHAPAPTRMDCYSGQKGHAPCSSVLGRNTTQAECCCTQGASWGDACDLCPSEDSAEFSEICPSGKGYIPVEGAWTFGQTMYTDADECVIFGPGLCPNGRCLNTVPGYVCLCNPGFHYDASHKKCEDHDECQDLACENGECVNTEGSFHCFCSPPLTLDLSQQRCMNSTSSTEDLPDHDIHMDICWKKVTNDVCSEPLRGHRTTYTECCCQDGEAWSQQCALCPPRSSEVYAQLCNVARIEAEREAGVHFRPGYEYGPGPDDLHYSIYGPDGAPFYNYLGPEDTVPEPAFPNTAGHSADRTPILESPLQPSELQPHYVASHPEPPAGFEGLQAEECGILNGCENGRCVRVREGYTCDCFEGFQLDAAHMACVDVNECDDLNGPAVLCVHGYCENTEGSYRCHCSPGYVAEAGPPHCTAKE

SEQ ID NO: 18321 - protein, 71 aa, Artificial Sequence
  Synthetic polypeptide
SVHLLTGPGATRELTGTVFCSFKIVSLVPNTMPGTLLCSISDPEWPQPDPPFPAARGVVPHCPTSPDCHGQ

SEQ ID NO: 18322 - protein, 1554 aa, Artificial Sequence
  Synthetic polypeptide
VPMVGSPFFPSAALFTLPSDDLSICSLDQELPGSSQGLCSAHSKLCPWYLTPCLAHFCAQSVTLSGLSQTHPSQQHVGLSRTVRLHPTATASSQLSSNALPPGPGLEQRDGTQQAVPLEHPSSPWGLNLTEKIKKIKIVFTPTICKQTCARGHCANSCERGDTTTLYSQGGHGHDPKSGFRIYFCQIPCLNGGRCIGRDECWCPANSTGKFCHLPIPQPDREPPGRGSRPRALLEAPLKQSTFTLPLSNQLASVNPSLVKVHIHHPPEASVQIHQVAQVRGGVEEALVENSVETRPPPWLPASPGHSLWDSNNIPARSGEPPRPLPPAAPRPRGLLGRCYLNTVNGQCANPLLELTTQEDCCGSVGAFWGVTLCAPCPPRPASPVIENGQLECPQGYKRLNLTHCQDINECLTLGLCKDAECVNTRGSYLCTCRPGLMLDPSRSRCVSDKAISMLQGLCYRSLGPGTCTLPLAQRITKQICCCSRVGKAWGSECEKCPLPGTEAFREICPAGHGYTYASSDIRLSMRKAEEEELARPPREQGQRSSGALPGPAERQPLRVVTDTWLEAGTIPDKGDSQAGQVTTSVTHAPAWVTGNATTPPMPEQGIAEIQEEQVTPSTDVLVTLSTPGIDRCAAGATNVCGPGTCVNLPDGYRCVCSPGYQLHPSQAYCTDDNECLRDPCKGKGRCINRVGSYSCFCYPGYTLATSGATQECQDINECEQPGVCSGGQCTNTEGSYHCECDQGYIMVRKGHCQDINECRHPGTCPDGRCVNSPGSYTCLACEEGYRGQSGSCVDVNECLTPGVCAHGKCTNLEGSFRCSCEQGYEVTSDEKGCQDVDECASRASCPTGLCLNTEGSFACSACENGYWVNEDGTACEDLDECAFPGVCPSGVCTNTAGSFSCKDCDGGYRPSPLGDSCEDVDECEDPQSSCLGGECKNTVGSYQCLCPQGFQLANGTVCEDVNECMGEEHCAPHGECLNSHGSFFCLCAPGFVSAEGGTSCQDVDECATTDPCVGGHCVNTEGSFNCLCETGFQPSPESGECVDIDECEDYGDPVCGTWKCENSPGSYRCVLGCQPGFHMAPNGDCIDIDECANDTMCGSHGFCDNTDGSFRCLCDQGFEISPSGWDCVDVNECELMLAVCGAALCENVEGSFLCLCASDLEEYDAQEGHCRPRGAGGQSMSEAPTGDHAPAPTRMDCYSGQKGHAPCSSVLGRNTTQAECCCTQGASWGDACDLCPSEDSAEFSEICPSGKGYIPVEGAWTFGQTMYTDADECVIFGPGLCPNGRCLNTVPGYVCLCNPGFHYDASHKKCEDHDECQDLACENGECVNTEGSFHCFCSPPLTLDLSQQRCMNSTSSTEDLPDHDIHMDICWKKVTNDVCSEPLRGHRTTYTECCCQDGEAWSQQCALCPPRSSEVYAQLCNVARIEAEREAGVHFRPGYEYGPGPDDLHYSIYGPDGAPFYNYLGPEDTVPEPAFPNTAGHSADRTPILESPLQPSELQPHYVASHPGLCCCKTGEEVGTKAVSLPSPPPASHIASRSPQPASKGFRRRSAAS

SEQ ID NO: 18323 - protein, 1562 aa, Artificial Sequence
  Synthetic polypeptide
VPMVGSPFFPSAALFTLPSDDLSICSLDQELPGSSQGLCSAHSKLCPWYLTPCLAHFCAQSVTLSGLSQTHPSQQHVGLSRTVRLHPTATASSQLSSNALPPGPGLEQRDGTQQAVPLEHPSSPWGLNLTEKIKKIKIVFTPTICKQTCARGHCANSCERGDTTTLYSQGGHGHDPKSGFRIYFCQIPCLNGGRCIGRDECWCPANSTGKFCHLPIPQPDREPPGRGSRPRALLEAPLKQSTFTLPLSNQLASVNPSLVKVHIHHPPEASVQIHQVAQVRGGVEEALVENSVETRPPPWLPASPGHSLWDSNNIPARSGEPPRPLPPAAPRPRGLLGRCYLNTVNGQCANPLLELTTQEDCCGSVGAFWGVTLCAPCPPRPASPVIENGQLECPQGYKRLNLTHCQDINECLTLGLCKDAECVNTRGSYLCTCRPGLMLDPSRSRCVSDKAISMLQGLCYRSLGPGTCTLPLAQRITKQICCCSRVGKAWGSECEKCPLPGTEAFREICPAGHGYTYASSDIRLSMRKAEEEELARPPREQGQRSSGALPGPAERQPLRVVTDTWLEAGTIPDKGDSQAGQVTTSVTHAPAWVTGNATTPPMPEQGIAEIQEEQVTPSTDVLVTLSTPGIDRCAAGATNVCGPGTCVNLPDGYRCVCSPGYQLHPSQAYCTDDNECLRDPCKGKGRCINRVGSYSCFCYPGYTLATSGATQECQDINECEQPGVCSGGQCTNTEGSYHCECDQGYIMVRKGHCQDINECRHPGTCPDGRCVNSPGSYTCLACEEGYRGQSGSCVDVNECLTPGVCAHGKCTNLEGSFRCSCEQGYEVTSDEKGCQDVDECASRASCPTGLCLNTEGSFACSACENGYWVNEDGTACEDLDECAFPGVCPSGVCTNTAGSFSCKDCDGGYRPSPLGDSCEDVDECEDPQSSCLGGECKNTVGSYQCLCPQGFQLANGTVCEDVNECMGEEHCAPHGECLNSHGSFFCLCAPGFVSAEGGTSCQDVDECATTDPCVGGHCVNTEGSFNCLCETGFQPSPESGECVDIDECANDTMCGSHGFCDNTDGSFRCLCDQGFEISPSGWDCVDVNECELMLAVCGAALCENVEGSFLCLCASDLEEYDAQEGHCRPRGAGGQSMSEAPTGDHAPAPTRMDCYSGQKGHAPCSSVLGRNTTQAECCCTQGASWGDACDLCPSEDSAEFSEICPSGKGYIPVEGAWTFGQTMYTDADECVIFGPGLCPNGRCLNTVPGYVCLCNPGFHYDASHKKCEDHDECQDLACENGECVNTEGSFHCFCSPPLTLDLSQQRCMNSTSSTEDLPDHDIHMDICWKKVTNDVCSEPLRGHRTTYTECCCQDGEAWSQQCALCPPRSSEVYAQLCNVARIEAEREAGVHFRPGYEYGPGPDDLHYSIYGPDGAPFYNYLGPEDTVPEPAFPNTAGHSADRTPILESPLQPSELQPHYVASHPEPPAGFEGLQAEECGILNGCENGRCVRVREGYTCDCFEGFQLDAAHMACVDVNECDDLNGPAVLCVHGYCENTEGSYRCHCSPGYVAEAGPPHCTAKE

SEQ ID NO: 18324 - protein, 69 aa, Artificial Sequence
  Synthetic polypeptide
RACTWDHGFLVHSLALPFPRWATPGESLTSLCLGFCISKDPEWPQPDPPFPAARGVVPHCPTSPDCHGQ

SEQ ID NO: 18325 - protein, 1583 aa, Artificial Sequence
  Synthetic polypeptide
GRVPGTTASWFTAWLCHFPGGPPQASHLPLCASDSASVRTLSGLSQTHPSQQHVGLSRTVRLHPTATASSQLSSNALPPGPGLEQRDGTQQAVPLEHPSSPWGLNLTEKIKKIKIVFTPTICKQTCARGHCANSCERGDTTTLYSQGGHGHDPKSGFRIYFCQIPCLNGGRCIGRDECWCPANSTGKFCHLPIPQPDREPPGRGSRPRALLEAPLKQSTFTLPLSNQLASVNPSLVKVHIHHPPEASVQIHQVAQVRGGVEEALVENSVETRPPPWLPASPGHSLWDSNNIPARSGEPPRPLPPAAPRPRGLLGRCYLNTVNGQCANPLLELTTQEDCCGSVGAFWGVTLCAPCPPRPASPVIENGQLECPQGYKRLNLTHCQDINECLTLGLCKDAECVNTRGSYLCTCRPGLMLDPSRSRCVSDKAISMLQGLCYRSLGPGTCTLPLAQRITKQICCCSRVGKAWGSECEKCPLPGTEAFREICPAGHGYTYASSDIRLSMRKAEEEELARPPREQGQRSSGALPGPAERQPLRVVTDTWLEAGTIPDKGDSQAGQVTTSVTHAPAWVTGNATTPPMPEQGIAEIQEEQVTPSTDVLVTLSTPGIDRCAAGATNVCGPGTCVNLPDGYRCVCSPGYQLHPSQAYCTDDNECLRDPCKGKGRCINRVGSYSCFCYPGYTLATSGATQECQDINECEQPGVCSGGQCTNTEGSYHCECDQGYIMVRKGHCQDINECRHPGTCPDGRCVNSPGSYTCLACEEGYRGQSGSCVDVNECLTPGVCAHGKCTNLEGSFRCSCEQGYEVTSDEKGCQDVDECASRASCPTGLCLNTEGSFACSACENGYWVNEDGTACEDLDECAFPGVCPSGVCTNTAGSFSCKDCDGGYRPSPLGDSCEDVDECEDPQSSCLGGECKNTVGSYQCLCPQGFQLANGTVCEDVNECMGEEHCAPHGECLNSHGSFFCLCAPGFVSAEGGTSCQDVDECATTDPCVGGHCVNTEGSFNCLCETGFQPSPESGECVDIDECEDYGDPVCGTWKCENSPGSYRCVLGCQPGFHMAPNGDCIDIDECANDTMCGSHGFCDNTDGSFRCLCDQGFEISPSGWDCVDVNECELMLAVCGAALCENVEGSFLCLCASDLEEYDAQEGHCRPRGAGGQSMSEAPTGDHAPAPTRMDCYSGQKGHAPCSSVLGRNTTQAECCCTQGASWGDACDLCPSEDSAEFSEICPSGKGYIPVEGAWTFGQTMYTDADECVIFGPGLCPNGRCLNTVPGYVCLCNPGFHYDASHKKCEDHDECQDLACENGECVNTEGSFHCFCSPPLTLDLSQQRCMNSTSSTEDLPDHDIHMDICWKKVTNDVCSEPLRGHRTTYTECCCQDGEAWSQQCALCPPRSSEVYAQLCNVARIEAEREAGVHFRPGYEYGPGPDDLHYSIYGPDGAPFYNYLGPEDTVPEPAFPNTAGHSADRTPILESPLQPSELQPHYVASHPEPPAGFEGLQAEECGILNGCENGRCVRVREGYTCDCFEGFQLDAAHMACVDVNECDDLNGPAVLCVHGYCENTEGSYRCHCSPGYVAEAGPPHCTAKE

SEQ ID NO: 18326 - protein, 1531 aa, Artificial Sequence
  Synthetic polypeptide
GRVPGTTASWFTAWLCHFPGGPPQASHLPLCASDSASVRTLSGLSQTHPSQQHVGLSRTVRLHPTATASSQLSSNALPPGPGLEQRDGTQQAVPLEHPSSPWGLNLTEKIKKIKIVFTPTICKQTCARGHCANSCERGDTTTLYSQGGHGHDPKSGFRIYFCQIPCLNGGRCIGRDECWCPANSTGKFCHLPIPQPDREPPGRGSRPRALLEAPLKQSTFTLPLSNQLASVNPSLVKVHIHHPPEASVQIHQVAQVRGGVEEALVENSVETRPPPWLPASPGHSLWDSNNIPARSGEPPRPLPPAAPRPRGLLGRCYLNTVNGQCANPLLELTTQEDCCGSVGAFWGVTLCAPCPPRPASPVIENGQLECPQGYKRLNLTHCQDINECLTLGLCKDAECVNTRGSYLCTCRPGLMLDPSRSRCVSDKAISMLQGLCYRSLGPGTCTLPLAQRITKQICCCSRVGKAWGSECEKCPLPGTEAFREICPAGHGYTYASSDIRLSMRKAEEEELARPPREQGQRSSGALPGPAERQPLRVVTDTWLEAGTIPDKGDSQAGQVTTSVTHAPAWVTGNATTPPMPEQGIAEIQEEQVTPSTDVLVTLSTPGIDRCAAGATNVCGPGTCVNLPDGYRCVCSPGYQLHPSQAYCTDDNECLRDPCKGKGRCINRVGSYSCFCYPGYTLATSGATQECQDINECEQPGVCSGGQCTNTEGSYHCECDQGYIMVRKGHCQDINECRHPGTCPDGRCVNSPGSYTCLACEEGYRGQSGSCVDVNECLTPGVCAHGKCTNLEGSFRCSCEQGYEVTSDEKGCQDVDECASRASCPTGLCLNTEGSFACSACENGYWVNEDGTACEDLDECAFPGVCPSGVCTNTAGSFSCKDCDGGYRPSPLGDSCEDVDECEDPQSSCLGGECKNTVGSYQCLCPQGFQLANGTVCEDVNECMGEEHCAPHGECLNSHGSFFCLCAPGFVSAEGGTSCQDVDECATTDPCVGGHCVNTEGSFNCLCETGFQPSPESGECVDIDECEDYGDPVCGTWKCENSPGSYRCVLGCQPGFHMAPNGDCIDIDECANDTMCGSHGFCDNTDGSFRCLCDQGFEISPSGWDCVDVNECELMLAVCGAALCENVEGSFLCLCASDLEEYDAQEGHCRPRGAGGQSMSEAPTGDHAPAPTRMDCYSGQKGHAPCSSVLGRNTTQAECCCTQGASWGDACDLCPSEDSAEFSEICPSGKGYIPVEGAWTFGQTMYTDADECVIFGPGLCPNGRCLNTVPGYVCLCNPGFHYDASHKKCEDHDECQDLACENGECVNTEGSFHCFCSPPLTLDLSQQRCMNSTSSTEDLPDHDIHMDICWKKVTNDVCSEPLRGHRTTYTECCCQDGEAWSQQCALCPPRSSEVYAQLCNVARIEAEREAGVHFRPGYEYGPGPDDLHYSIYGPDGAPFYNYLGPEDTVPEPAFPNTAGHSADRTPILESPLQPSELQPHYVASHPGLCCCKTGEEVGTKAVSLPSPPPASHIASRSPQPASKGFRRRSAAS

SEQ ID NO: 18327 - protein, 1539 aa, Artificial Sequence
  Synthetic polypeptide
GRVPGTTASWFTAWLCHFPGGPPQASHLPLCASDSASVRTLSGLSQTHPSQQHVGLSRTVRLHPTATASSQLSSNALPPGPGLEQRDGTQQAVPLEHPSSPWGLNLTEKIKKIKIVFTPTICKQTCARGHCANSCERGDTTTLYSQGGHGHDPKSGFRIYFCQIPCLNGGRCIGRDECWCPANSTGKFCHLPIPQPDREPPGRGSRPRALLEAPLKQSTFTLPLSNQLASVNPSLVKVHIHHPPEASVQIHQVAQVRGGVEEALVENSVETRPPPWLPASPGHSLWDSNNIPARSGEPPRPLPPAAPRPRGLLGRCYLNTVNGQCANPLLELTTQEDCCGSVGAFWGVTLCAPCPPRPASPVIENGQLECPQGYKRLNLTHCQDINECLTLGLCKDAECVNTRGSYLCTCRPGLMLDPSRSRCVSDKAISMLQGLCYRSLGPGTCTLPLAQRITKQICCCSRVGKAWGSECEKCPLPGTEAFREICPAGHGYTYASSDIRLSMRKAEEEELARPPREQGQRSSGALPGPAERQPLRVVTDTWLEAGTIPDKGDSQAGQVTTSVTHAPAWVTGNATTPPMPEQGIAEIQEEQVTPSTDVLVTLSTPGIDRCAAGATNVCGPGTCVNLPDGYRCVCSPGYQLHPSQAYCTDDNECLRDPCKGKGRCINRVGSYSCFCYPGYTLATSGATQECQDINECEQPGVCSGGQCTNTEGSYHCECDQGYIMVRKGHCQDINECRHPGTCPDGRCVNSPGSYTCLACEEGYRGQSGSCVDVNECLTPGVCAHGKCTNLEGSFRCSCEQGYEVTSDEKGCQDVDECASRASCPTGLCLNTEGSFACSACENGYWVNEDGTACEDLDECAFPGVCPSGVCTNTAGSFSCKDCDGGYRPSPLGDSCEDVDECEDPQSSCLGGECKNTVGSYQCLCPQGFQLANGTVCEDVNECMGEEHCAPHGECLNSHGSFFCLCAPGFVSAEGGTSCQDVDECATTDPCVGGHCVNTEGSFNCLCETGFQPSPESGECVDIDECANDTMCGSHGFCDNTDGSFRCLCDQGFEISPSGWDCVDVNECELMLAVCGAALCENVEGSFLCLCASDLEEYDAQEGHCRPRGAGGQSMSEAPTGDHAPAPTRMDCYSGQKGHAPCSSVLGRNTTQAECCCTQGASWGDACDLCPSEDSAEFSEICPSGKGYIPVEGAWTFGQTMYTDADECVIFGPGLCPNGRCLNTVPGYVCLCNPGFHYDASHKKCEDHDECQDLACENGECVNTEGSFHCFCSPPLTLDLSQQRCMNSTSSTEDLPDHDIHMDICWKKVTNDVCSEPLRGHRTTYTECCCQDGEAWSQQCALCPPRSSEVYAQLCNVARIEAEREAGVHFRPGYEYGPGPDDLHYSIYGPDGAPFYNYLGPEDTVPEPAFPNTAGHSADRTPILESPLQPSELQPHYVASHPEPPAGFEGLQAEECGILNGCENGRCVRVREGYTCDCFEGFQLDAAHMACVDVNECDDLNGPAVLCVHGYCENTEGSYRCHCSPGYVAEAGPPHCTAKE

SEQ ID NO: 18328 - protein, 51 aa, Artificial Sequence
  Synthetic polypeptide
NDPGASFGSRLHPALERSPGMIYSWAVFLYPGVHPVHPRNTDLITVTKSDG

SEQ ID NO: 18329 - protein, 29 aa, Artificial Sequence
  Synthetic polypeptide
VKTLEDCWEGMIGFEMILGRPLAVDCTLH

SEQ ID NO: 18330 - protein, 82 aa, Artificial Sequence
  Synthetic polypeptide
NRWDLTMLPRLVLNSWAQAILPPQPPKVLGLQDPGASFGSRLHPALERSPGMIYSWAVFLYPGVHPVHPRNTDLITVTKSDG

SEQ ID NO: 18331 - protein, 27 aa, Artificial Sequence
  Synthetic polypeptide
VKTLEDCWEGMIGFEIDGISLCYPDWS

SEQ ID NO: 18332 - protein, 14 aa, Artificial Sequence
  Synthetic polypeptide
SQHFGRPRWMFPRP

SEQ ID NO: 18333 - protein, 32 aa, Artificial Sequence
  Synthetic polypeptide
PGVMAHTCNPSTLGGQGGCSQGLDYCCSSMWL

SEQ ID NO: 18334 - protein, 467 aa, Artificial Sequence
  Synthetic polypeptide
WLTPVIPALWEAKVDVPKALIIVAVQCGCDGTFLLTQSGKVLACGLNEFNKLGLNQCMSGIINHEAYHEVPYTTSFTLAKQLSFYKIRTIAPGKTHTAAIDERGRLLTFGCNKCGQLGVGNYKKRLGINLLGGPLGGKQVIRVSCGDEFTIAATDDNHIFAWGNGGNGRLAMTPTERPHGSDICTSWPRPIFGSLHHVPDLSCRGWHTILIVEKVLNSKTIRSNSSGLSIGTVFQSSSPGGGGGGGGGEEEDSQQESETPDPSGGFRGTMEADRGMEGLISPTEAMGNSNGASSSCPGWLRKELENAEFIPMPDSPSPLSAAFSESEKDTLPYEELQGLKVASEAPLEHKPQVEASSPRLNPAVTCAGKGTPLTPPACACSSLQVEVERLQGLVLKCLAEQQKLQQENLQIFTQLQKLNKKLEGGQQVGMHSKGTQTAKEEMEMDPKPDLDSDSWCLLGTDSCRPSL

SEQ ID NO: 18335 - protein, 914 aa, Artificial Sequence
  Synthetic polypeptide
IKVVYECEDDSLVVWKEVDLTRLSEKERRDALNEIVILALLQHDNIIAYYNHFMDNTTLLIELEYCNGGNLYDKILRQKDKLFEEEMVVWYLFQIVSAVSCIHKAGILHRDIKTLNIFLTKANLIKLGDYGLAKKLNSEYSMAETLVGTPYYMSPELCQGVKYNFKSDIWAVGCVIFELLTLKRTFDATNPLNLCVKIVQGIRAMEVDSSQYSLELIQMVHSCLDQDPEQRPTADELLDRPLLRKRRREMEEKVTLLNAPTKRPRSSTVTEAPIAVVTSRTSEVYVWGGGKSTPQKLDVIKSGCSARQVCAGNTHFAVVTVEKELYTWVNMQGGTKLHGQLGHGDKASYRQPKHVEKLQGKAIRQVSCGDDFTVCVTDEGQLYAFGSDYYGCMGVDKVAGPEVLEPMQLNFFLSNPVEQVSCGDNHVVVLTRNKEVYSWGCGEYGRLGLDSEEDYYTPQKVDVPKALIIVAVQCGCDGTFLLTQSGKVLACGLNEFNKLGLNQCMSGIINHEAYHEVPYTTSFTLAKQLSFYKIRTIAPGKTHTAAIDERGRLLTFGCNKCGQLGVGNYKKRLGINLLGGPLGGKQVIRVSCGDEFTIAATDDNHIFAWGNGGNGRLAMTPTERPHGSDICTSWPRPIFGSLHHVPDLSCRGWHTILIVEKVLNSKTIRSNSSGLSIGTVFQSSSPGGGGGGGGGEEEDSQQESETPDPSGGFRGTMEADRGMEGLISPTEAMGNSNGASSSCPGWLRKELENAEFIPMPDSPSPLSAAFSESEKDTLPYEELQGLKVASEAPLEHKPQVEASSPRLNPAVTCAGKGTPLTPPACACSSLQVEVERLQGLVLKCLAEQQKLQQENLQIFTQLQKLNKKLEGGQQVGMHSKGTQTAKEEMEMDPKPDLDSDSWCLLGTDSCRPSL

SEQ ID NO: 18336 - protein, 32 aa, Artificial Sequence
  Synthetic polypeptide
DYLENQTKALFCKLKWYTNVRMTHWLCGRKSI

SEQ ID NO: 18337 - protein, 163 aa, Artificial Sequence
  Synthetic polypeptide
HIQISLLISTPSTPSPNRASKVIPRSRFRRKASEEIEDFRLRPQSLNGSDYGGDIPIIPDLEEVQEEDFVLQVAAPPSIQIKRVMTYRDLDNDLMKYSAIQTLDGEIDLKLLTKVLAPEHEVREDDVGWDWDHLFTEVSSEVLTEWDPLQTEKEDPAGQARHT

SEQ ID NO: 18338 - protein, 28 aa, Artificial Sequence
  Synthetic polypeptide
FQPLLPPPLIVPPKSSLDLGLGGRLLKK

SEQ ID NO: 18339 - protein, 3 aa, Artificial Sequence
  Synthetic polypeptide
ISV

SEQ ID NO: 18340 - protein, 68 aa, Artificial Sequence
  Synthetic polypeptide
HIQISLLISTPSTPSPNRASKVIPRSRFRRKASEEIEEYVSSILILMVSYVDLGQQCSLGGHDLFHLC

SEQ ID NO: 18341 - protein, 61 aa, Artificial Sequence
  Synthetic polypeptide
HIQISLLISTPSTPSPNRASKVIPRSRYSYHSGSGGSTGRRLCFAGGSPSQHPDKAGDDLP

SEQ ID NO: 18342 - protein, 129 aa, Artificial Sequence
  Synthetic polypeptide
FQPLLPPPLIVPPKSSLDLDIPIIPDLEEVQEEDFVLQVAAPPSIQIKRVMTYRDLDNDLMKYSAIQTLDGEIDLKLLTKVLAPEHEVREDDVGWDWDHLFTEVSSEVLTEWDPLQTEKEDPAGQARHT

SEQ ID NO: 18343 - protein, 29 aa, Artificial Sequence
  Synthetic polypeptide
ISIFLSFRIWRKYRKKTLFCRWQPLPASR

SEQ ID NO: 18344 - protein, 50 aa, Artificial Sequence
  Synthetic polypeptide
KSIIGLFVTQRINARKDGYLIYPDVLISHCMPVSKHLRDPPRMSASPDDL

SEQ ID NO: 18345 - protein, 37 aa, Artificial Sequence
  Synthetic polypeptide
MLERMDTSFILMCLYLIACLYQNISGILPGCLPHQTT

SEQ ID NO: 18346 - protein, 26 aa, Artificial Sequence
  Synthetic polypeptide
CAYISLHACIKTSQGSSQDVCLTRRP

SEQ ID NO: 18347 - protein, 140 aa, Artificial Sequence
  Synthetic polypeptide
LGCIRSFLKHFFSKECVQQLAENTRYFRRRLKEMGFIIYGNEDSPVVPLMLYMPAKIGAFGREMLKRNIGVVVVGFPATPIIESRARFCLSAAHTKEILDTALKEIDEVGDLLQLKYSRHRLVPLLDRPFDETTYEETED

SEQ ID NO: 18348 - protein, 11 aa, Artificial Sequence
  Synthetic polypeptide
NTSLVKSVYNS

SEQ ID NO: 18349 - protein, 12 aa, Artificial Sequence
  Synthetic polypeptide
GKEFKIILDNMV

SEQ ID NO: 18350 - protein, 260 aa, Artificial Sequence
  Synthetic polypeptide
ALWEVRAEGLLEVRSSRSSWTTWYKEATKRRPRSLLEKLRWVTVGYHYNWDSKKYSADHYTPFPSDLGFLSEQVAAACGFEDFRAEAGILNYYRLDSTLGIHVDRSELDHSKPLLSFSFGQSAIFLLGGLQRDEAPTAMFMHSGDIMIMSGFSRLLNHAVPRVLPNPEGEGLPHCLEAPLPAVLPRDSMVEPCSMEDWQVCASYLKTARVNMTVRQVLATDQNFPLEPIEDEKRDISTEGFCHLDDQNSEVKRARINPDS

SEQ ID NO: 18351 - protein, 28 aa, Artificial Sequence
  Synthetic polypeptide
GVQDHPGQHGIKKRLNGDPEVYWRNCVG

SEQ ID NO: 18352 - protein, 42 aa, Artificial Sequence
  Synthetic polypeptide
ALWEVRAEGLLEVRSSRSSWTTWYKEATKRRPRSLLEKLRWV

SEQ ID NO: 18353 - protein, 27 aa, Artificial Sequence
  Synthetic polypeptide
FLHFHLSWRYVHLWEKWWAYPLHLASQ

SEQ ID NO: 18354 - protein, 67 aa, Artificial Sequence
  Synthetic polypeptide
QDGRIGTAPVYSSQRERRRRRVISAFPSELALRTSLGKVVGLSSTPGQPMTGPARGLTALPWASAPL

SEQ ID NO: 18355 - protein, 276 aa, Artificial Sequence
  Synthetic polypeptide
GVTCSSLPSAMIVRPPQPHGTEQGKIGVVFNIGTVDISIKEERTPVNDGKYHVVRFTRNGGNATLQVDNWPVNEHYPTGNTDNERFQMVKQKIPFKYNRPVEEWLQEKGRQLTIFNTQAQIAIGGKDKGRLFQGQLSGLYYDGLKVLNMAAENNPNIKINGSVRLVGEVPSILGTTQTTSMPPEMSTTVMETTTTMATTTTRKNRSTASIQPTSDDLVSSAECSSDDEDFVECEPSTGRSARSSNAARSLRAALTWTWRLTYTFTPIIFISCVVHS

SEQ ID NO: 18356 - protein, 32 aa, Artificial Sequence
  Synthetic polypeptide
GLPSHMELNRGKLELSSTLAQLTSPSKRREPL

SEQ ID NO: 18357 - protein, 307 aa, Artificial Sequence
  Synthetic polypeptide
GVTCSSLPSAMIVRPPQPHGTEQGKIGVVFNIGTVDISIKEERTPVNDGKYHVVRFTRNGGNATLQVDNWPVNEHYPTGRQLTIFNTQAQIAIGGKDKGRLFQGQLSGLYYDGLKVLNMAAENNPNIKINGSVRLVGEVPSILGTTQTTSMPPEMSTTVMETTTTMATTTTRKNRSTASIQPTSDDLVSSAECSSDDEDFVECEPSTANPTEPGIRRVPGASEVIRESSSTTGMVVGIVAAAALCILILLYAMYKYRNRDEGSYQVDETRNYISNSAQSNGTLMKEKQQSSKSGHKKQKNKDREYYV

SEQ ID NO: 18358 - protein, 515 aa, Artificial Sequence
  Synthetic polypeptide
GVTCSSLPSAMIVRPPQPHGTEQGKIGVVFNIGTVDISIKEERTPVNDGKYHVVRFTRNGGNATLQVDNWPVNEHYPTGRQLTIFNTQAQIAIGGKDKGRLFQGQLSGLYYDGLKVLNMAAENNPNIKINGSVRLVGEVPSILGTTQTTSMPPEMSTTVMETTTTMATTTTRKNRSTASIQPTSDDLVSSAECSSDDEDFVECEPSTGGELVIPLLVEDPLATPPIATRAPSITLPPTFRPLLTIIETTKDSLSMTSEAGLPCLSDQGSDGCDDDGLVISGYGSGETFDSNLPPTDDEDFYTTFSLVTDKSLSTSIFEGGYKAHAPKWESKDFRPNKVSETSRTTTTSLSPELIRFTASSSSGMVPKLPAGKMNNRDLKPQPDIVLLPLPTAYELDSTKLKSPLITSPMFRNVPTANPTEPGIRRVPGASEVIRESSSTTGMVVGIVAAAALCILILLYAMYKYRNRDEGSYQVDETRNYISNSAQSNGTLMKEKQQSSKSGHKKQKNKDREYYV

SEQ ID NO: 18359 - protein, 310 aa, Artificial Sequence
  Synthetic polypeptide
GVTCSSLPSAMIVRPPQPHGTEQGKIGVVFNIGTVDISIKEERTPVNDGKYHVVRFTRNGGNATLQVDNWPVNEHYPTGRQLTIFNTQAQIAIGGKDKGRLFQGQLSGLYYDGLKVLNMAAENNPNIKINGSVRLVGEVPSILGTTQTTSMPPEMSTTVMETTTTMATTTTRKNRSTASIQPTSDDLVSSAECSSDDEDFVECEPSTGRSANPTEPGIRRVPGASEVIRESSSTTGMVVGIVAAAALCILILLYAMYKYRNRDEGSYQVDETRNYISNSAQSNGTLMKEKQQSSKSGHKKQKNKDREYYV

SEQ ID NO: 18360 - protein, 337 aa, Artificial Sequence
  Synthetic polypeptide
GVTCSSLPSAMIVRPPQPHGTEQGKIGVVFNIGTVDISIKEERTPVNDGKYHVVRFTRNGGNATLQVDNWPVNEHYPTGNTDNERFQMVKQKIPFKYNRPVEEWLQEKGRQLTIFNTQAQIAIGGKDKGRLFQGQLSGLYYDGLKVLNMAAENNPNIKINGSVRLVGEVPSILGTTQTTSMPPEMSTTVMETTTTMATTTTRKNRSTASIQPTSDDLVSSAECSSDDEDFVECEPSTANPTEPGIRRVPGASEVIRESSSTTGMVVGIVAAAALCILILLYAMYKYRNRDEGSYQVDETRNYISNSAQSNGTLMKEKQQSSKSGHKKQKNKDREYYV

SEQ ID NO: 18361 - protein, 15 aa, Artificial Sequence
  Synthetic polypeptide
LANYGHCDFSAITIV

SEQ ID NO: 18362 - protein, 45 aa, Artificial Sequence
  Synthetic polypeptide
NLHQLLPWFSGLWTWAGTTHQLSWASSLPTTDTVTFQPSQLCEIG

SEQ ID NO: 18363 - protein, 65 aa, Artificial Sequence
  Synthetic polypeptide
LFSHHNCVKLGEDAPNSSVVHVSSTEGGDNSGNGTQEKIAEGATCHLLDFASPERPLVVNFGSAT

SEQ ID NO: 18364 - protein, 351 aa, Artificial Sequence
  Synthetic polypeptide
SILNPQLLPRCLGICGWHSLWENKLMQSRAVDGFHSEEQQLLLQVQQQHQPQQQQHHHHHHHQQAQPQQTVPQQAQTQQVLIPASQQATAPQVIVPDSKLIQHMNASNMSAAATAATLALPAGVTPVQQILTNSGQLLQVVRAANGAQYIFQPQQSVVLQQQVIPQMQPGGVQAPVIQQVLAPLPGGISPQTGVIIQPQQILFTGNKTQVIPTTVAAPTPAQAQITATGQQQPQAQPAQTQAPLVLQVDGTGDTSSEEDEDEEEDYDDDEEEDKEKDGAEDGQVEEEPLNSEDDVSDEEGQELFDTENVVVCQYDKIHRSKNKWKFHLKDGIMNLNGRDYIFSKAIGDAEW

SEQ ID NO: 18365 - protein, 21 aa, Artificial Sequence
  Synthetic polypeptide
IPSFYHDVWAYVVGIHYGKTN

SEQ ID NO: 18366 - protein, 97 aa, Artificial Sequence
  Synthetic polypeptide
NFESPASTTMSGHMWLAFIMGKQTNAVQGSRWISFRRAAASTASSTAASTPAAAASPPSPSSASSASADSTSASADPAGSYSCITASHSTTSYCSRF

SEQ ID NO: 18367 - protein, 40 aa, Artificial Sequence
  Synthetic polypeptide
REDCQECLLGSATSLCGLGNLPTSSKLPRALSFSDIGLSL

SEQ ID NO: 18368 - protein, 640 aa, Artificial Sequence
  Synthetic polypeptide
TKEKIAKSVFWVLPLHCVALATSRLLVNYPEPYRSQILDYLFKPNFGASLHILKVEIGGDGQTTDGTEPSHMHYALDENYFRGYEWWLMKEAKKRNPNITLIGLPWSFPGWLGKGFDWPYVNLQLTAYYVVTWIVGAKRYHDLDIDYIGIWNERSYNANYIKILRKMLNYQGLQRVKIIASDNLWESISASMLLDAELFKVVDVIGAHYPGTHSAKDAKLTGKKLWSSEDFSTLNSDMGAGCWGRILNQNYINGYMTSTIAWNLVASYYEQLPYGRCGLMTAQEPWSGHYVVESPVWVSAHTTQFTQPGWYYLKTVGHLEKGGSYVALTDGLGNLTIIIETMSHKHSKCIRPFLPYFNVSQQFATFVLKGSFSEIPELQVWYTKLGKTSERFLFKQLDSLWLLDSDGSFTLSLHEDELFTLTTLTTGRKGSYPLPPKSQPFPSTYKDDFNVDYPFFSEAPNFADQTGVFEYFTNIEDPGEHHFTLRQVLNQRPITWAADASNTISIIGDYNWTNLTIKCDVYIETPDTGGVFIAGRVNKGGILIRSARGIFFWIFANGSYRVTGDLAGWIIYALGRVEVTAKKWYTLTLTIKGHFTSGMLNDKSLWTDIPVNFPKNGWAAIGTHSFEFAQFDNFLVEATR

SEQ ID NO: 18369 - protein, 28 aa, Artificial Sequence
  Synthetic polypeptide
ECRLKRRLPRVSSGFCHFTVWPWQPPDF

SEQ ID NO: 18370 - protein, 600 aa, Artificial Sequence
  Synthetic polypeptide
TKEKIAKSVFWVLPLHCVALATSRLLVNYPEPYRSQILDYLFKPNFGASLHILKVEIGGDGQTTDGTEPSHMHYALDENYFRGYEWWLMKEAKKRNPNITLIGLPWSFPGWLGKGFDWPYVNLQLTAYYVVTWIVGAKRYHDLDIDYIGIWNERSYNANYIKILRKMLNYQGLQRVKIIASDNLWESISASMLLDAELFKVVDVIGAHYPGTHSAKDAKLTGKKLWSSEDFSTLNSDMGAGCWGRILNQNYINGYMTSTIAWNLVASYYEQLPYGRCGLMTAQEPWSGHYVVESPVWVSAHTTQFTQPGWYYLKTVGHLEKGGSYVALTDGLGNLTIIIETMSHKHSKCIRPFLPYFNVSQQFATFVLKGSFSEIPELQVWYTKLGKTSERFLFKQLDSLWLLDSDGSFTLSLHEDELFTLTTLTTGRKGSYPLPPKSQPFPSTYKDDFNVDYPFFSEAPNFADQTGVFEYFTNIEDPGEHHFTLRQVLNQRPITWAADASNTISIIGDYNWTNLTIKCDVYIETPDTGGVFIAGRVNKGGILIRSARGIFFWIFANGSYRVTGDLAGWIIYALGRVEVTAKKWYTLTLTIKVAGRRKKT

SEQ ID NO: 18371 - protein, 166 aa, Artificial Sequence
  Synthetic polypeptide
TKEKIAKSVFWVLPLHCVALATSRLLVNYPEPYRSQILDYLFKPNFGASLHILKVEIGGDGQTTDGTEPSHMHYALDENYFRGYEWWLMKEAKKRNPNITLIGLPWSFPGWLGKGFDWPYVNLQLTAYYVVTWIVGAKRYHDLDIDYIGIWNERSYNANYIKVFGE

SEQ ID NO: 18372 - protein, 67 aa, Artificial Sequence
  Synthetic polypeptide
TKEKIAKSVFWVLPLHCVALATSRLLVNYPEPYRSQILDYLFKPNFGASLHILKVEIGGDGQTTDIL

SEQ ID NO: 18373 - protein, 334 aa, Artificial Sequence
  Synthetic polypeptide
VPSTMIVSFLRLPRPCGTKKQVSQTKIRVISTILFILAGCIVFVTIPAVIFKYIEGWTALESIYFVVVTLTTVGFGDFVAGGNAGINYREWYKPLVWFWILVGLAYFAAVLSMIGDWLRVLSKKTKEEVGEIKAHAAEWKANVTAEFRETRRRLSVEIHDKLQRAATIRSMERRRLGLDQRAHSLDMLSPEKRSVFAALDTGRFKASSQESINNRPNNLRLKGPEQLNKHGQGASEDNIINKFGSTSRLTKRKNKDLKKTLPEDVQKIYKTFRNYSLDEEKKEEETEKMCNSDNSSTAMLTDCIQQHAELENGMIPTDTKDREPENNSLLEDRN

SEQ ID NO: 18374 - protein, 11 aa, Artificial Sequence
  Synthetic polypeptide
GFLGHAELKSK

SEQ ID NO: 18375 - protein, 565 aa, Artificial Sequence
  Synthetic polypeptide
WFYKGFSLSLDSHSLLPAAKKDVPFTFCHNCEDFPATWNLAVPAAAPVCQPKSATNGQPPAPAPTPTPRLSISSRATVVARMEGTSQGGLQTVMKWKTVVAIFVVVVVYLVTGGLVFRALEQPFESSQKNTIALEKAEFLRDHVCVSPQELETLIQHALDADNAGVSPIGNSSNNSSHWDLGSAFFFAGTVITTIGYGNIAPSTEGGKIFCILYAIFGIPLFGFLLAGIGDQLGTIFGKSIARVEKVFRKKQVSQTKIRVISTILFILAGCIVFVTIPAVIFKYIEGWTALESIYFVVVTLTTVGFGDFVAGGNAGINYREWYKPLVWFWILVGLAYFAAVLSMIGDWLRVLSKKTKEEVGEIKAHAAEWKANVTAEFRETRRRLSVEIHDKLQRAATIRSMERRRLGLDQRAHSLDMLSPEKRSVFAALDTGRFKASSQESINNRPNNLRLKGPEQLNKHGQGASEDNIINKFGSTSRLTKRKNKDLKKTLPEDVQKIYKTFRNYSLDEEKKEEETEKMCNSDNSSTAMLTDCIQQHAELENGMIPTDTKDREPENNSLLEDRN

SEQ ID NO: 18376 - protein, 85 aa, Artificial Sequence
  Synthetic polypeptide
ISLMKSNGFIRGFPFHLILILSCLLPRKTCLSPSAIIVRTSQPHGTWPFPQQHRCASPRAPLTGNPRLRLRLQLRACPFPPEPQW

SEQ ID NO: 18377 - protein, 23 aa, Artificial Sequence
  Synthetic polypeptide
GLPSHMELGRSRSSTGVPAQERH

SEQ ID NO: 18378 - protein, 195 aa, Artificial Sequence
  Synthetic polypeptide
WFYKGFSLSLDSHSLLPAAKKDVPFTFCHNCEDFPATWNLAVPAAAPVCQPKSATNGQPPAPAPTPTPRLSISSRATVVARMEGTSQGGLQTVMKWKTVVAIFVVVVVYLVTGGLVFRALEQPFESSQKNTIALEKAEFLRDHVCVSPQELETLIQHALDADNAGVSPIGNSSNNSSHWDLGSAFFFAGTVITTI

SEQ ID NO: 18379 - protein, 11 aa, Artificial Sequence
  Synthetic polypeptide
GALHCILNECW

SEQ ID NO: 18380 - protein, 22 aa, Artificial Sequence
  Synthetic polypeptide
LEDGGGNIMRHAVGLEEPCIAS

SEQ ID NO: 18381 - protein, 1919 aa, Artificial Sequence
  Synthetic polypeptide
GMQLALRSLALHPERVLVATGQVGKEPYICIWDSYTVQTISVLKDVHTHGIACLAFDLDGQRLVSVGLDSKNAVCVWDWKRGKMLSMAPGHTDRIFDISWDLYQPNKLVSCGVKHIKFWSLCGNALTPKRGVFGKTGDLQTILCLACARDELTYSGALNGDIYVWKGINLIRTIQGAHAAGIFSMNACEEGFATGGRDGCIRLWDLTFKPITVIDLRETDQGYKGLSVRSVCWRGDHILVGTQDSEIFEIVVQERNKPFLIMQGHCEGELWALAVHPTKPLAVTGSDDRSVRIWSLVDHALIARCNMEEPIRCAAVNADGIHLALGMKDGSFTVLRVRDMTEVVHIKDRKEAIHELKYSPDGTYLAVGCNDSSVDIYGVAQRYKKVGECLGSLSFITHLDWSSDSRYLQTNDGNGKRLFYRMPGGKEVTSTEEIKGVHWASWTCVSGLEVNGIWPKYSDINDINSVDGNYIGQVLVTADDYGIIKLFRYPCLRKGAKFRKYIGHSAHVTNVRWSHDYQWVISIGGADHSVFQWKFIPERKLKDAVHIAPQESLADSHSDESDSDLSDVPELDSEIEQETQLTYRRQVYKEDLPQLKEQCKEKQKSATSKRRERAPGNSIRLHFVHGYRGYDCRSNLFYTQIGEIVYHVAAVGVIYNRQQNTQRFYLGHDDDILCLTIHPLKDYVATGQVGRDPSIHIWDTETIKPLSILKGHHQYGVSAVDFSADGKRLASVGIDDSHTVVLWDWKKGEKLSIARGSKDKIFVVKMNPYVPDKLITAGIKHMKFWRKAGGGLIGRKGYIGTLGKNDTMMCAVYGWTEEMAFSGTSTGDVCIWRDIFLVKTVKAHDGPVFSMHALEKGFVTGGKDGIVALWDDSFERCLKTYAIKRAALAPGSKGLLLEDNPSIRAISLGHGHILVGTKNGEILEVDKSGPITLLVQGHMEGEVWGLATHPYLPICATVSDDKTLRIWDLSPSHCMLAVRKLKKGGRCCCFSPDGKALAVGLNDGSFLMANADTLEDLVSFHHRKDMISDIRFSPGSGKYLAVASHDSFIDIYNVMSSKRVGICKGATSYITHIDWDIRGKLLQVNTGAKEQLFFEAPRGKKQTIPSVEVEKIAWASWTSVLGLCCEGIWPVIGEVTDVTASCLTSDKMVLATGDDLGFVKLFRYPTKGKFGKFKRYVAHSTHVTNVRWTYDDSMLVTLGGTDMSLMVWTNEMEGYREKRPCDSEESDIDSEEDGGYDSDVTRENEISYTIRALSTNIRPMLGIKPHLQQKEPSIDERQGVVRGSRPPVSRAPPQPEKLQTNNVGKKKRPIEDLVLELIFGYRGRDCRNNVHYLNDGDDIIYHTASVGILHNVATGSQSFYQEHNDDILCLTVNQHPKFINIVATGQVGDSADMSATAPSIHIWDAMNKQTLSILRCYHSKGVCSVSFSATGKLLLSVGLDPEHTITIWRWQEGAKIASRAGHNQRIFVAEFRPDSDTQFVSVGVKHVKFWTLAGRALLSKKGLLSTLEDARMQTMLAIAFGANNLTFTGTISGDVCVWKDHILCRIVARAHNGPVFAMYTTLRDGLIVTGGKERPSKEGGAVKLWDQELRRCRAFRLETGQATDCVRSVCRGKGKILVGTRNAEIIEVGEKNAACNILVNGHVDGPIWGLATHPSRDFFLSAAEDGTVRLWDIADKKMLNKVNLGHAARTVCYSPEGDMVAIGMKNGEFIILLVSSLKIWGKKRDRRCAIHDIRFSPDSRYLAVGSSENSVDFYDLTLGPTLNRISYCKDIPSFVIQMDFSADSSYLQVSSGCYKRHVYEVPSGKHLMDHAAIDRITWATWTSILGDEVLGIWSRHAEKADVNCACVSHSGISLVTGDDFGMVKLFDFPCPEKFAKHKRFLGHSPHVTNIRFTSGDRHVVSAGGDDCSLFVWKCVHTPH

SEQ ID NO: 18382 - protein, 1873 aa, Artificial Sequence
  Synthetic polypeptide
GMQLALRSLALHPERVLVATGQVGKEPYICIWDSYTVQTISVLKDVHTHGIACLAFDLDGQRLVSVGLDSKNAVCVWDWKRGKMLSMAPGHTDRIFDISWDLYQPNKLVSCGVKHIKFWSLCGNALTPKRGVFGKTGDLQTILCLACARDELTYSGALNGDIYVWKGINLIRTIQGAHAAGIFSMNACEEGFATGGRDGCIRLWDLTFKPITVIDLRETDQGYKGLSVRSVCWRGDHILVGTQDSEIFEIVVQERNKPFLIMQGHCEGELWALAVHPTKPLAVTGSDDRSVRIWSLVDHALIARCNMEEPIRCAAVNADGIHLALGMKDGSFTVLRVRDMTEVVHIKDRKEAIHELKYSPDGTYLAVGCNDSSVDIYGVAQRYKKVGECLGSLSFITHLDWSSDSRYLQTNDGNGKRLFYRMPGGKEVTSTEEIKGVHWASWTCVSGLEVNGIWPKYSDINDINSVDGNYIGQVLVTADDYGIIKLFRYPCLRKGAKFRKYIGHSAHVTNVRWSHDYQWVISIGGADHSVFQWKFIPERKLKDAVHIAPQESLADSHSDESDSDLSDVPELDSEIEQETQLTYRRQVYKEDLPQLKEQCKEKQKSATSKRRERAPGNSIRLHFVHGYRGYDCRSNLFYTQIGEIVYHVAAVGVIYNRQQNTQRFYLGHDDDILCLTIHPLKDYVATGQVGRDPSIHIWDTETIKPLSILKGHHQYGVSAVDFSADGKRLASVGIDDSHTVVLWDWKKGEKLSIARGSKDKIFVVKMNPYVPDKLITAGIKHMKFWRKAGDVCIWRDIFLVKTVKAHDGPVFSMHALEKGFVTGGKDGIVALWDDSFERCLKTYAIKRAALAPGSKGLLLEDNPSIRAISLGHGHILVGTKNGEILEVDKSGPITLLVQGHMEGEVWGLATHPYLPICATVSDDKTLRIWDLSPSHCMLAVRKLKKGGRCCCFSPDGKALAVGLNDGSFLMANADTLEDLVSFHHRKDMISDIRFSPGSGKYLAVASHDSFIDIYNVMSSKRVGICKGATSYITHIDWDIRGKLLQVNTGAKEQLFFEAPRGKKQTIPSVEVEKIAWASWTSVLGLCCEGIWPVIGEVTDVTASCLTSDKMVLATGDDLGFVKLFRYPTKGKFGKFKRYVAHSTHVTNVRWTYDDSMLVTLGGTDMSLMVWTNEMEGYREKRPCDSEESDIDSEEDGGYDSDVTRENEISYTIRALSTNIRPMLGIKPHLQQKEPSIDERPPVSRAPPQPEKLQTNNVGKKKRPIEDLVLELIFGYRGRDCRNNVHYLNDGDDIIYHTASVGILHNVATGSQSFYQEHNDDILCLTVNQHPKFINIVATGQVVLSCSLLTTAPSIHIWDAMNKQTLSILRCYHSKGVCSVSFSATGKLLLSVGLDPEHTITIWRWQEGAKIASRAGHNQRIFVAEFRPDSDTQFVSVGVKHVKFWTLAGRALLSKKGLLSTLEDARMQTMLAIAFGANNLTFTGTISGDVCVWKDHILCRIVARAHNGPVFAMYTTLRDGLIVTGGKERPSKEGGAVKLWDQELRRCRAFRLETGQATDCVRSVCRGKGKILVGTRNAEIIEVGEKNAACNILVNGHVDGPIWGLATHPSRDFFLSAAEDGTVRLWDIADKKMLNKVNLGHAARTVCYSPEGDMVAIGMKNGEFIILLVSSLKIWGKKRDRRCAIHDIRFSPDSRYLAVGSSENSVDFYDLTLGPTLNRISYCKDIPSFVIQMDFSADSSYLQVSSGCYKRHVYEVPSGKHLMDHAAIDRITWATWTSILGDEVLGIWSRHAEKADVNCACVSHSGISLVTGDDFGMVKLFDFPCPEKFAKHKRFLGHSPHVTNIRFTSGDRHVVSAGGDDCSLFVWKCVHTPH

SEQ ID NO: 18383 - protein, 1911 aa, Artificial Sequence
  Synthetic polypeptide
GMQLALRSLALHPERVLVATGQVGKEPYICIWDSYTVQTISVLKDVHTHGIACLAFDLDGQRLVSVGLDSKNAVCVWDWKRGKMLSMAPGHTDRIFDISWDLYQPNKLVSCGVKHIKFWSLCGNALTPKRGVFGKTGDLQTILCLACARDELTYSGALNGDIYVWKGINLIRTIQGAHAAGIFSMNACEEGFATGGRDGCIRLWDLTFKPITVIDLRETDQGYKGLSVRSVCWRGDHILVGTQDSEIFEIVVQERNKPFLIMQGHCEGELWALAVHPTKPLAVTGSDDRSVRIWSLVDHALIARCNMEEPIRCAAVNADGIHLALGMKDGSFTVLRVRDMTEVVHIKDRKEAIHELKYSPDGTYLAVGCNDSSVDIYGVAQRYKKVGECLGSLSFITHLDWSSDSRYLQTNDGNGKRLFYRMPGGKEVTSTEEIKGVHWASWTCVSGLEVNGIWPKYSDINDINSVDGNYIGQVLVTADDYGIIKLFRYPCLRKGAKFRKYIGHSAHVTNVRWSHDYQWVISIGGADHSVFQWKFIPERKLKDAVHIAPQESLADSHSDESDSDLSDVPELDSEIEQETQLTYRRQVYKEDLPQLKEQCKEKQKSATSKRRERAPGNSIRLHFVHGYRGYDCRSNLFYTQIGEIVYHVAAVGVIYNRQQNTQRFYLGHDDDILCLTIHPLKDYVATGQVGRDPSIHIWDTETIKPLSILKGHHQYGVSAVDFSADGKRLASVGIDDSHTVVLWDWKKGEKLSIARGSKDKIFVVKMNPYVPDKLITAGIKHMKFWRKAGGGLIGRKGYIGTLGKNDTMMCAVYGWTEEMAFSGTSTGDVCIWRDIFLVKTVKAHDGPVFSMHALEKGFVTGGKDGIVALWDDSFERCLKTYAIKRAALAPGSKGLLLEDNPSIRAISLGHGHILVGTKNGEILEVDKSGPITLLVQGHMEGEVWGLATHPYLPICATVSDDKTLRIWDLSPSHCMLAVRKLKKGGRCCCFSPDGKALAVGLNDGSFLMANADTLEDLVSFHHRKDMISDIRFSPGSGKYLAVASHDSFIDIYNVMSSKRVGICKGATSYITHIDWDIRGKLLQVNTGAKEQLFFEAPRGKKQTIPSVEVEKIAWASWTSVLGLCCEGIWPVIGEVTDVTASCLTSDKMVLATGDDLGFVKLFRYPTKGKFGKFKRYVAHSTHVTNVRWTYDDSMLVTLGGTDMSLMVWTNEMEGYREKRPCDSEESDIDSEEDGGYDSDVTRENEISYTIRALSTNIRPMLGIKPHLQQKEPSIDERPPVSRAPPQPEKLQTNNVGKKKRPIEDLVLELIFGYRGRDCRNNVHYLNDGDDIIYHTASVGILHNVATGSQSFYQEHNDDILCLTVNQHPKFINIVATGQVGDSADMSATAPSIHIWDAMNKQTLSILRCYHSKGVCSVSFSATGKLLLSVGLDPEHTITIWRWQEGAKIASRAGHNQRIFVAEFRPDSDTQFVSVGVKHVKFWTLAGRALLSKKGLLSTLEDARMQTMLAIAFGANNLTFTGTISGDVCVWKDHILCRIVARAHNGPVFAMYTTLRDGLIVTGGKERPSKEGGAVKLWDQELRRCRAFRLETGQATDCVRSVCRGKGKILVGTRNAEIIEVGEKNAACNILVNGHVDGPIWGLATHPSRDFFLSAAEDGTVRLWDIADKKMLNKVNLGHAARTVCYSPEGDMVAIGMKNGEFIILLVSSLKIWGKKRDRRCAIHDIRFSPDSRYLAVGSSENSVDFYDLTLGPTLNRISYCKDIPSFVIQMDFSADSSYLQVSSGCYKRHVYEVPSGKHLMDHAAIDRITWATWTSILGDEVLGIWSRHAEKADVNCACVSHSGISLVTGDDFGMVKLFDFPCPEKFAKHKRFLGHSPHVTNIRFTSGDRHVVSAGGDDCSLFVWKCVHTPH

SEQ ID NO: 18384 - protein, 121 aa, Artificial Sequence
  Synthetic polypeptide
EAAWILKARALTEMVYIDEIDVDQEGIAEMMLDENAIAQVPRPGTSLKLPGTNQTGGPSQAANHTSWKTHYRFPQAQHAEWKARHYGTGYQNTQNRLHSPPYHQLLRKICQAGNGFHAYKS

SEQ ID NO: 18385 - protein, 468 aa, Artificial Sequence
  Synthetic polypeptide
EAAWILKARALTEMVYIDEIDVDQEGIAEMMLDENAIAQVPRPGTSLKLPGTNQTGGPSQAVRPITQAGRPITGFLRPSTQSGRPGTMEQAIRTPRTAYTARPITSSSGRFVRLGTASMLTSPDGPFINLSRLNLTKYSQKPKLAKALFEYIFHHENDVKTALDLAALSTEHSQYKDWWWKVQIGKCYYRLGMYREAEKQFKSALKQQEMVDTFLYLAKVYVSLDQPVTALNLFKQGLDKFPGEVTLLCGIARIYEEMNNMSSAAEYYKEVLKQDNTHVEAIACIGSNHFYSDQPEIALRFYRRLLQMGIYNGQLFNNLGLCCFYAQQYDMTLTSFERALSLAENEEEAADVWYNLGHVAVGIGDTNLAHQCFRLALVNNNNHAEAYNNLAVLEMRKGHVEQARALLQTASSLAPHMYEPHFNFATISDKIGDLQRSYVAAQKSEAAFPDHVDTQHLIKQLRQHFAML

SEQ ID NO: 18386 - protein, 494 aa, Artificial Sequence
  Synthetic polypeptide
EAAWILKARALTEMVYIDEIDVDQEGIAEMMLDENAIAQVPRPGTSLKLPGTNQTGGPSQAVRPITQAGRPITGFLRPSTQSGRPGTMEQAIRTPRTAYTARPITSSSGRFVRLGTASMLTSPDGPFINLSRLNLTKYSQKPKLAKALFEYIFHHENDVKTIHLEDVVLHLGIYPFLLRNKNHIEKNALDLAALSTEHSQYKDWWWKVQIGKCYYRLGMYREAEKQFKSALKQQEMVDTFLYLAKVYVSLDQPVTALNLFKQGLDKFPGEVTLLCGIARIYEEMNNMSSAAEYYKEVLKQDNTHVEAIACIGSNHFYSDQPEIALRFYRRLLQMGIYNGQLFNNLGLCCFYAQQYDMTLTSFERALSLAENEEEAADVWYNLGHVAVGIGDTNLAHQCFRLALVNNNNHAEAYNNLAVLEMRKGHVEQARALLQTASSLAPHMYEPHFNFATISDKIGDLQRSYVAAQKSEAAFPDHVDTQHLIKQLRQHFAML

SEQ ID NO: 18387 - protein, 438 aa, Artificial Sequence
  Synthetic polypeptide
EAAWILKARALTEMVYIDEIDVDQEGIAEMMLDENAIAQVPRPGTSLKLPGTNQTGGPSQAVRPITQAGRPITGFLRPSTQSGRPGTMEQAIRTPRTAYTARPITSSSGRFVRLGTALFEYIFHHENDVKTALDLAALSTEHSQYKDWWWKVQIGKCYYRLGMYREAEKQFKSALKQQEMVDTFLYLAKVYVSLDQPVTALNLFKQGLDKFPGEVTLLCGIARIYEEMNNMSSAAEYYKEVLKQDNTHVEAIACIGSNHFYSDQPEIALRFYRRLLQMGIYNGQLFNNLGLCCFYAQQYDMTLTSFERALSLAENEEEAADVWYNLGHVAVGIGDTNLAHQCFRLALVNNNNHAEAYNNLAVLEMRKGHVEQARALLQTASSLAPHMYEPHFNFATISDKIGDLQRSYVAAQKSEAAFPDHVDTQHLIKQLRQHFAML

SEQ ID NO: 18388 - protein, 149 aa, Artificial Sequence
  Synthetic polypeptide
EAAWILKARALTEMVYIDEIDVDQEGIAEMMLDENAIAQVPRPGTSLKLPGTNQTGGPSQAVRPITQAGRPITGFLRPSTQSGRPGTMEQAIRTPRTAYTARPITSSSGRFVRLGTASMLTSPDGPFINLSRLNLTKYSQKPKLAKVCT

SEQ ID NO: 18389 - protein, 155 aa, Artificial Sequence
  Synthetic polypeptide
EAAWILKARALTEMVYIDEIDVDQEGIAEMMLDENAIAQVPRPGTSLKLPGTNQTGGPSQAVRPITQAGRPITGFLRPSTQSGRPGTMEQAIRTPRTAYTARPITSSSGRFVRLGTASMLTSPDGPFINLSRLNLTKYSQKPKLAKALDLAALST

SEQ ID NO: 18390 - protein, 410 aa, Artificial Sequence
  Synthetic polypeptide
EAAWILKARALTEMVYIDEIDVDQEGIAEMMLDENAIAQVPRPGTSLKLPGTNQTGGPSQAVRPITQAGRPITGFLRPSTQSGRPGTMEQAIRTPRTAYTARPITSSSGRFVRLGTALFEYIFHHENDVKTALDLAALSTEHSQYKDWWWKVQIGKCYYRLGMYREAEKQFKSALKQQEMVDTFLYLAKVYVSLDQPVTALNLFKQGLDKFPGEVTLLCGIARIYEEMNNMSSAAEYYKEVLKQDNTHVEAIACIGSNHFYSDQPEIALRFYRRLLQMGIYNGQLFNNLGLCCFYAQQYDMTLTSFERALSLAENEEEAADVWYNLGHVAVGIGDTNLAHQCFRLALVNNNNHAEAYNNLAVLEMRKGHVEQIGDLQRSYVAAQKSEAAFPDHVDTQHLIKQLRQHFAML

SEQ ID NO: 18391 - protein, 4 aa, Artificial Sequence
  Synthetic polypeptide
SYGK

SEQ ID NO: 18392 - protein, 14 aa, Artificial Sequence
  Synthetic polypeptide
AMGSRSRFRWSRQL

SEQ ID NO: 18393 - protein, 28 aa, Artificial Sequence
  Synthetic polypeptide
LWEVDRDSDGHVSFRDFEYALNYGQKEA

SEQ ID NO: 18394 - protein, 129 aa, Artificial Sequence
  Synthetic polypeptide
KEKFPSTSSLLSAVIHVRHDLLLFAFRYDRGGSPAVWNCILLEGFLNIVRKKKEAQRYRNEVRHIFTAFDTYYRGFLTLEDFKKAFRQVAPKLPERTVLEVFREVDRDSDGHVSFRDFEYALNYGQKEA

SEQ ID NO: 18395 - protein, 28 aa, Artificial Sequence
  Synthetic polypeptide
DMTCSSLPSAMIVGAPQPCGTVYYSRGF

SEQ ID NO: 18396 - protein, 40 aa, Artificial Sequence
  Synthetic polypeptide
SWGLPSRVELYITRGVFKYCQEKEGSSTISERSKTHLHSL

SEQ ID NO: 18397 - protein, 108 aa, Artificial Sequence
  Synthetic polypeptide
KEKFPSTSSLLSAVIHVRHDLLLFAFRYDRGGSPAVWNCILLEGFLNIVRKKKEAQRYRNEVRHIFTAFDTYYRGFLTLEDFKKAFRQVAPKLPERTVLEVFRGIFSA

SEQ ID NO: 18398 - protein, 178 aa, Artificial Sequence
  Synthetic polypeptide
KEKFPSTSSLLSAVIHVRHDLLLFAFRYDRGGSPAVWNCILLEGFLNIVRKKKEAQRYRNEVRHIFTAFDTYYRGFLTLEDFKKAFRQVAPKLPERTVLEVFRGLRIFSKCLLCHIDQKSKNPSSGLLAADSIIQAHPSPVQILRQMYINNELEGRGFIWDSSISWRFMWNIYGTGEY

SEQ ID NO: 18399 - protein, 160 aa, Artificial Sequence
  Synthetic polypeptide
LLGRLRQGAANEPRYTCSEAQKAAHKRKISPVKFSNTDSVLPPKRQKSGSQEDLGWCLSSSDDELQPEMPQKQAEKVVIKKEKDISAPNDGTAQRTENHGAPACHRLKEEEDEYETSGEGQDIWDMLDKGNPFQFYLTRVSGVKPKYNSGALHIKGQSYE

SEQ ID NO: 18400 - protein, 18 aa, Artificial Sequence
  Synthetic polypeptide
WWMPVILAPREAKARSSK

SEQ ID NO: 18401 - protein, 558 aa, Artificial Sequence
  Synthetic polypeptide
LLGRLRQGAANEPRYTCSEAQKAAHKRKISPVKFSNTDSVLPPKRQKSGSQEDLGWCLSSSDDELQPEMPQKQAEKVVIKKEKDISAPNDGTAQRTENHGAPACHRLKEEEDEYETSGEGQDIWDMLDKGNPFQFYLTRVSGVKPKYNSGALHIKDILSPLFGTLVSSAQFNYCFDVDWLVKQYPPEFRKKPILLVHGDKREAKAHLHAQAKPYENISLCQAKLDIAFGTHHTKMMLLLYEEGLRVVIHTSNLIHADWHQKTQGIWLSPLYPRIADGTHKSGESPTHFKADLISYLMAYNAPSLKEWIDVIHKHDLSETNVYLIGSTPGRFQGSQKDNWGHFRLKKLLKDHASSMPNAESWPVVGQFSSVGSLGADESKWLCSEFKESMLTLGKESKTPGKSSVPLYLIYPSVENVRTSLEGYPAGGSLPYSIQTAEKQNWLHSYFHKWSAETSGRSNAMPHIKTYMRPSPDFSKIAWFLVTSANLSKAAWGALEKNGTQLMIRSYELGVLFLPSAFAPAKRIKDEVEASFSGSRQFQSETEVLRWQPGANGHLSCAI

SEQ ID NO: 18402 - protein, 248 aa, Artificial Sequence
  Synthetic polypeptide
LLGRLRQGAANEPRYTCSEAQKAAHKRKISPVKFSNTDSVLPPKRQKSGSQEDLGWCLSSSDDELQPEMPQKQAEKVVIKKEKDISAPNDGTAQRTENHGAPACHRLKEEEDEYETSGEGQDIWDMLDKGNPFQFYLTRVSGVKPKYNSGALHIKDILSPLFGTLVSSAQFNYCFDVDWLVKQYPPEFRKKPILLVHGDKREAKAHLHAQAKPYENISLCQAKLDIAFGTHHTKMMLLLYEEGLRVVI

SEQ ID NO: 18403 - protein, 577 aa, Artificial Sequence
  Synthetic polypeptide
LLGRLRQGAANEPRYTCSEAQKAAHKRKISPVKFSNTDSVLPPKRQKSGSQEDLGWCLSSSDDELQPEMPQKQAEKVVIKKEKDISAPNDGTAQRTENHGAPACHRLKEEEDEYETSGEGQDIWDMLDKGNPFQFYLTRVSGVKPKYNSGALHIKDILSPLFGTLVSSAQFNYCFDVDWLVKQYPPEFRKKPILLVHGDKREAKAHLHAQAKPYENISLCQAKLDIAFGTHHTKMMLLLYEEGLRVVIHTSNLIHADWHQKTQGIWLSPLYPRIADGTHKSGESPTHFKADLISYLMAYNAPSLKEWIDVIHKHDLSETNVYLIGSTPGRFQGSQKDNWGHFRLKKLLKDHASSMPNAESWPVVGQFSSVGSLGADESKWLCSEFKESMLTLGKESKTPGKSSVPLYLIYPSVENVRTSLEGYPAGGSLPYSIQTAEKQNWLHSYFHKWSAETSGRSNAMPHIKTYMRPSPDFSKIAWFLVTSANLSKAAWGALEKNGTQLMIRSYELGVLFLPSAFGLDSFKVKQKFFAGSQEPMATFPVPYDLPPELYGSKDRPWIWNIPYVKAPDTHGNMWVPS

SEQ ID NO: 18404 - protein, 120 aa, Artificial Sequence
  Synthetic polypeptide
LLGRLRQGAANEPRYTCSEAQKAAHKRKISPVKFSNTDSVLPPKRQKSGSQEDLGWCLSSSDDELQPEMPQKQAEKVVIKKEKDISAPNDGTAQRTENHGAPACHRLKEEEDEYETSGEG

SEQ ID NO: 18405 - protein, 115 aa, Artificial Sequence
  Synthetic polypeptide
LLGRLRQGAANEPRYTCSEAQKAAHKRKISPVKFSNTDSVLPPKRQKSGSQEDLGWCLSSSDDELQPEMPQKQAEKVVIKKEKDISAPNDGTAQRTENHGAPACHRLKEEEDEYE

SEQ ID NO: 18406 - protein, 116 aa, Artificial Sequence
  Synthetic polypeptide
LLGRLRQGAANEPRYTCSEAQKAAHKRKISPVKFSNTDSVLPPKRQKSGSQEDLGWCLSSSDDELQPEMPQKQAEKVVIKKEKDISAPNDGTAQRTENHGAPACHRLKEEEDEYET

SEQ ID NO: 18407 - protein, 267 aa, Artificial Sequence
  Synthetic polypeptide
LLGRLRQGAANEPRYTCSEAQKAAHKRKISPVKFSNTDSVLPPKRQKSGSQEDLGWCLSSSDDELQPEMPQKQAEKVVIKKEKDISAPNDGTAQRTENHGAPACHRLKEEEDEYETSGEGQDIWDMLDKGNPFQFYLTRVSGVKPKYNSGALHIKDILSPLFGTLVSSAQFNYCFDVDWLVKQYPPEFRKKPILLVHGDKREAKAHLHAQAKPYENISLCQAKLDIAFGTHHTKMMLLLYEEGLRVVIHTSNLIHADWHQKTQGTHL

SEQ ID NO: 18408 - protein, 228 aa, Artificial Sequence
  Synthetic polypeptide
LLGRLRQGAANEPRYTCSEAQKAAHKRKISPVKFSNTDSVLPPKRQKSGSQEDLGWCLSSSDDELQPEMPQKQAEKVVIKKEKDISAPNDGTAQRTENHGAPACHRLKEEEDEYETSGEGQDIWDMLDKGNPFQFYLTRVSGVKPKYNSGALHIKDILSPLFGTLVSSAQFNYCFDVDWLVKQYPPEFRKKPILLVHGDKREAKAHLHAQAKPYENISLCQENDAAAL

SEQ ID NO: 18409 - protein, 130 aa, Artificial Sequence
  Synthetic polypeptide
LLGRLRQGAANEPRYTCSEAQKAAHKRKISPVKFSNTDSVLPPKRQKSGSQEDLGWCLSSSDDELQPEMPQKQAEKVVIKKEKDISAPNDGTAQRTENHGAPACHRLKEEEDEYETSGEGQDIWDMLDKG

SEQ ID NO: 18410 - protein, 547 aa, Artificial Sequence
  Synthetic polypeptide
LLGRLRQGAANEPRYTCSEAQKAAHKRKISPVKFSNTDSVLPPKRQKSGSQEDLGWCLSSSDDELQPEMPQKQAEKVVIKKEKDISAPNDGTAQRTENHGAPACHRLKEEEDEYETSGEGQDIWDMLDKGNPFQFYLTRVSGVKPKYNSGALHIKDILSPLFGTLVSSAQFNYCFDVDWLVKQYPPEFRKKPILLVHGDKREAKAHLHAQAKPYENISLCQAKLDIAFGTHHTKMMLLLYEEGLRVVIHTSNLIHADWHQKTQGIWLSPLYPRIADGTHKSGESPTHFKADLISYLMAYNAPSLKEWIDVIHKHDLSETNVYLIGSTPGRFQGSQKDNWGHFRLKKLLKDHASSMPNAESWPVVGQFSSVGSLGADESKWLCSEFKESMLTLGKESKTPGKSSVPLYLIYPSVENVRTSLEGYPAGGSLPYSIQTAEKQNWLHSYFHKWSAETSGRSNAMPHIKTYMRPSPDFSKIAWFLVTSANLSKAAWGALEKNGTQLMIRSYELGVLFLPSAFIGHGYGTFLMSKHRIRMGTCGCPPENLEAL

SEQ ID NO: 18411 - protein, 21 aa, Artificial Sequence
  Synthetic polypeptide
LLGRLRYFISFIWDACFFSSV

SEQ ID NO: 18412 - protein, 38 aa, Artificial Sequence
  Synthetic polypeptide
WWMPVILAPREAKIFYLLYLGRLFLQLSLTTALTWTGS

SEQ ID NO: 18413 - protein, 32 aa, Artificial Sequence
  Synthetic polypeptide
GQVWWLTPVIPAFWEAERGGSQASERPCLIHA

SEQ ID NO: 18414 - protein, 225 aa, Artificial Sequence
  Synthetic polypeptide
SQHFGRLRGADHKLLKDHASSMPNAESWPVVGQFSSVGSLGADESKWLCSEFKESMLTLGKESKTPGKSSVPLYLIYPSVENVRTSLEGYPAGGSLPYSIQTAEKQNWLHSYFHKWSAETSGRSNAMPHIKTYMRPSPDFSKIAWFLVTSANLSKAAWGALEKNGTQLMIRSYELGVLFLPSAFAPAKRIKDEVEASFSGSRQFQSETEVLRWQPGANGHLSCAI

SEQ ID NO: 18415 - protein, 7 aa, Artificial Sequence
  Synthetic polypeptide
EGRITSF

SEQ ID NO: 18416 - protein, 244 aa, Artificial Sequence
  Synthetic polypeptide
SQHFGRLRGADHKLLKDHASSMPNAESWPVVGQFSSVGSLGADESKWLCSEFKESMLTLGKESKTPGKSSVPLYLIYPSVENVRTSLEGYPAGGSLPYSIQTAEKQNWLHSYFHKWSAETSGRSNAMPHIKTYMRPSPDFSKIAWFLVTSANLSKAAWGALEKNGTQLMIRSYELGVLFLPSAFGLDSFKVKQKFFAGSQEPMATFPVPYDLPPELYGSKDRPWIWNIPYVKAPDTHGNMWVPS

SEQ ID NO: 18417 - protein, 214 aa, Artificial Sequence
  Synthetic polypeptide
SQHFGRLRGADHKLLKDHASSMPNAESWPVVGQFSSVGSLGADESKWLCSEFKESMLTLGKESKTPGKSSVPLYLIYPSVENVRTSLEGYPAGGSLPYSIQTAEKQNWLHSYFHKWSAETSGRSNAMPHIKTYMRPSPDFSKIAWFLVTSANLSKAAWGALEKNGTQLMIRSYELGVLFLPSAFIGHGYGTFLMSKHRIRMGTCGCPPENLEAL

SEQ ID NO: 18418 - protein, 276 aa, Artificial Sequence
  Synthetic polypeptide
SQHFGRLRGADHKLLKDHASSMPNAESWPVVGQFSSVGSLGADESKWLCSEFKESMLTLGKESKTPGKSSVPLYLIYPSVENVRTSLEGYPAGGSLPYSIQTAEKQNWLHSYFHKWSAETSGRSNAMPHIKTYMRPSPDFSKIAWFLVTSANLSKAAWGALEKNGTQLMIRSYELGVLFLPSAFGLDSFKVKQKFFAGSQEPMATFPVPYDLPPELYGSKGETQIKENHGWICIRKTNRAQEKPLVSVGSWLMEPSGSSSLQRALCQPVWGLVATG

SEQ ID NO: 18419 - protein, 867 aa, Artificial Sequence
  Synthetic polypeptide
APPPVRSAAALESHRSTNPAVNYACEGSRLHTPYENLMPVSYHPQMGPSSCRKTSSGLPLILHDDDMAELLLGESKLEQYLKEHPLRQGASPRGPKPQLTEVRKHLTAALDRGNLKSEFLQESNLIMAKLNYVEGDYKEALNIYARVGLDDLPLTAVPPYRLRVIAEAYATKGLCLEKLPISSSTSNLHVDREQDVITCYEKAGDIALLYLQEIERVILSNIQNRSPKPGPAPHDQELGFFLETGLQRAHVLYFKNGNLTRGVGRFRELLRAVETRTTQNLRMTIARQLAEILLRGMCEQSYWNPLEDPPCQSPLDDPLRKGANTKTYTLTRRARVYSGENIFCPQENTEEALLLLLISESMANRDAVLSRIPEHKSDRLISLQSASVVYDLLTIALGRRGQYEMLSECLERAMKFAFEEFHLWYQFALSLMAAGKSARAVKVLKECIRLKPDDATIPLLAAKLCMGSLHWLEEAEKFAKTVVDVGEKTSEFKAKGYLALGLTYSLQATDASLRGMQEVLQRKALLAFQRAHSLSPTDHQAAFYLALQLAISRQIPEALGYVRQALQLQGDDANSLHLLALLLSAQKHYHDALNIIDMALSEYPENFILLFSKVKLQSLCRGPDEALLTCKHMLQIWKSCYNLTNPSDSGRGSSLLDRTIADRRQLNTITLPDFSDPETGSVHATSVAASRVEQALSEVASSLQSSAPKQGPLHPWMTLAQIWLHAAEVYIGIGKPAEATACTQEAANLFPMSHNVLYMRGQIAELRGSMDEARRWYEEALAISPTHVKSMQRLALILHQLGRYSLAEKILRDAVQVNSTAHEVWNGLGEVLQAQGNDAAATECFLTALELEASSPAVPFTIIPRVL

SEQ ID NO: 18420 - protein, 20 aa, Artificial Sequence
  Synthetic polypeptide
FYMMMTWQSFSSGSRSWSST

SEQ ID NO: 18421 - protein, 884 aa, Artificial Sequence
  Synthetic polypeptide
APPPVRSAAALESHRSTNPAVNYACEGSRLHTPYENLMPVSYHPQMGPSSCRKTSSGLPLILHDDDMAELLLGESKLEQYLKEHPLRQGASPRGPKPQLTEVRKHLTAALDRGNLKSEFLQESNLIMAKLNYVEGDYKEALNIYARVGLDDLPLTAVPPYRLRVIAEAYATKGLCLEKLPISSSTSNLHVDREQDVITCYEKAGDIALLYLQEIERVILSNIQNRSPKPGPAPHDQELGFFLETGLQRAHVLYFKNGNLTRGVGRFRELLRAVETRTTQNLRMTIARQLAEILLRGMCEQSYWNPLEDPPCQSPLDDPLRKGANTKTYTLTRRARVYSGENIFCPQENTEEALLLLLISESMANRDAVLSRIPEHKSDRLISLQSASVVYDLLTIALGRRGQYEMLSECLERAMKFAFEEFHLWYQFALSLMAAGKSARAVKVLKECIRLKPDDATIPLLAAKLCMGSLHWLEEAEKFAKTVVDVGEKTSEFKAKGYLALGLTYSLQATDASLRGMQEVLQRKALLAFQRAHSLSPTDHQAAFYLALQLAISRQIPEALGYVRQALQLQGDDANSLHLLALLLSAQKHYHDALNIIDMALSEYPENFILLFSKVKLQSLCRGPDEALLTCKHMLQIWKSCYNLTNPSDSGRGSSLLDRTIADRRQLNTITLPDFSDPETGNSPEAYFHGFPSLFSVSSVHATSVAASRVEQALSEVASSLQSSAPKQGPLHPWMTLAQIWLHAAEVYIGIGKPAEATACTQEAANLFPMSHNVLYMRGQIAELRGSMDEARRWYEEALAISPTHVKSMQRLALILHQLGRYSLAEKILRDAVQVNSTAHEVWNGLGEVLQAQGNDAAATECFLTALELEASSPAVPFTIIPRVL

SEQ ID NO: 18422 - protein, 54 aa, Artificial Sequence
  Synthetic polypeptide
LLLRCESRGNTPFRTVGNQRAFQTCLRGCHGVSPRGGSSVLAFSADQSRSCQQL

SEQ ID NO: 18423 - protein, 410 aa, Artificial Sequence
  Synthetic polypeptide
WWGETPTNLVTGVFCVDDCYCGVRAEETHHLELLGIKELSKPAYGDAMVCPPGEVPVFWPSPLTSLGAVSSCETPLAFASIPGCTVMTDLKDAKAPPGCLTPERIPEVHHISQDPLHYSIASVSASQKIRELESMIGIDPGNRGIGHLLCKDELLKASLSLSHARSVLITTGFPTHFNHEPPEETDGPPGAVALVAFLQALEKEVAIIVDQRAWNLHQKIVEDAVEQGVLKTQIPILTYQGGSVEAAQAFLCKNGDPQTPRFDHLVAIERAGRAADGNYYNARKMNIKHLVDPIDDLFLAAKKIPGISSTGVSNWGGYALACALYILYSCAVHSQYLRKAVGPSRAPGDQAWTQALPSVIKEEKMLGILVQHKVRSGVSGIVGMEVDGLPFHNTHAEMIQKLVDVTTAQV

SEQ ID NO: 18424 - protein, 450 aa, Artificial Sequence
  Synthetic polypeptide
WWGETPTNLVTGVFCVDDCYCGVRAEETHHLELLGIKELSKPAYGDAMVCPPGEVPVFWPSPLTSLGAVSSCETPLAFASIPGCTVMTDLKDAKAPPGCLTPERIPEVHHISQDPLHYSIASVSASQKIRELESMIGIDPGNRGIGHLLCKDELLKASLSLSHARSVLITTGFPTHFNHEPPEETDGPPGAVALVAFLQALEKEVAIIVDQRAWNLHQKIVEDAVEQGVLKTQIPILTYQGGSVEAAQAFLCKNGDPQTPRFDHLVAIERAGRAADGNYYNARKMNIKHLVDPIDDLFLAAKKIPGISSTGVGDGGNELGMGKVKEAVRRHIRHGDVIACDVEADFAVIAGVSNWGGYALACALYILYSCAVHSQYLRKAVGPSRAPGDQAWTQALPSVIKEEKMLGILVQHKVRSGVSGIVGMEVDGLPFHNTHAEMIQKLVDVTTAQV

SEQ ID NO: 18425 - protein, 260 aa, Artificial Sequence
  Synthetic polypeptide
WWGETPTNLVTGVFCVDDCYCGVRAEETHHLELLGIKELSKPAYGDAMVCPPGEVPVFWPSPLTSLGAVSSCETPLAFASIPGCTVMTDLKDAKAPPGCLTPERIPEVHHISQDPLHYSIASVSASQKIRELESMIGIDPGNRGIGHLLCKDELLKASLSLSHARSVLITTGFPTHFNHEPPEETDGPPGAVALVAFLQALEKEVAIIVDQRAWNLHQKIVEDAVEQGVLKTQIPILTYQGGSVEAAQAFLCKNGDPQTP

SEQ ID NO: 18426 - protein, 408 aa, Artificial Sequence
  Synthetic polypeptide
WWGETPTNLVTGVFCVDDCYCGVRAEETHHLELLGIKELSKPAYGDAMVCPPGEVPVFWPSPLTSLGAVSSCETPLAFASIPGCTVMTDLKDAKAPPGCLTPERIPEVHHISQDPLHYSIASVSASQKIRELESMIGIDPGNRGIGHLLCKDELLKASLSLSHARSVLITTGFPTHFNHEPPEETDGPPGAVALVAFLQALEKEVAIIVDQRAWNLHQKIVEDAVEQGVLKTQIPILTYQGGSVEAAQAFLCKNGDPQTPRFDHLVAIERAGRAADGNYYNARKMNIKHLVDPIDDLFLAAKKIPGISSTGVGDGGNELGMGKVKEAVRRHIRHGDVIACDVEADFAVIAGVSNWGGYALACALYILYSCAVHSQYLRKAVGPSRAPGDQAWTQALPSVIKESKGRKL

SEQ ID NO: 18427 - protein, 433 aa, Artificial Sequence
  Synthetic polypeptide
WWGETPTNLVTGVFCVDDCYCGVRAEETHHLELLGIKELSKPAYGDAMVCPPGEVPVFWPSPLTSLGAVSSCETPLAFASIPGCTVMTDLKDAKAPPGCLTPERIPEVHHISQDPLHYSIASVSASQKIRELESMIGIDPVLITTGFPTHFNHEPPEETDGPPGAVALVAFLQALEKEVAIIVDQRAWNLHQKIVEDAVEQGVLKTQIPILTYQGGSVEAAQAFLCKNGDPQTPRFDHLVAIERAGRAADGNYYNARKMNIKHLVDPIDDLFLAAKKIPGISSTGVGDGGNELGMGKVKEAVRRHIRHGDVIACDVEADFAVIAGEHSDGRPVRPATQGVSNWGGYALACALYILYSCAVHSQYLRKAVGPSRAPGDQAWTQALPSVIKVTNPSQPLAWKQLLPWMSSRPEVPSRKPRAGTLLPLKSQRQSQP

SEQ ID NO: 18428 - protein, 23 aa, Artificial Sequence
  Synthetic polypeptide
GRPDPSDHFPSSLTLGEQREKAL

SEQ ID NO: 18429 - protein, 9 aa, Artificial Sequence
  Synthetic polypeptide
LWESKGRKL

SEQ ID NO: 18430 - protein, 11 aa, Artificial Sequence
  Synthetic polypeptide
FDFGRAKGESS

SEQ ID NO: 18431 - protein, 14 aa, Artificial Sequence
  Synthetic polypeptide
DQPGQHGEQREKAL

SEQ ID NO: 18432 - protein, 18 aa, Artificial Sequence
  Synthetic polypeptide
AQKFETSLDNMESKGRKL

SEQ ID NO: 18433 - protein, 36 aa, Artificial Sequence
  Synthetic polypeptide
LMPIISALWEAKAGGSPEPRSLRPAWTTWRAKGESS

SEQ ID NO: 18434 - protein, 57 aa, Artificial Sequence
  Synthetic polypeptide
ATQKTGDFCISIRGENFWPVWKRQPGQPDYVHGFSGRHLFEPNYAANRSQAHKSTHQ

SEQ ID NO: 18435 - protein, 2040 aa, Artificial Sequence
  Synthetic polypeptide
GRSQDGRIGTAPVYRSQRERHRRRVISAFPSEVKTFGPFGSGSQDNLTMYMDLVDGIFLNQIMLQIDPRPTNQRINKHVNNDVNLRIQNLTILVRNIKTYYQEVLQQLIVMNLPNVLMIGRDPLSGKSMEEIKKVLLLVLGCAVQCERKEEFIERIKQLDIETQAGIVAHIQEVTHNQENVFDLQWLELPDVAPEELEALSRSMVLHLRRLIDQRDECTELIVDLTQERDYLQAQHPPSPIKSSSADSTPSPTSSLSSEDKQHLAVELADTKARLRRVRQELEDKTEQLVDTRHEVDQLVLELQKVKQENIQLAADARSARAYRDELDSLREKANRVERLELELTRCKEKLHDVDFYKARMEELREDNIILIETKAMLEEQLTAARARGDKVHELEKENLQLKSKLHDLELDRDTDKKRIEELLEENMVLEIAQKQSMNESAHLGWELEQLSKNADLSDASRKSFVFELNECASSRILKLEKENQSLQSTIQGLRDASLVLEESGLKCGELEKENHQLSKKIEKLQTQLEREKQSNQDLETLSEELIREKEQLQSDMETLKADKARQIKDLEQEKDHLNRAMWSLRERSQVSSEARMKDVEKENKALHQTVTEANGKLSQLEFEKRQLHRDLEQAKEKGERAEKLERELQRLQEENGRLARKVTSLETATEKVEALEHESQGLQLENRTLRKSLDTLQNVSLQLEGLERDNKQLDAENLELRRLVETMRFTSTKLAQMERENQQLEREKEELRKNVDLLKALGKKSERLELSYQSVSAENLRLQQSLESSSHKTQTLESELGELEAERQALRRDLEALRLANAQLEGAEKDRKALEQEVAQLEKDKKLLEKEAKRLWQQVELKDAVLDDSTAKLSAVEKESRALDKELARCRDAAGKLKELEKDNRDLTKQVTVHARTLTTLREDLVLEKLKSQQLSSELDKLSQELEKVGLNRELLLQEDDSGSDTKYKILEGRNESALKTTLAMKEEKIVLLEAQMEEKASLNRQLESELQMLKKECETLRQNQGEGQHLQNSFKHPAGKTAASHQGKEAWGPGHKEATMELLRVKDRAIELERNNAALQAEKQLLKEQLQHLETQNVTFSSQILTLQKQSAFLQEHNTTLQTQTAKLQVENSTLSSQSAALTAQYTLLQNHHTAKETENESLQRQQEQLTAAYEALLQDHEHLGTLHERQSAEYEALIRQHSCLKTLHRNLELEHKELGERHGDMLKRKAELEEREKVLTTEREALQQEQRTNALAMGENQRLRGELDRVNFLHHQLKGEYEELHAHTKELKTSLNNAQLELNRWQARFDELKEQHQTMDISLTKLDNHCELLSRLKGNLEEENHHLLSQIQLLSQQNQMLLEQNMENKEQYHEEQKQYIDKLNALRRHKEKLEEKIMDQYKFYDPPPKKKNHWIGAKALVKLIKPKKEGSRERLKSTVDSPPWQLESSDPASPAASQPLRSQAENPDTPALGSNCAEERDAHNGSVGKGPGDLKPKRGSPHRGSLDRTDASTDLAMRSWPSELGSRTCSTSATTTAPSNSTPIARHPGRTKGYNSDDNLCEPSLEFEVPNHRQYVSRPSSLESSRNTSSNSSPLNLKGSSEQLHGRSESFSSEDLIPSRDLATLPREASTPGRNALGRHEYPLPRNGPLPQEGAQKRGTAPPYVGVRPCSASPSSEMVTLEEFLEESNRSSPTHDTPSCRDDLLSDYFRKASDPPAIGGQPGPPAKKEGAKMPTNFVAPTVKMAAPTSEGRPLKPGQYVKPNFRLTEAEAPPSVAPRQAQPPQSLSLGRPRQAPVPPASHAPASRSASLSRAFSLASADLLRASGPEACKQESPQKLGAPEALGGRETGSHTLQSPAPPSSHSLARERTPLVGKAGSSCQGPGPRSRPLDTRRFSLAPPKEERLAPLHQSATAPAIATAGAGAAAAGSGSNSQLLHFSPAAAPAARTKPKAPPRSGEVATITPVRAGLSLSEGDGVPGQGCSEGLPAKSPGRSPDLAPHLGRALEDCSRGSVSKSSPASPEPGGDPQTVWYEYGCV

SEQ ID NO: 18436 - protein, 7 aa, Artificial Sequence
  Synthetic polypeptide
FLHFHQR

SEQ ID NO: 18437 - protein, 108 aa, Artificial Sequence
  Synthetic polypeptide
GRSQDGRIGTAPVYRSQRERHRRRVISAFPSEVKTFGPFGSGSQDNLTMYMDLVDGIFLNQIMLQIDPRPTNQRINKHVNNDVNLRIQNLTILVRNIKTYYQDRPFFR

SEQ ID NO: 18438 - protein, 21 aa, Artificial Sequence
  Synthetic polypeptide
HMPVIPVTPEAETGESFAPGR

SEQ ID NO: 18439 - protein, 530 aa, Artificial Sequence
  Synthetic polypeptide
SQLLQRLRQENHLHLEDEKFLTDLFAQLTDEATDEEKRQELVNFLKEFCAFSQTLQPQNRDAFFKTLSNMGILPALEVILGMDDTQVRSAATDIFSYLVEYNPSMVREFVMQEAQQNDDDILLINLIIEHMICDTDPELGGAVQLMGLLRTLVDPENMLATANKTEKTEFLGFFYKHCMHVLTAPLLANTTEDKPSKDDFQTAQLLALVLELLTFCVEHHTYHIKNYIINKDILRRVLVLMASKHAFLALCALRFKRKIIGLKDEFYNRYIMKSFLFEPVVKAFLNNGSRYNLMNSAIIEMFEFIRVEDIKSLTAHVIENYWKALEDVDYVQTFKGLKLRFEQQRERQDNPKLDSMRSILRNHRYRRDARTLEDEEEMWFNTDEDDMEDGEAVVSPSDKTKNDDDIMDPISKFMERKKLKESEEKEVLLKTNLSGRQSPSFKLSLSSGTKTNLTSQSSTTNLPGSPGSPGSPGSPGSPGSVPKNTSQTAAITTKGGLVGLVDYPDDDEDDDEDEDKEDTLPLSKKAKFDS

SEQ ID NO: 18440 - protein, 13 aa, Artificial Sequence
  Synthetic polypeptide
DRRIICTWKMKNF

SEQ ID NO: 18441 - protein, 543 aa, Artificial Sequence
  Synthetic polypeptide
SQLLQRLRQENHLHLEDEKFLTDLFAQLTDEATDEEKRQELVNFLKEFCAFSQTLQPQNRDAFFKTLSNMGILPALEVILGMDDTQVRSAATDIFSYLVEYNPSMVREFVMQEAQQNDDVSKKLTEQKITSKDILLINLIIEHMICDTDPELGGAVQLMGLLRTLVDPENMLATANKTEKTEFLGFFYKHCMHVLTAPLLANTTEDKPSKDDFQTAQLLALVLELLTFCVEHHTYHIKNYIINKDILRRVLVLMASKHAFLALCALRFKRKIIGLKDEFYNRYIMKSFLFEPVVKAFLNNGSRYNLMNSAIIEMFEFIRVEDIKSLTAHVIENYWKALEDVDYVQTFKGLKLRFEQQRERQDNPKLDSMRSILRNHRYRRDARTLEDEEEMWFNTDEDDMEDGEAVVSPSDKTKNDDDIMDPISKFMERKKLKESEEKEVLLKTNLSGRQSPSFKLSLSSGTKTNLTSQSSTTNLPGSPGSPGSPGSPGSPGSVPKNTSQTAAITTKGGLVGLVDYPDDDEDDDEDEDKEDTLPLSKKAKFDS

SEQ ID NO: 18442 - protein, 250 aa, Artificial Sequence
  Synthetic polypeptide
SQLLQRLRQENHLHLEDEKFLTDLFAQLTDEATDEEKRQELVNFLKEFCAFSQTLQPQNRDAFFKTLSNMGILPALEVILGMDDTQVRSAATDIFSYLVEYNPSMVREFVMQEAQQNDDDILLINLIIEHMICDTDPELGGAVQLMGLLRTLVDPENMLATANKTEKTEFLGFFYKHCMHVLTAPLLANTTEDKPSKDDFQTAQLLALVLELLTFCVEHHTYHIKNYIINKDILRRVLVLMASKHAFLAL

SEQ ID NO: 18443 - protein, 416 aa, Artificial Sequence
  Synthetic polypeptide
SQLLQRLRQENHLHLEDEKFLTDLFAQLTDEATDEEKRQELVNFLKEFCAFSQTLQPQNRDAFFKTLSNMGILPALEVILGMDDTQVRSAATDIFSYLVEYNPSMVREFVMQEAQQNDDDILLINLIIEHMICDTDPELGGAVQLMGLLRTLVDPENMLATANKTEKTEFLGFFYKHCMHVLTAPLLANTTEDKPSKDDFQTAQLLALVLELLTFCVEHHTYHIKNYIINKDILRRVLVLMASKHAFLALCALRFKRKIIGLKDEFYNRYIMKSFLFEPVVKAFLNNGSRYNLMNSAIIEMFEFIRVEDIKSLTAHVIENYWKALEDVDYVQTFKGLKLRFEQQRERQDNPKLDSMRSILRNHRYRRDARTLEDEEEMWFNTDEDDMEDGEAVVSPSDKTKNDDDIMDPISKFMER

SEQ ID NO: 18444 - protein, 139 aa, Artificial Sequence
  Synthetic polypeptide
SQLLQRLRQENHLHLEDEKFLTDLFAQLTDEATDEEKRQELVNFLKEFCAFSQTLQPQNRDAFFKTLSNMGILPALEVILGMDDTQVRSAATDIFSYLVEYNPSMVREFVMQEAQQNDDVSKKLTEQKITSKDILLINL

SEQ ID NO: 18445 - protein, 114 aa, Artificial Sequence
  Synthetic polypeptide
SQLLQRLRQENHLHLEDEKFLTDLFAQLTDEATDEEKRQELPQNRDAFFKTLSNMGILPALEVILGMDDTQVRSAATDIFSYLVEYNPSMVREFVMQEAQQNDDVSKKLTEQKI

SEQ ID NO: 18446 - protein, 45 aa, Artificial Sequence
  Synthetic polypeptide
HPSRRPQTYWIKNCKFKERTLPWTSLRTLWMNLKRSVLMICHRQA

SEQ ID NO: 18447 - protein, 53 aa, Artificial Sequence
  Synthetic polypeptide
MWPSNQQHKHDLGTDRNANSETSTPPADPRPTGSKTASSRKGPFRGHHSGPCG

SEQ ID NO: 18448 - protein, 758 aa, Artificial Sequence
  Synthetic polypeptide
CGPQTSSTSMTWELIEMQILRLAPLPPTPDLLDQKLQVQGKDPSVDITQDLVDESEEERFDDMSSPGLELPSCELSRLEEIAELVASSLPSPLRREKLALALENEGYIKKLLELFHVCEDLENIEGLHHLYEIIKGIFLLNRTALFEVMFSEECIMDVIGCLEYDPALSQPRKHREFLTKTAKFKEVIPISDPELKQKIHQTYRVQYIQDMVLPTPSVFEENMLSTLHSFIFFNKVEIVGMLQEDEKFLTDLFAQLTDEATDEEKRQELVNFLKEFCAFSQTLQPQNRDAFFKTLSNMGILPALEVILGMDDTQVRSAATDIFSYLVEYNPSMVREFVMQEAQQNDDDILLINLIIEHMICDTDPELGGAVQLMGLLRTLVDPENMLATANKTEKTEFLGFFYKHCMHVLTAPLLANTTEDKPSKDDFQTAQLLALVLELLTFCVEHHTYHIKNYIINKDILRRVLVLMASKHAFLALCALRFKRKIIGLKDEFYNRYIMKSFLFEPVVKAFLNNGSRYNLMNSAIIEMFEFIRVEDIKSLTAHVIENYWKALEDVDYVQTFKGLKLRFEQQRERQDNPKLDSMRSILRNHRYRRDARTLEDEEEMWFNTDEDDMEDGEAVVSPSDKTKNDDDIMDPISKFMERKKLKESEEKEVLLKTNLSGRQSPSFKLSLSSGTKTNLTSQSSTTNLPGSPGSPGSPGSPGSPGSVPKNTSQTAAITTKGGLVGLVDYPDDDEDDDEDEDKEDTLPLSKKAKFDS

SEQ ID NO: 18449 - protein, 771 aa, Artificial Sequence
  Synthetic polypeptide
CGPQTSSTSMTWELIEMQILRLAPLPPTPDLLDQKLQVQGKDPSVDITQDLVDESEEERFDDMSSPGLELPSCELSRLEEIAELVASSLPSPLRREKLALALENEGYIKKLLELFHVCEDLENIEGLHHLYEIIKGIFLLNRTALFEVMFSEECIMDVIGCLEYDPALSQPRKHREFLTKTAKFKEVIPISDPELKQKIHQTYRVQYIQDMVLPTPSVFEENMLSTLHSFIFFNKVEIVGMLQEDEKFLTDLFAQLTDEATDEEKRQELVNFLKEFCAFSQTLQPQNRDAFFKTLSNMGILPALEVILGMDDTQVRSAATDIFSYLVEYNPSMVREFVMQEAQQNDDVSKKLTEQKITSKDILLINLIIEHMICDTDPELGGAVQLMGLLRTLVDPENMLATANKTEKTEFLGFFYKHCMHVLTAPLLANTTEDKPSKDDFQTAQLLALVLELLTFCVEHHTYHIKNYIINKDILRRVLVLMASKHAFLALCALRFKRKIIGLKDEFYNRYIMKSFLFEPVVKAFLNNGSRYNLMNSAIIEMFEFIRVEDIKSLTAHVIENYWKALEDVDYVQTFKGLKLRFEQQRERQDNPKLDSMRSILRNHRYRRDARTLEDEEEMWFNTDEDDMEDGEAVVSPSDKTKNDDDIMDPISKFMERKKLKESEEKEVLLKTNLSGRQSPSFKLSLSSGTKTNLTSQSSTTNLPGSPGSPGSPGSPGSPGSVPKNTSQTAAITTKGGLVGLVDYPDDDEDDDEDEDKEDTLPLSKKAKFDS

SEQ ID NO: 18450 - protein, 478 aa, Artificial Sequence
  Synthetic polypeptide
CGPQTSSTSMTWELIEMQILRLAPLPPTPDLLDQKLQVQGKDPSVDITQDLVDESEEERFDDMSSPGLELPSCELSRLEEIAELVASSLPSPLRREKLALALENEGYIKKLLELFHVCEDLENIEGLHHLYEIIKGIFLLNRTALFEVMFSEECIMDVIGCLEYDPALSQPRKHREFLTKTAKFKEVIPISDPELKQKIHQTYRVQYIQDMVLPTPSVFEENMLSTLHSFIFFNKVEIVGMLQEDEKFLTDLFAQLTDEATDEEKRQELVNFLKEFCAFSQTLQPQNRDAFFKTLSNMGILPALEVILGMDDTQVRSAATDIFSYLVEYNPSMVREFVMQEAQQNDDDILLINLIIEHMICDTDPELGGAVQLMGLLRTLVDPENMLATANKTEKTEFLGFFYKHCMHVLTAPLLANTTEDKPSKDDFQTAQLLALVLELLTFCVEHHTYHIKNYIINKDILRRVLVLMASKHAFLAL

SEQ ID NO: 18451 - protein, 644 aa, Artificial Sequence
  Synthetic polypeptide
CGPQTSSTSMTWELIEMQILRLAPLPPTPDLLDQKLQVQGKDPSVDITQDLVDESEEERFDDMSSPGLELPSCELSRLEEIAELVASSLPSPLRREKLALALENEGYIKKLLELFHVCEDLENIEGLHHLYEIIKGIFLLNRTALFEVMFSEECIMDVIGCLEYDPALSQPRKHREFLTKTAKFKEVIPISDPELKQKIHQTYRVQYIQDMVLPTPSVFEENMLSTLHSFIFFNKVEIVGMLQEDEKFLTDLFAQLTDEATDEEKRQELVNFLKEFCAFSQTLQPQNRDAFFKTLSNMGILPALEVILGMDDTQVRSAATDIFSYLVEYNPSMVREFVMQEAQQNDDDILLINLIIEHMICDTDPELGGAVQLMGLLRTLVDPENMLATANKTEKTEFLGFFYKHCMHVLTAPLLANTTEDKPSKDDFQTAQLLALVLELLTFCVEHHTYHIKNYIINKDILRRVLVLMASKHAFLALCALRFKRKIIGLKDEFYNRYIMKSFLFEPVVKAFLNNGSRYNLMNSAIIEMFEFIRVEDIKSLTAHVIENYWKALEDVDYVQTFKGLKLRFEQQRERQDNPKLDSMRSILRNHRYRRDARTLEDEEEMWFNTDEDDMEDGEAVVSPSDKTKNDDDIMDPISKFMER

SEQ ID NO: 18452 - protein, 88 aa, Artificial Sequence
  Synthetic polypeptide
CGPQTSSTSMTWELIEMQILRLAPLPPTPDLLDQKLQVQGKDPSVDITQDLVDESEEERFDDMSSPGLELPSCELSRLEEIAELVASS

SEQ ID NO: 18453 - protein, 17 aa, Artificial Sequence
  Synthetic polypeptide
EAKMSSDKKCWMMYKRN

SEQ ID NO: 18454 - protein, 8 aa, Artificial Sequence
  Synthetic polypeptide
SQHFERPR

SEQ ID NO: 18455 - protein, 242 aa, Artificial Sequence
  Synthetic polypeptide
PDVVAHTCNPSTLRGQDELRQEMLDDVQKKLMSLANSSEGKVDKVLMRNLFIGHFHTPKNQRHEVLRLMGSILGVRREEMEQLFHDDQGGVTRWMTGWLGGGSKSVPNTPLRPNQQSVVNSSFSELFVKFLETESHPSIPPPKLSVHDMKPLDSPGRRKRDTNAPESFKDTAESRSGRRTDVNPFLAPRSAAVPLINPAGLGPGGPGHLLLKPISDVLPTFTPLPALPDNSAGVVLKDLLKQ

SEQ ID NO: 18456 - protein, 12 aa, Artificial Sequence
  Synthetic polypeptide
ALDNSYSRGRIT

SEQ ID NO: 18457 - protein, 1957 aa, Artificial Sequence
  Synthetic polypeptide
CCLIALEAPWTITDAELWITLTVEAELPDSRTKEIEAIHAILRSENERLKKLCTDLEEKHEASEIQIKQQSTSYRNQLQQKEVEISHLKARQIALQDQLLKLQSAAQSVPSGAGVPATTASSSFAYGISHHPSAFHDDDMDFGDIISSQQEINRLSNEVSRLESEVGHWRHIAQTSKAQGTDNSDQSEICKLQNIIKELKQNRSQEIDDHQHEMSVLQNAHQQKLTEISRRHREELSDYEERIEELENLLQQGGSGVIETDLSKIYEMQKTIQVLQIEKVESTKKMEQLEDKIKDINKKLSSAENDRDILRREQEQLNVEKRQIMEECENLKLECSKLQPSAVKQSDTMTEKERILAQSASVEEVFRLQQALSDAENEIMRLSSLNQDNSLAEDNLKLKMRIEVLEKEKSLLSQEKEELQMSLLKLNNEYEVIKSTATRDISLDSELHDLRLNLEAKEQELNQSISEKETLIAEIEELDRQNQEATKHMILIKDQLSKQQNEGDSIISKLKQDLNDEKKRVHQLEDDKMDITKELDVQKEKLIQSEVALNDLHLTKQKLEDKVENLVDQLNKSQESNVSIQKENLELKEHIRQNEEELSRIRNELMQSLNQDSNSNFKDTLLKEREAEVRNLKQNLSELEQLNENLKKVAFDVKMENEKLVLACEDVRHQLEECLAGNNQLSLEKNTIVETLKMEKGEIEAELCWAKKRLLEEANKYEKTIEELSNARNLNTSALQLEHEHLIKLNQKKDMEIAELKKNIEQMDTDHKETKDVLSSSLEEQKQLTQLINKKEIFIEKLKERSSKLQEELDKYSQALRKNEILRQTIEEKDRSLGSMKEENNHLQEELERLREEQSRTAPVADPKTLDSVTELASEVSQLNTIKEHLEEEIKHHQKIIEDQNQSKMQLLQSLQEQKKEMDEFRYQHEQMNATHTQLFLEKDEEIKSLQKTIEQIKTQLHEERQDIQTDNSDIFQETKVQSLNIENGSEKHDLSKAETERLVKGIKERELEIKLLNEKNISLTKQIDQLSKDEVGKLTQIIQQKDLEIQALHARISSTSHTQDVVYLQQQLQAYAMEREKVFAVLNEKTRENSHLKTEYHKMMDIVAAKEAALIKLQDENKKLSTRFESSGQDMFRETIQNLSRIIREKDIEIDALSQKCQTLLAVLQTSSTGNEAGGVNSNQFEELLQERDKLKQQVKKMEEWKQQVMTTVQNMQHESAQLQEELHQLQAQVLVDSDNNSKLQVDYTGLIQSYEQNETKLKNFGQELAQVQHSIGQLCNTKDLLLGKLDIISPQLSSASLLTPQSAECLRASKSEVLSESSELLQQELEELRKSLQEKDATIRTLQENNHRLSDSIAATSELERKEHEQTDSEIKQLKEKQDVLQKLLKEKDLLIKAKSDQLLSSNENFTNKVNENELLRQAVTNLKERILILEMDIGKLKGENEKIVETYRGKETEYQALQETNMKFSMMLREKEFECHSMKEKALAFEQLLKEKEQGKTGELNQLLNAVKSMQEKTVVFQQERDQVMLALKQKQMENTALQNEVQRLRDKEFRSNQELERLRNHLLESEDSYTREALAAEDREAKLRKKVTVLEEKLVSSSNAMENASHQASVQVESLQEQLNVVSKQRDETALQLSVSQEQVKQYALSLANLQMVLEHFQQEEKAMYSAELEKQKQLIAEWKKNAENLEGKVISLQECLDEANAALDSASRLTEQLDVKEEQIEELKRQNELRQEMLDDVQKKLMSLANSSEGKVDKVLMRNLFIGHFHTPKNQRHEVLRLMGSILGVRREEMEQLFHDDQGGVTRWMTGWLGGGSKSVPNTPLRPNQQSVVNSSFSELFVKFLETESHPSIPPPKLSVHDMKPLDSPGRRKRDTNAPESFKDTAESRSGRRTDVNPFLAPRSAAVPLINPAGLGPGGPGHLLLKPISDVLPTFTPLPALPDNSAGVVLKDLLKQ

SEQ ID NO: 18458 - protein, 18 aa, Artificial Sequence
  Synthetic polypeptide
RQNYLILGQRKLKPFMQS

SEQ ID NO: 18459 - protein, 51 aa, Artificial Sequence
  Synthetic polypeptide
FGAEDPGQEDSFRRRVPCPCPHSVRRSTYDLGSSDQPAQGTSHEFQIGRIT

SEQ ID NO: 18460 - protein, 1956 aa, Artificial Sequence
  Synthetic polypeptide
GDPPTTSGPQTNQPKEHLMNFKSAELPDSRTKEIEAIHAILRSENERLKKLCTDLEEKHEASEIQIKQQSTSYRNQLQQKEVEISHLKARQIALQDQLLKLQSAAQSVPSGAGVPATTASSSFAYGISHHPSAFHDDDMDFGDIISSQQEINRLSNEVSRLESEVGHWRHIAQTSKAQGTDNSDQSEICKLQNIIKELKQNRSQEIDDHQHEMSVLQNAHQQKLTEISRRHREELSDYEERIEELENLLQQGGSGVIETDLSKIYEMQKTIQVLQIEKVESTKKMEQLEDKIKDINKKLSSAENDRDILRREQEQLNVEKRQIMEECENLKLECSKLQPSAVKQSDTMTEKERILAQSASVEEVFRLQQALSDAENEIMRLSSLNQDNSLAEDNLKLKMRIEVLEKEKSLLSQEKEELQMSLLKLNNEYEVIKSTATRDISLDSELHDLRLNLEAKEQELNQSISEKETLIAEIEELDRQNQEATKHMILIKDQLSKQQNEGDSIISKLKQDLNDEKKRVHQLEDDKMDITKELDVQKEKLIQSEVALNDLHLTKQKLEDKVENLVDQLNKSQESNVSIQKENLELKEHIRQNEEELSRIRNELMQSLNQDSNSNFKDTLLKEREAEVRNLKQNLSELEQLNENLKKVAFDVKMENEKLVLACEDVRHQLEECLAGNNQLSLEKNTIVETLKMEKGEIEAELCWAKKRLLEEANKYEKTIEELSNARNLNTSALQLEHEHLIKLNQKKDMEIAELKKNIEQMDTDHKETKDVLSSSLEEQKQLTQLINKKEIFIEKLKERSSKLQEELDKYSQALRKNEILRQTIEEKDRSLGSMKEENNHLQEELERLREEQSRTAPVADPKTLDSVTELASEVSQLNTIKEHLEEEIKHHQKIIEDQNQSKMQLLQSLQEQKKEMDEFRYQHEQMNATHTQLFLEKDEEIKSLQKTIEQIKTQLHEERQDIQTDNSDIFQETKVQSLNIENGSEKHDLSKAETERLVKGIKERELEIKLLNEKNISLTKQIDQLSKDEVGKLTQIIQQKDLEIQALHARISSTSHTQDVVYLQQQLQAYAMEREKVFAVLNEKTRENSHLKTEYHKMMDIVAAKEAALIKLQDENKKLSTRFESSGQDMFRETIQNLSRIIREKDIEIDALSQKCQTLLAVLQTSSTGNEAGGVNSNQFEELLQERDKLKQQVKKMEEWKQQVMTTVQNMQHESAQLQEELHQLQAQVLVDSDNNSKLQVDYTGLIQSYEQNETKLKNFGQELAQVQHSIGQLCNTKDLLLGKLDIISPQLSSASLLTPQSAECLRASKSEVLSESSELLQQELEELRKSLQEKDATIRTLQENNHRLSDSIAATSELERKEHEQTDSEIKQLKEKQDVLQKLLKEKDLLIKAKSDQLLSSNENFTNKVNENELLRQAVTNLKERILILEMDIGKLKGENEKIVETYRGKETEYQALQETNMKFSMMLREKEFECHSMKEKALAFEQLLKEKEQGKTGELNQLLNAVKSMQEKTVVFQQERDQVMLALKQKQMENTALQNEVQRLRDKEFRSNQELERLRNHLLESEDSYTREALAAEDREAKLRKKVTVLEEKLVSSSNAMENASHQASVQVESLQEQLNVVSKQRDETALQLSVSQEQVKQYALSLANLQMVLEHFQQEEKAMYSAELEKQKQLIAEWKKNAENLEGKVISLQECLDEANAALDSASRLTEQLDVKEEQIEELKRQNELRQEMLDDVQKKLMSLANSSEGKVDKVLMRNLFIGHFHTPKNQRHEVLRLMGSILGVRREEMEQLFHDDQGGVTRWMTGWLGGGSKSVPNTPLRPNQQSVVNSSFSELFVKFLETESHPSIPPPKLSVHDMKPLDSPGRRKRDTNAPESFKDTAESRSGRRTDVNPFLAPRSAAVPLINPAGLGPGGPGHLLLKPISDVLPTFTPLPALPDNSAGVVLKDLLKQ

SEQ ID NO: 18461 - protein, 21 aa, Artificial Sequence
  Synthetic polypeptide
ISNRQNYLILGQRKLKPFMQS

SEQ ID NO: 18462 - protein, 19 aa, Artificial Sequence
  Synthetic polypeptide
LQLLRRLRELQPSEEVTWK

SEQ ID NO: 18463 - protein, 45 aa, Artificial Sequence
  Synthetic polypeptide
WGHKFETSLGNIARSCLYKKKCLKNFFKLAPVAPASQKIEGIATQ

SEQ ID NO: 18464 - protein, 394 aa, Artificial Sequence
  Synthetic polypeptide
LHLHEGSRRARFIEVDQRYNVKMQAFFTVKQKSIANGNPVNSELEAGNDFYDGSYDDPSVPLLGQVKEKPQYGKNPVVMVDEIMSSSPPKFTFPEAGLRIMITNKFGPRTRLRMASRIIINERQRLINSANGVSSKPLQNGRHENIENGNVPVENPEDPQQNQEQQPPPQPPPPEPEPVEADFLSPFSVPEARGDKVKWVFTWPLIFLLCVTIPNCSKPRWEKFFMVTFITATLWIAVFSYIMVWLVTIIGYTLGIPDVIMGITFLAAGTSVPDCMASLIVARQGLGDMAVSNTIGSNVFDILVGLGVPWGLQTMVVNYGSTVKINSRGLVYSVVLLLGSVALTVLGIHLNKWRLDRKLGVYVLVLYAIFLCFSIMIEFNVFTFVNLPMCREDD

SEQ ID NO: 18465 - protein, 7 aa, Artificial Sequence
  Synthetic polypeptide
RWTRGTM

SEQ ID NO: 18466 - protein, 29 aa, Artificial Sequence
  Synthetic polypeptide
KSQIHRGGPEVQCEDASLFHSQTKEHCKR

SEQ ID NO: 18467 - protein, 375 aa, Artificial Sequence
  Synthetic polypeptide
LHLHEGSRRARFIEVDQRYNVKMQAFFTVKQKSIANGNPVNSELEAVKEKPQYGKNPVVMVDEIMSSSPPKFTFPEAGLRIMITNKFGPRTRLRMASRIIINERQRLINSANGVSSKPLQNGRHENIENGNVPVENPEDPQQNQEQQPPPQPPPPEPEPVEADFLSPFSVPEARGDKVKWVFTWPLIFLLCVTIPNCSKPRWEKFFMVTFITATLWIAVFSYIMVWLVTIIGYTLGIPDVIMGITFLAAGTSVPDCMASLIVARQGLGDMAVSNTIGSNVFDILVGLGVPWGLQTMVVNYGSTVKINSRGLVYSVVLLLGSVALTVLGIHLNKWRLDRKLGVYVLVLYAIFLCFSIMIEFNVFTFVNLPMCREDD

SEQ ID NO: 18468 - protein, 351 aa, Artificial Sequence
  Synthetic polypeptide
LHLHEGSRRARFIEVDQRYNVKMQAFFTVKQKSIANGNPVNSELEAVKEKPQYGKNPVVMVDEIMSSSPPKFTFPEAGLRIMITNKFGPRTRLRMASRIIINERQRLINSANGVSSKPLQNGRHENIENGNVPVENPEDPQQNQEQQPPPQPPPPEPEPVEADFLSPFSVPEARGDKVKWVFTWPLIFLLCVTIPNCSKPRWEKFFMVTFITATLWIAVFSYIMVWLVTIIGYTLGIPDVIMGITFLAAGTSVPDCMASLIVARQGLGDMAVSNTIGSNVFDILVGLGVPWGLQTMVVNYGSTVKINSRGLVYSVVLLLGSVALTCSSEVPGIQPQEALIEGQGGRQWKER

SEQ ID NO: 18469 - protein, 57 aa, Artificial Sequence
  Synthetic polypeptide
KHTLFYCISLYCSLQILHFYQIESLWQPCIKQVCPHHFSNSICSLHVCVTFCLPIKL

SEQ ID NO: 18470 - protein, 54 aa, Artificial Sequence
  Synthetic polypeptide
STPCFIAFLFIAVCRYCIFTKLKVYGNPASSKSVHTIFPTAYAHFMSVSHFAYQ

SEQ ID NO: 18471 - protein, 187 aa, Artificial Sequence
  Synthetic polypeptide
KFMATLHQASLSTPFFQQHMLTSCLCHILLTNKTLSNSSQSELENRLHQLTETLIQKQTMLESLSTEKNSLVFQLERLEQQMNSASGSSSNGSSINMSGIDNGEGTRLRNVPVLFNDTETNLAGMYGKVRKAASSIDQFSIRLGIFLRRYPIARVFVIIYMALLHLWVMIVLLTYTPEMHHDQPYGK

SEQ ID NO: 18472 - protein, 147 aa, Artificial Sequence
  Synthetic polypeptide
KFMATLHQASLSTPFFQQHMLTSCLCHILLTNKTLSNSSQSELENRLHQLTETLIQKQTMLESLSTEKNSLVFQLERLEQQMNSASGSSSNGSSINMSGIDNGEGTRLRNVPVLFNDTETNLAGMYGKVRKAASSIDQFRLCFTSGS

SEQ ID NO: 18473 - protein, 7 aa, Artificial Sequence
  Synthetic polypeptide
MAVRSEP

SEQ ID NO: 18474 - protein, 378 aa, Artificial Sequence
  Synthetic polypeptide
WLCDLNLSRPIEEQGPLDVIIHKLTDVILEADQNDSQSLELVHRFQEYIDAHPETIVLDPLPAIRTLLDRSKSYELIRKIEAYMEDDRICSPPFMELTSLCGDDTMRLLEKNGLTFPFICKTRVAHGTNSHEMAIVFNQEGLNAIQPPCVVQNFINHNAVLYKVFVVGESYTVVQRPSLKNFSAGTSDRESIFFNSHNVSKPESSSVLTELDKIEGVFERPSDEVIRELSRALRQALGVSLFGIDIIINNQTGQHAVIDINAFPGYEGVSEFFTDLLNHIATVLQGQSTAMAATGDVALLRHSKLLAEPAGGLVGERTCSASPGCCGSMMGQDAPWKAEADAGGTAKLPHQRLGCNAGVSPSFQQHCVASLATKASSQ

SEQ ID NO: 18475 - protein, 4 aa, Artificial Sequence
  Synthetic polypeptide
GCAI

SEQ ID NO: 18476 - protein, 278 aa, Artificial Sequence
  Synthetic polypeptide
WLCDLNLSRPIEEQGPLDVIIHKLTDVILEADQNDSQSLELVHRFQEYIDAHPETIVLDPLPAIRTLLDRSKSYELIRKIEAYMEDDRICSPPFMELTSLCGDDTMRLLEKNGLTFPFICKTRVAHGTNSHEMAIVFNQEGLNAIQPPCVVQNFINHNAVLYKVFVVGESYTVVQRPSLKNFSAGTSDRESIFFNSHNVSKPESSSVLTELDKIEGVFERPSDEVIRELSRALRQALGVSLFGIDIIINNQTGQHAVIDINAFPGDCQVCFIEGWKTD

SEQ ID NO: 18477 - protein, 176 aa, Artificial Sequence
  Synthetic polypeptide
WLCDLNLSRPIEEQGPLDVIIHKLTDVILEADQNDSQSLELVHRFQEYIDAHPETIVLDPLPAIRTLLDRSKSYELIRKIEAYMEDDRICSPPFMELTSLCGDDTMRLLEKNGLTFPFICKTRVAHGTNSHEMAIVFNQEGLNAIQPPCVVQNFINHNAVLYKVFVVGESYTVVQR

SEQ ID NO: 18478 - protein, 170 aa, Artificial Sequence
  Synthetic polypeptide
WLCDLNLSRPIEEQGPLDVIIHKLTDVILEADQNDSQSLELVHRFQEYIDAHPETIVLDPLPAIRTLLDRSKSYELIRKIEAYMEGLPSALDDRICSPPFMELTSLCGDDTMRLLEKNGLTFPFICKTRVAHGTNSHEMAIVFNQEGLNAIQPPCVVQNFINHNAVLYKV

SEQ ID NO: 18479 - protein, 132 aa, Artificial Sequence
  Synthetic polypeptide
WLCDLNLSRPIEEQGPLDVIIHKLTDVILEADQNDSQSLELVHRFQEYIDAHPETIVLDPLPAIRTLLDRSKSYELIRKIEAYMEDDRICSPPFMELTSLCGDDTMRLLEKNGLTFPFICKTRVAHGTNSHE

SEQ ID NO: 18480 - protein, 559 aa, Artificial Sequence
  Synthetic polypeptide
VQEFKSSLGNLSVLDEMMVEQTDLVRLRMVRMSNVPDTLYMVNNAVPQCCHMISHQQISSNQSSPPSVVANEIPVPRLLIMKDMVRRLQELRHTEQVQRAYALNCGEGATVSYEIQIRVLREFGLADAAAELLQNPHKFFPDERFGDESPLLTMRQPGRCRVNSTPPAETMFTDLDSFVAFHPPLPPPPPPYHPPATPIHNQLKAGWKQRPPSQHPSRSFSYPCNHSLFHSRTAPKAGPPPVYLPSVKAAPPDCTSTAGLGRQTVAAAAATTTSTATAAAAAASEKQVRTQPVLNDLMPDIAVGVSTLSLKDRRLPELAVDTELSQSVSEAGPGPPQHLSCIPQRHTHTSRKKHTLEQKTDTRENPQEYPDFYDFSNAACRPSTPALSRRTPSPSQGGYFGPDLYSHNKASPSGLKSAYLPGQTSPKKQEEARREYPLSPDGHLHRQKNEPIHLDVVEQPPQRSDFPLAAPENASTGPAHVRGRTAVETDLTFGLTPNRPSLSACSSEAPEERSGRRLADSESLGHGAQRNTDLEREDSISRGRRSPSKPDFLYKKSAL

SEQ ID NO: 18481 - protein, 35 aa, Artificial Sequence
  Synthetic polypeptide
QAWWLTPVISALWEAEAGRSLESRSSRAAWATYQC

SEQ ID NO: 18482 - protein, 28 aa, Artificial Sequence
  Synthetic polypeptide
SQHFGRLKQEDHLSPGVQEQPGQPISAR

SEQ ID NO: 18483 - protein, 65 aa, Artificial Sequence
  Synthetic polypeptide
RHFSVIPRKTACVGIFPLLPHSGSCWECIPPNDEANQEQRSEGSRKWAPTREGSKGRSHASATQL

SEQ ID NO: 18484 - protein, 795 aa, Artificial Sequence
  Synthetic polypeptide
GYFPCFPTQAAAGNVFHQMTKQTKNKEVKDLENGLQHGKEAKGDPTHQPHSCEDIIAESISLDTLIAILKWSSHPYGSKWVHRQALHFLCEEFSQVMTSDVFYELSKDHLLTAIQSDYLQASEQDILKYLIKWGEHQLMKRIADREPNLLSGTAHSVNKRGVKRRDLDMEELREILSSLLPFVRIEHILPINSEVLSDAMKRGLISTPPSDMLPTTEGGKSNAWLRQKNAGIYVRPRLFSPYVEEAKSVLDEMMVEQTDLVRLRMVRMSNVPDTLYMVNNAVPQCCHMISHQQISSNQSSPPSVVANEIPVPRLLIMKDMVRRLQELRHTEQVQRAYALNCGEGATVSYEIQIRVLREFGLADAAAELLQNPHKFFPDERFGDESPLLTMRQPGRCRVNSTPPAETMFTDLDSFVAFHPPLPPPPPPYHPPATPIHNQLKAGWKQRPPSQHPSRSFSYPCNHSLFHSRTAPKAGPPPVYLPSVKAAPPDCTSTAGLGRQTVAAAAATTTSTATAAAAAASEKQVRTQPVLNDLMPDIAVGVSTLSLKDRRLPELAVDTELSQSVSEAGPGPPQHLSCIPQRHTHTSRKKHTLEQKTDTRENPQEYPDFYDFSNAACRPSTPALSRRTPSPSQGGYFGPDLYSHNKASPSGLKSAYLPGQTSPKKQEEARREYPLSPDGHLHRQKNEPIHLDVVEQPPQRSDFPLAAPENASTGPAHVRGRTAVETDLTFGLTPNRPSLSACSSEAPEERSGRRLADSESLGHGAQRNTDLEREDSISRGRRSPSKPDFLYKKSAL

SEQ ID NO: 18485 - protein, 30 aa, Artificial Sequence
  Synthetic polypeptide
KMGSNTGRKQREIPRISHTAVRISLLRASH

SEQ ID NO: 18486 - protein, 66 aa, Artificial Sequence
  Synthetic polypeptide
ECPLIPFSSLEQWLESFFFFFGQVWWCAPGIPATWETEAEGSLEARSLRPAWTTYCFQDPVLAGIS

SEQ ID NO: 18487 - protein, 2595 aa, Artificial Sequence
  Synthetic polypeptide
DQPGQHIASKIRYLQEYHNRVLHNIYPVPSGTDIANTLKYFSQTLLSILSRTGKKENQDASNLTVPMTMCLFPVPFPLTPSLRPQVSSINPTVTRSLLYSVLRDAPSERGPQSRDAQLSDYPSLDYQGLYVTLVTLLDLVPLLQHGQHDLGQSIFYTTTCLLPFLNDDILSTLPYTMISTLATFPPFLHKDIIEYLSTSFLPMAILGSSRREGVPAHVNLSASSMLMIAMQYTSNPVYHCQLLECLMKYKQEVWKDLLYVIAYGPSQVKPPAVQMLFHYWPNLKPPGAISEYRGLQYTAWNPIHCQHIECHNAINKPAVKMCIDPSLSVALGDKPPPLYLCEECSERIAGDHSEWLIDVLLPQAEISAICQKKNCSSHVRRAVVTCFSAGCCGRHGNRPVRYCKRCHSNHHSNEVGAAAETHLYQTSPPPINTRECGAEELVCAVEAVISLLKEAEFHAEQREHELNRRRQLGLSSSHHSLDNADFDNKDDDKHDQRLLSQFGIWFLVSLCTPSENTPTESLARLVAMVFQWFHSTAYMMDDEVGSLVEKLKPQFVTKWLKTVCDVRFDVMVMCLLPKPMEFARVGGYWDKSCSTVTQLKEGLNRILCLIPYNVINQSVWECIMPEWLEAIRTEVPDNQLKEFREVLSKMFDIELCPLPFSMEEMFGFISCRFTGYPSSVQEQALLWLHVLSELDIMVPLQLLISMFSDGVNSVKELANQRKSRVSELAGNLASRRVSVASDPGRRVQHNMLSPFHSPFQSPFRSPLRSPFRSPFKNFGHPGGRTIDFDCEDDEMNLNCFILMFDLLLKQMELQDDGITMGLEHSLSKDIISIINNVFQAPWGGSHTCQKDEKAIECNLCQSSILCYQLACELLERLAPKEESRLVEPTDSLEDSLLSSRPEFIIGPEGEEEENPASKHGENPGNCTEPVEHAAVKNDTERKFCYQQLPVTLRLIYTIFQEMAKFEEPDILFNMLNCLKILCLHGECLYIARKDHPQFLAYIQDHMLIASLWRVVKSEFSQLSSLAVPLLLHALSLPHGADIFWTIINGNFNSKDWKMRFEAVEKVAVICRFLDIHSVTKNHLLKYSLAHAFCCFLTAVEDVNPAVATRAGLLLDTIKRPALQGLCLCLDFQFDTVVKDRPTILSKLLLLHFLKQDIPALSWEFFVNRFETLSLEAQLHLDCNKEFPFPTTITAVRTNVANLSDAALWKIKRARFARNRQKSVRSLRDSVKGPVESKRALSLPETLTSKIRQQSPENDNTIKDLLPEDAGIDHQTVHQLITVLMKFMAKDESSAESDISSAKAFNTVKRHLYVLLGYDQQEGCFMIAPQKMRLSTCFNAFIAGIAQVMDYNINLGKHLLPLVVQVLKYCSCPQLRHYFQQPPRCSLWSLKPHIRQMWLKALLVILYKYPYRDCDISKILLHLIHITVNTLNAQYHSCKPHATAGPLYSDNSNISRYSEKEKGEIELAEYRETGALQDSLLHCVREESIPKKKLRSFKQKSLDIGNADSLLFTLDEHRRKSCIDRCDIEKPPTQAAYIAQRPNDPGRSRQNSATRPDNSEIPENPAMEGFPDARRPVIPEVRLNCMETFEVKVDSPVKPAPKEDLDLIDLSSDSTSGPEKHSILSTSDSDSLVFEPLPPLRIVESDEEEETMNQGDDGPSGKNAASSPSVPSHPSVLSLSTAPLVQVSVEDCSKDFSSKDSGNNQSAGNTDSALITLEDPMDAEGSSKPEELPEFSCGSPLTLKQKRDLLQKSFALPEMSLDDHPDPGTEGEKPGELMPSSGAKTVLLKVPEDAENPTESEKPDTSAESDTEQNPERKVEEDGAEESEFKIQIVPRQRKQRKIAVSAIQREYLDISFNILDKLGEQKDPDPSTKGLSTLEMPRESSSAPTLDAGVPETSSHSSISKQIQPGKRQCNVPTCLNPDLEGQPLRMRGATKSSLLSAPSIVSMFVPAPEEFTDEQPTVMTDKCHDCGAILEEYDEETLGLAIVVLSTFIHLSPDLAAPLLLDIMQSVGRLASSTTFSNQAESMMVPGNAAGVAKQFLRCIFHQLAPNGIFPQLFQSTIKDGTFLRTLASSLMDFNELSSIAALSQLLEGLNNKKNLPAGGAMIRCLENIATFMEALPMDSPSSLWTTISNQFQTFFAKLPCVLPLKCSLDSSLRIMICLLKIPSTNATRSLLEPFSKLLSFVIQNAVFTLAYLVELCGLCYRAFTKERDKFYLSRSVVLELLQALKLKSPLPDTNLLLLVQFICADAGTKLAESTILSKQMIASVPGCGTAAMECVRQYINEVLDFMADMHTLTKLKSHMKTCSQPLHEDTFGGHLKVGLAQIAAMDISRGNHRDNKAVIRYLPWLYHPPSAMQQGPKEFIECVSHIRLLSWLLLGSLTHNAVCPNASSPCLPIPLDAGSHVADHLIVILIGFPEQSKTSVLHMCSLFHAFIFAQLWTVYCEQSAVATNLQNQNEFSFTAILTALEFWSRVTPSILQLMAHNKVMVEMVCLHVISLMEALQECNSTIFVKLIPMWLPMIQSNIKHLSAGLQLRLQAIQNHVNHHSLRTLPGSGQSSAGLAALRKWLQCTQFKMAQVEIQSSEAASQFYPL

SEQ ID NO: 18488 - protein, 42 aa, Artificial Sequence
  Synthetic polypeptide
GQEFETSLDNILLPRSGTCRNIITGFSTTFILYHQEQILQTP

SEQ ID NO: 18489 - protein, 2656 aa, Artificial Sequence
  Synthetic polypeptide
DQPGQHIASKIRYLQEYHNRVLHNIYPVPSGTDIANTLKYFSQTLLSILSRTGKKENQDASNLTVPMTMCLFPVPFPLTPSLRPQVSSINPTVTRSLLYSVLRDAPSERGPQSRDAQLSDYPSLDYQGLYVTLVTLLDLVPLLQHGQHDLGQSIFYTTTCLLPFLNDDILSTLPYTMISTLATFPPFLHKDIIEYLSTSFLPMAILGSSRREGVPAHVNLSASSMLMIAMQYTSNPVYHCQLLECLMKYKQEVWKDLLYVIAYGPSQVKPPAVQMLFHYWPNLKPPGAISEYRGLQYTAWNPIHCQHIECHNAINKPAVKMCIDPSLSVALGDKPPPLYLCEECSERIAGDHSEWLIDVLLPQAEISAICQKKNCSSHVRRAVVTCFSAGCCGRHGNRPVRYCKRCHSNHHSNEVGAAAETHLYQTSPPPINTRECGAEELVCAVEAVISLLKEAEFHAEQREHELNRRRQLGLSSSHHSLDNADFDNKDDDKHDQRLLSQFGIWFLVSLCTPSENTPTESLARLVAMVFQWFHSTAYMMDDEVGSLVEKLKPQFVTKWLKTVCDVRFDVMVMCLLPKPMEFARVGGYWDKSCSTVTQLKEGLNRILCLIPYNVINQSVWECIMPEWLEAIRTEVPDNQLKEFREVLSKMFDIELCPLPFSMEEMFGFISCRFTGYPSSVQEQALLWLHVLSELDIMVPLQLLISMFSDGVNSVKELANQRKSRVSELAGNLASRRVSVASDPGRRVQHNMLSPFHSPFQSPFRSPLRSPFRSPFKNFGHPGGRTIDFDCEDDEMNLNCFILMFDLLLKQMELQDDGITMGLEHSLSKDIISIINNVFQAPWGGSHTCQKDEKAIECNLCQSSILCYQLACELLERLAPKEESRLVEPTDSLEDSLLSSRPEFIIGPEGEEEENPASKHGENPGNCTEPVEHAAVKNDTERKFCYQQLPVTLRLIYTIFQEMAKFEEPDILFNMLNCLKILCLHGECLYIARKDHPQFLAYIQDHMLIASLWRVVKSEFSQLSSLAVPLLLHALSLPHGADIFWTIINGNFNSKDWKMRFEAVEKVAVICRFLDIHSVTKNHLLKYSLAHAFCCFLTAVEDVNPAVATRAGLLLDTIKRPALQGLCLCLDFQFDTVVKDRPTILSKLLLLHFLKQDIPALSWEFFVNRFETLSLEAQLHLDCNKEFPFPTTITAVRTNVANLSDAALWKIKRARFARNRQKSVRSLRDSVKGPVESKRALSLPETLTSKIPMRLTRHEQSAPALGGTPEQTPGQQSPENDNTIKDLLPEDAGIDHQTVHQLITVLMKFMAKDESSAESDISSAKAFNTVKRHLYVLLGYDQQEGCFMIAPQKMRLSTCFNAFIAGIAQVMDYNINLGKHLLPLVVQVLKYCSCPQLRHYFQQPPRCSLWSLKPHIRQMWLKALLVILYKYPYRDCDISKILLHLIHITVNTLNAQYHSCKPHATAGPLYSDNSNISRYSEKEKGEIELAEYRETGALQDSLLHCVREESIPKKKLRSFKQKSLDIGNADSLLFTLDEHRRKSCIDRCDIEKPPTQAAYIAQRPNDPGRSRQNSATRPDNSEIPENPAMEGFPDARRPVIPEVRLNCMETFEVKVDSPVKPAPKEDLDLIDLSSDSTSGPEKHSILSTSDSDSLVFEPLPPLRIVESDEEEETMNQGDDGPSGKNAASSPSVPSHPSVLSLSTAPLVQVSVEDCSKDFSSKDSGNNQSAGNTDSALITLEDPMDAEGSSKPEELPEFSCGSPLTLKQKRDLLQKSFALPEMSLDDHPDPGTEGEKPGELMPSSGAKTVLLKVPEDAENPTESEKPDTSAESDTEQNPERKVEEDGAEESEFKIQIVPRQRKQRKIAVSAIQREYLDISFNILDKLGEQKDPDPSTKGLSTLEMPRESSSAPTLDAGVPETSSHSSISTQYRQMKRGSLGVLTMSQLMKRQLEHQSSAPHNISNWDTEQIQPGKRQCNVPTCLNPDLEGQPLRMRGATKSSLLSAPSIVSMFVPAPEEFTDEQPTVMTDKCHDCGAILEEYDEETLGLAIVVLSTFIHLSPDLAAPLLLDIMQSVGRLASSTTFSNQAESMMVPGNAAGVAKQFLRCIFHQLAPNGIFPQLFQSTIKDGTFLRTLASSLMDFNELSSIAALSQLLEGLNNKKNLPAGGAMIRCLENIATFMEALPMDSPSSLWTTISNQFQTFFAKLPCVLPLKCSLDSSLRIMICLLKIPSTNATRSLLEPFSKLLSFVIQNAVFTLAYLVELCGLCYRAFTKERDKFYLSRSVVLELLQALKLKSPLPDTNLLLLVQFICADAGTKLAESTILSKQMIASVPGCGTAAMECVRQYINEVLDFMADMHTLTKLKSHMKTCSQPLHEDTFGGHLKVGLAQIAAMDISRGNHRDNKAVIRYLPWLYHPPSAMQQGPKEFIECVSHIRLLSWLLLGSLTHNAVCPNASSPCLPIPLDAGSHVADHLIVILIGFPEQSKTSVLHMCSLFHAFIFAQLWTVYCEQSAVATNLQNQNEFSFTAILTALEFWSRVTPSILQLMAHNKVMVEMVCLHVISLMEALQECNSTIFVKLIPMWLPMIQSNIKHLSAGLQLRLQAIQNHVNHHSLRTLPGSGQSSAGLAALRKWLQCTQFKMAQVEIQSSEAASQFYPL

SEQ ID NO: 18490 - protein, 2634 aa, Artificial Sequence
  Synthetic polypeptide
DQPGQHIASKIRYLQEYHNRVLHNIYPVPSGTDIANTLKYFSQTLLSILSRTGKKENQDASNLTVPMTMCLFPVPFPLTPSLRPQVSSINPTVTRSLLYSVLRDAPSERGPQSRDAQLSDYPSLDYQGLYVTLVTLLDLVPLLQHGQHDLGQSIFYTTTCLLPFLNDDILSTLPYTMISTLATFPPFLHKDIIEYLSTSFLPMAILGSSRREGVPAHVNLSASSMLMIAMQYTSNPVYHCQLLECLMKYKQEVWKDLLYVIAYGPSQVKPPAVQMLFHYWPNLKPPGAISEYRGLQYTAWNPIHCQHIECHNAINKPAVKMCIDPSLSVALGDKPPPLYLCEECSERIAGDHSEWLIDVLLPQAEISAICQKKNCSSHVRRAVVTCFSAGCCGRHGNRPVRYCKRCHSNHHSNEVGAAAETHLYQTSPPPINTRECGAEELVCAVEAVISLLKEAEFHAEQREHELNRRRQLGLSSSHHSLDNADFDNKDDDKHDQRLLSQFGIWFLVSLCTPSENTPTESLARLVAMVFQWFHSTAYMMDDEVGSLVEKLKPQFVTKWLKTVCDVRFDVMVMCLLPKPMEFARVGGYWDKSCSTVTQLKEGLNRILCLIPYNVINQSVWECIMPEWLEAIRTEVPDNQLKEFREVLSKMFDIELCPLPFSMEEMFGFISCRFTGYPSSVQEQALLWLHVLSELDIMVPLQLLISMFSDGVNSVKELANQRKSRVSELAGNLASRRVSVASDPGRRVQHNMLSPFHSPFQSPFRSPLRSPFRSPFKNFGHPGGRTIDFDCEDDEMNLNCFILMFDLLLKQMELQDDGITMGLEHSLSKDIISIINNVFQAPWGGSHTCQKDEKAIECNLCQSSILCYQLACELLERLAPKEESRLVEPTDSLEDSLLSSRPEFIIGPEGEEEENPASKHGENPGNCTEPVEHAAVKNDTERKFCYQQLPVTLRLIYTIFQEMAKFEEPDILFNMLNCLKILCLHGECLYIARKDHPQFLAYIQDHMLIASLWRVVKSEFSQLSSLAVPLLLHALSLPHGADIFWTIINGNFNSKDWKMRFEAVEKVAVICRFLDIHSVTKNHLLKYSLAHAFCCFLTAVEDVNPAVATRAGLLLDTIKRPALQGLCLCLDFQFDTVVKDRPTILSKLLLLHFLKQDIPALSWEFFVNRFETLSLEAQLHLDCNKEFPFPTTITAVRTNVANLSDAALWKIKRARFARNRQKSVRSLRDSVKGPVESKRALSLPETLTSKIRQQSPENDNTIKDLLPEDAGIDHQTVHQLITVLMKFMAKDESSAESDISSAKAFNTVKRHLYVLLGYDQQEGCFMIAPQKMRLSTCFNAFIAGIAQVMDYNINLGKHLLPLVVQVLKYCSCPQLRHYFQQPPRCSLWSLKPHIRQMWLKALLVILYKYPYRDCDISKILLHLIHITVNTLNAQYHSCKPHATAGPLYSDNSNISRYSEKEKGEIELAEYRETGALQDSLLHCVREESIPKKKLRSFKQKSLDIGNADSLLFTLDEHRRKSCIDRCDIEKPPTQAAYIAQRPNDPGRSRQNSATRPDNSEIPENPAMEGFPDARRPVIPEVRLNCMETFEVKVDSPVKPAPKEDLDLIDLSSDSTSGPEKHSILSTSDSDSLVFEPLPPLRIVESDEEEETMNQGDDGPSGKNAASSPSVPSHPSVLSLSTAPLVQVSVEDCSKDFSSKDSGNNQSAGNTDSALITLEDPMDAEGSSKPEELPEFSCGSPLTLKQKRDLLQKSFALPEMSLDDHPDPGTEGEKPGELMPSSGAKTVLLKVPEDAENPTESEKPDTSAESDTEQNPERKVEEDGAEESEFKIQIVPRQRKQRKIAVSAIQREYLDISFNILDKLGEQKDPDPSTKGLSTLEMPRESSSAPTLDAGVPETSSHSSISTQYRQMKRGSLGVLTMSQLMKRQLEHQSSAPHNISNWDTEQIQPGKRQCNVPTCLNPDLEGQPLRMRGATKSSLLSAPSIVSMFVPAPEEFTDEQPTVMTDKCHDCGAILEEYDEETLGLAIVVLSTFIHLSPDLAAPLLLDIMQSVGRLASSTTFSNQAESMMVPGNAAGVAKQFLRCIFHQLAPNGIFPQLFQSTIKDGTFLRTLASSLMDFNELSSIAALSQLLEGLNNKKNLPAGGAMIRCLENIATFMEALPMDSPSSLWTTISNQFQTFFAKLPCVLPLKCSLDSSLRIMICLLKIPSTNATRSLLEPFSKLLSFVIQNAVFTLAYLVELCGLCYRAFTKERDKFYLSRSVVLELLQALKLKSPLPDTNLLLLVQFICADAGTKLAESTILSKQMIASVPGCGTAAMECVRQYINEVLDFMADMHTLTKLKSHMKTCSQPLHEDTFGGHLKVGLAQIAAMDISRGNHRDNKAVIRYLPWLYHPPSAMQQGPKEFIECVSHIRLLSWLLLGSLTHNAVCPNASSPCLPIPLDAGSHVADHLIVILIGFPEQSKTSVLHMCSLFHAFIFAQLWTVYCEQSAVATNLQNQNEFSFTAILTALEFWSRVTPSILQLMAHNKVMVEMVCLHVISLMEALQECNSTIFVKLIPMWLPMIQSNIKHLSAGLQLRLQAIQNHVNHHSLRTLPGSGQSSAGLAALRKWLQCTQFKMAQVEIQSSEAASQFYPL

SEQ ID NO: 18491 - protein, 2595 aa, Artificial Sequence; identical to SEQ ID NO: 18487
  Synthetic polypeptide

SEQ ID NO: 18492 - protein, 42 aa, Artificial Sequence; identical to SEQ ID NO: 18488
  Synthetic polypeptide

SEQ ID NO: 18493 - protein, 2656 aa, Artificial Sequence; identical to SEQ ID NO: 18489
  Synthetic polypeptide

SEQ ID NO: 18494 - protein, 2634 aa, Artificial Sequence; identical to SEQ ID NO: 18490
  Synthetic polypeptide

SEQ ID NO: 18495 - protein, 44 aa, Artificial Sequence
  Synthetic polypeptide
QVQWLIPIIPVLWEAKAGESLEARNLRPAWTTYCFQDPVLAGIS

SEQ ID NO: 18496 - protein, 44 aa, Artificial Sequence
  Synthetic polypeptide
TKGNRPQHQLADFGWKSKNPSGGSPRRRGQPWERRVDGTQAGLL

SEQ ID NO: 18497 - protein, 122 aa, Artificial Sequence
  Synthetic polypeptide
KDDIEETPELKEIDRNTNWLTLGGSPRIRVEAHRGEGANHGKGEWMGLRQGCCSSCGRRSCGCGDCARGAQCHGLHLSRNRRILHSSQDDVYSSHCQRGRSCCWQSGGYSAVSGGSWTLCDI

SEQ ID NO: 18498 - protein, 102 aa, Artificial Sequence
  Synthetic polypeptide
LWVEVQESEWRLTEAKGPTMGKESGWDSGRAAVAAVVGGVVAVGTVLVALSAMGFTSVGIAASSIAAKMMSTAAIANGGGVAAGSLVAILQSVGAAGLSVTS

SEQ ID NO: 18499 - protein, 12 aa, Artificial Sequence
  Synthetic polypeptide
FLLFEATQAGLL

SEQ ID NO: 18500 - protein, 96 aa, Artificial Sequence
  Synthetic polypeptide
LLDCGLPASRTERIDFCCLKPPRQGCCSSCGRRSCGCGDCARGAQCHGLHLSRNRRILHSSQDDVYSSHCQRGRSCCWQSGGYSAVSGGSWTLCDI

SEQ ID NO: 18501 - protein, 98 aa, Artificial Sequence
  Synthetic polypeptide
SHPGRAAVAAVVGGVVAVGTVLVALSAMGFTSVGIAASSIAAKMMSTAAIANGGGVAAGSLVAILQSVGAAGLSVTSKVIGGFAGTALGAWLGSPPSS

SEQ ID NO: 18502 - protein, 88 aa, Artificial Sequence
  Synthetic polypeptide
SHPGRAAVAAVVGGVVAVGTVLVALSAMGFTSVGIAASSIAAKMMSTAAIANGGGVAAGSLVAILQSVGAAGLSVTSKVIGGFAGTAL

SEQ ID NO: 18503 - protein, 88 aa, Artificial Sequence
  Synthetic polypeptide
LLDCGLPASRTERIDFCCLKPPRQGCCSSCGRRSCGCGDCARGAQCHGLHLSRNRRILHSSQDDVYSSHCQRGRSCCWQSGGYSAVSG

SEQ ID NO: 18504 - protein, 86 aa, Artificial Sequence
  Synthetic polypeptide
SHPGRAAVAAVVGGVVAVGTVLVALSAMGFTSVGIAASSIAAKMMSTAAIANGGGVAAGSLVAILQSVGECSGQDDQSQEMIQPRG

SEQ ID NO: 18505 - protein, 77 aa, Artificial Sequence
  Synthetic polypeptide
SHPGRAAVAAVVGGVVAVGTVLVALSAMGFTSVGIAASSIAAKMMSTAAIANGGGVAAGSLVAILQSVGAAGLSVTS

SEQ ID NO: 18506 - protein, 90 aa, Artificial Sequence
  Synthetic polypeptide
SHPGRAAVAAVVGGVVAVGTVLVALSAMGFTSVGIAASSIAAKMMSTAAIANGGGVAAGSLVAILQSVGAAGLSVTSKVIGGFAGTALGA

SEQ ID NO: 18507 - protein, 42 aa, Artificial Sequence
  Synthetic polypeptide
LLDCGLPASRTERIDFCCLKPPRQGCCSSCGRRRGSWTLCDI

SEQ ID NO: 18508 - protein, 44 aa, Artificial Sequence
  Synthetic polypeptide
SHPGRAAVAAVVGGGAAGLSVTSKVIGGFAGTALGAWLGSPPSS

SEQ ID NO: 18509 - protein, 349 aa, Artificial Sequence
  Synthetic polypeptide
FTTIKWASFLQCENVLPVQKAASRTLCIFLRYNRKQEQRHEVIQKLIEQLGQGKSYWNRLRFLDTCEFIIEIFSKSFFCKYFFLPAIELTHDPVANVRMKLCYLLPKVKSTLKIPADKHLLQQLEMCVRKLLCQEKDKDVLAIVKRTVLELDRMEMSMDAFQKKFYEKDLLDQEKEREELLLLEMEQLEKEKQQNDGRPMSDKMFEKKRRDTKTPTQSLPKNIPISVPGPSSVTPSTSKEIKKSKLIRSQSFNNQAFHAKYGNLEKCASKSSTTGYTTSVSGLGKTSVLSLADDSFRTRNASSVPSSFSPNTPLPSTSRGTGNSVDPKSSGSKDTQPRKATLKSRKSNP

SEQ ID NO: 18510 - protein, 96 aa, Artificial Sequence
  Synthetic polypeptide
LILQSHHHPDTKIWKRHKKRKLQVSIPDEHQHKNPQENTSKPNPVAHQKVNSPQSSGLHSCNVRMFYLSKRRLHELYAFFCVIIVNKNRDMRSFKN

SEQ ID NO: 18511 - protein, 47 aa, Artificial Sequence
  Synthetic polypeptide
KKHGIWNLRPDFEAHTEHRQVNHAIWGWFWRPRVRTSSSPLRGSTAM

SEQ ID NO: 18512 - protein, 54 aa, Artificial Sequence
  Synthetic polypeptide
DLTLKPTQNTDKSTMLFGAGFGDPESEHLLLPCEDQQPCEKEDPREGCRHNPRP

SEQ ID NO: 18513 - protein, 273 aa, Artificial Sequence
  Synthetic polypeptide
SPHRTQTSQPCYLGLVLETPSQNIFFSPARINSHVKKKTQGKVVDIIQGLDLLTAMVLVNHIFFKAKWEKPFHPEYTRKNFPFLVGEQVTVHVPMMHQKEQFAFGVDTELNCFVLQMDYKGDAVAFFVLPSKGKMRQLEQALSARTLRKWSHSLQKRWIEVFIPRFSISASYNLETILPKMGIQNVFDKNADFSGIAKRDSLQVSKATHKAVLDVSEEGTEATAATTTKFIVRSKDGPSYFTVSFNRTFLMMITNKATDGILFLGKVENPTKS

SEQ ID NO: 18514 - protein, 41 aa, Artificial Sequence
  Synthetic polypeptide
KKHGIWNLRPDFEAHTEHRQVNHAIWGWFWRPRVRTSSSPL

SEQ ID NO: 18515 - protein, 116 aa, Artificial Sequence
  Synthetic polypeptide
DLTLKPTQNTDKSTMLFGAGFGDPESEHLLLPCECLHFPGHALPWGPLSHQDPDSPGPGLQPHTHTRVCHPPGLPAPGSLTDCSQQRPDLEDGKCPLRQEGAAAAGKFLGQCQEAV

SEQ ID NO: 18516 - protein, 373 aa, Artificial Sequence
  Synthetic polypeptide
SPHRTQTSQPCYLGLVLETPSQNIFFSPVSVSTSLAMLSLGAHSVTKTQILQGLGFNLTHTPESAIHQGFQHLVHSLTVPSKDLTLKMGSALFVKKELQLQANFLGNVKRLYEAEVFSTDFSNPSIAQARINSHVKKKTQGKVVDIIQGLDLLTAMVLVNHIFFKAKWEKPFHPEYTRKNFPFLVGEQVTVHVPMMHQKEQFAFGVDTELNCFVLQMDYKGDAVAFFVLPSKGKMRQLEQALSARTLRKWSHSLQKRWIEVFIPRFSISASYNLETILPKMGIQNVFDKNADFSGIAKRDSLQVSKATHKAVLDVSEEGTEATAATTTKFIVRSKDGPSYFTVSFNRTFLMMITNKATDGILFLGKVENPTKS

SEQ ID NO: 18517 - protein, 112 aa, Artificial Sequence
  Synthetic polypeptide
SPHRTQTSQPCYLGLVLETPSQNIFFSPVSVSTSLAMLSLGAHSVTKTQILQGLGFNLTHTPESAIHQGFQHLVHSLTVPSKDLTLKMGSALFVKKELQLQANFLGNVKRLY

SEQ ID NO: 18518 - protein, 308 aa, Artificial Sequence
  Synthetic polypeptide
SPHRTQTSQPCYLGLVLETPSQNIFFSPVSVSTSLAMLSLGAHSVTKTQILQGLGFNLTHTPESAIHQGFQHLVHSLTVPSKDLTLKMGSALFVKKELQLQANFLGNVKRLYEAEVFSTDFSNPSIAQARINSHVKKKTQGKVVDIIQGLDLLTAMVLVNHIFFKAKWEKPFHPEYTRKNFPFLVGEQVTVHVPMMHQKEQFAFGVDTELNCFVLQMDYKGDAVAFFVLPSKGKMRQLEQALSARTLRKWSHSLQKRWIEVFIPRFSISASYNLETILPKMGIQNVFDKNADFSGIAKRDSLQVSKVS

SEQ ID NO: 18519 - protein, 349 aa, Artificial Sequence
  Synthetic polypeptide
KKHGIWNLRPDFEAHTEHRQVNHAIWDIFCSKMASYLYGVLFAVGLCAPIYCVSPANAPSAYPRPSSTKSTPASQVYSLNTDFAFRLYRRLVLETPSQNIFFSPARINSHVKKKTQGKVVDIIQGLDLLTAMVLVNHIFFKAKWEKPFHPEYTRKNFPFLVGEQVTVHVPMMHQKEQFAFGVDTELNCFVLQMDYKGDAVAFFVLPSKGKMRQLEQALSARTLRKWSHSLQKRWIEVFIPRFSISASYNLETILPKMGIQNVFDKNADFSGIAKRDSLQVSKATHKAVLDVSEEGTEATAATTTKFIVRSKDGPSYFTVSFNRTFLMMITNKATDGILFLGKVENPTKS

SEQ ID NO: 18520 - protein, 102 aa, Artificial Sequence
  Synthetic polypeptide
DLTLKPTQNTDKSTMLFGTYFVPKWHLTFMEYSLLLASVLQSTVCPRPMPPVHTPALPPQRAPLPHRCIPSTPTLPSAYTAGWFWRPRVRTSSSPLRGSTAM

SEQ ID NO: 18521 - protein, 113 aa, Artificial Sequence
  Synthetic polypeptide
SPHRTQTSQPCYLGHILFQNGILPLWSTLCCWPLCSNLLCVPGQCPQCIPPPFLHKEHPCLTGVFPQHRLCLPPIPQAGFGDPESEHLLLPCEDQQPCEKEDPREGCRHNPRP

SEQ ID NO: 18522 - protein, 449 aa, Artificial Sequence
  Synthetic polypeptide
KKHGIWNLRPDFEAHTEHRQVNHAIWDIFCSKMASYLYGVLFAVGLCAPIYCVSPANAPSAYPRPSSTKSTPASQVYSLNTDFAFRLYRRLVLETPSQNIFFSPVSVSTSLAMLSLGAHSVTKTQILQGLGFNLTHTPESAIHQGFQHLVHSLTVPSKDLTLKMGSALFVKKELQLQANFLGNVKRLYEAEVFSTDFSNPSIAQARINSHVKKKTQGKVVDIIQGLDLLTAMVLVNHIFFKAKWEKPFHPEYTRKNFPFLVGEQVTVHVPMMHQKEQFAFGVDTELNCFVLQMDYKGDAVAFFVLPSKGKMRQLEQALSARTLRKWSHSLQKRWIEVFIPRFSISASYNLETILPKMGIQNVFDKNADFSGIAKRDSLQVSKATHKAVLDVSEEGTEATAATTTKFIVRSKDGPSYFTVSFNRTFLMMITNKATDGILFLGKVENPTKS

SEQ ID NO: 18523 - protein, 96 aa, Artificial Sequence
  Synthetic polypeptide
DLTLKPTQNTDKSTMLFGTYFVPKWHLTFMEYSLLLASVLQSTVCPRPMPPVHTPALPPQRAPLPHRCIPSTPTLPSAYTAGWFWRPRVRTSSSPL

SEQ ID NO: 18524 - protein, 175 aa, Artificial Sequence
  Synthetic polypeptide
SPHRTQTSQPCYLGHILFQNGILPLWSTLCCWPLCSNLLCVPGQCPQCIPPPFLHKEHPCLTGVFPQHRLCLPPIPQAGFGDPESEHLLLPCECLHFPGHALPWGPLSHQDPDSPGPGLQPHTHTRVCHPPGLPAPGSLTDCSQQRPDLEDGKCPLRQEGAAAAGKFLGQCQEAV

SEQ ID NO: 18525 - protein, 188 aa, Artificial Sequence
  Synthetic polypeptide
KKHGIWNLRPDFEAHTEHRQVNHAIWDIFCSKMASYLYGVLFAVGLCAPIYCVSPANAPSAYPRPSSTKSTPASQVYSLNTDFAFRLYRRLVLETPSQNIFFSPVSVSTSLAMLSLGAHSVTKTQILQGLGFNLTHTPESAIHQGFQHLVHSLTVPSKDLTLKMGSALFVKKELQLQANFLGNVKRLY

SEQ ID NO: 18526 - protein, 87 aa, Artificial Sequence
  Synthetic polypeptide
NMPVTEGQILLYEYEPSITVHLWQMAVHTRELLSSGQMPFSQLPAVWQLYPGRKYRAADSSFWEIADHGQIDSMEQLVLTYQPERKD

SEQ ID NO: 18527 - protein, 79 aa, Artificial Sequence
  Synthetic polypeptide
KSDTRMKLGAIILNEICQSRKDRFSCMSMNPASQCTCGRWQCIPGSYSPPARCPSPSCPPCGSSTPGGSTEQRIPVSGK

SEQ ID NO: 18528 - protein, 22 aa, Artificial Sequence
  Synthetic polypeptide
AVIALLHFSLGDRTRPRLKKKC

SEQ ID NO: 18529 - protein, 653 aa, Artificial Sequence
  Synthetic polypeptide
LHCYTSAWVTEQDPVSRKSADIDALCVAPRHVDRSDFFTSFYDKLKLQEEVKDLRAVEEAFVPVIKLCFDGIEIDILFARLALQTIPEDLDLRDDSLLKNLDIRCIRSLNGCRVTDEILHLVPNIDNFRLTLRAIKLWAKRHNIYSNILGFLGGVSWAMLVARTCQLYPNAIASTLVHKFFLVFSKWEWPNPVLLKQPEECNLNLPVWDPRVNPSDRYHLMPIITPAYPQQNSTYNVSVSTRMVMVEEFKQGLAITDEILLSKAEWSKLFEAPNFFQKYKHYIVLLASAPTEKQRLEWVGLVESKIRILVGSLEKNEFITLAHVNPQSFPAPKENPDKEEFRTMWVIGLVFKKTENSENLSVDLTYDIQSFTDTVYRQAINSKMFEVDMKIAAMHVKRKQLHQLLPNHVLQKKKKHSTEGVKLTALNDSSLDLSMDSDNSMSVPSPTSATKTSPLNSSGSSQGRNSPAPAVTAASVTNIQATEVSVPQVNSSESSGGTSSESIPQTATQPAISPPPKPTVSRVVSSTRLVNPPPRSSGNAATSGNAATKIPTPIVGVKRTSSPHKEESPKKTKTEEDETSEDANCLALSGHDKTEAKEQLDTETSTTQSETIQTAASLLASQKTSSTDLSDIPALPANPIPVIKNSIKLRLNR

SEQ ID NO: 18530 - protein, 35 aa, Artificial Sequence
  Synthetic polypeptide
QNKTPSQEKVLILMRCVLHQDMLIEVTFSPHSMIS

SEQ ID NO: 18531 - protein, 193 aa, Artificial Sequence
  Synthetic polypeptide
LHCYTSAWVTEQDPVSRKSADIDALCVAPRHVDRSDFFTSFYDKLKLQEEVKDLRAVEEAFVPVIKLCFDGIEIDILFARLALQTIPEDLDLRDDSLLKNLDIRCIRSLNGCRVTDEILHLVPNIDNFRLTLRAIKLWAKRHNIYSNILGFLGGVSWAMLVARTCQLYPNAIASTLVHKFFLVFSKWYVFRLY

SEQ ID NO: 18532 - protein, 146 aa, Artificial Sequence
  Synthetic polypeptide
LHCYTSAWVTEQDPVSRKSADIDALCVAPRHVDRSDFFTSFYDKLKLQEEVKDLRAVEEAFVPVIKLCFDGIEIDILFARLALQTIPEDLDLRDDSLLKNLDIRCIRSLNGMRKPTSFCVLQFLSDISCFYTSFVLKLFIAILLTQ

SEQ ID NO: 18533 - protein, 71 aa, Artificial Sequence
  Synthetic polypeptide
LHCYTSAWVTEQDPVSRKSADIDALCVAPRHVDRSDFFTSFYDKLKLQEEVKDLRAVEEAFVPVIKLCFDG

SEQ ID NO: 18534 - protein, 632 aa, Artificial Sequence
  Synthetic polypeptide
LHCYTSAWVTEQDPVSRKSADIDALCVAPRHVDRSDFFTSFYDKLKLQEEVKDLRAVEEAFVPVIKLCFDGIEIDILFARLALQTIPEDLDLRDDSLLKNLDIRCIRSLNGCRVTDEILHLVPNIDNFRLTLRAIKLWAKRHNIYSNILGFLGGVSWAMLVARTCQLYPNAIASTLVHKFFLVFSKWEWPNPVLLKQPEECNLNLPVWDPRVNPSDRYHLMPIITPAYPQQNSTYNVSVSTRMVMVEEFKQGLAITDEILLSKAEWSKLFEAPNFFQKYKHYIVLLASAPTEKQRLEWVGLVESKIRILVGSLEKNEFITLAHVNPQSFPAPKENPDKEEFRTMWVIGLVFKKTENSENLSVDLTYDIQSFTDTVYRQAINSKMFEVDMKIAAMHVKRKQLHQLLPNHVLQKKKKHSTEGVKLTALNDSSLDLSMDSDNSMSVPSPTSATKTSPLNSSGSSQGRNSPAPAVTAASVTNIQATEVSVPQVNSSESSGGTSSESIPQTATQPAISPPPKPTVSRVVSSTRLVNPPPRSSGNAATSGNAATKIPTPIVGVKRTSSPHKEESPKKTKTEEEQLDTETSTTQSETIQTAASLLASQKTSSTDLSDIPALPANPIPVIKNSIKLRLNR

SEQ ID NO: 18535 - protein, 341 aa, Artificial Sequence
  Synthetic polypeptide
DQARWLTIIIPTLREAEEPSDNGPLFTELKFYQRAAKPEQIQKWIRTRKLKYLGVPKYWGSGLHDKNGKSYRFMIMDRFGSDLQKIYEANAKRFSRKTVLQLSLRILDILEYIHEHEYVHGDIKASNLLLNYKNPDQVYLVDYGLAYRYCPEGVHKEYKEDPKRCHDGTIEFTSIDAHNGVAPSRRGDLEILGYCMIQWLTGHLPWEDNLKDPKYVRDSKIRYRENIASLMDKCFPEKNKPGEIAKYMETVKLLDYTEKPLYENLRDILLQGLKAIGSKDDGKLDLSVVENGGLKAKTITKKRKKEIEESKEPGVEDTEWSNTQTEEAIQTRSRTRKRVQK

SEQ ID NO: 18536 - protein, 19 aa, Artificial Sequence
  Synthetic polypeptide
SQHFERLRNPVTMDLFLLN

SEQ ID NO: 18537 - protein, 374 aa, Artificial Sequence
  Synthetic polypeptide
TELDQTHPHANKLPLKDSFTYEDYRWAVSSVMTRQNQIPTEDGSRVTLALIPLWDMCNHTNGLITTGYNLEDDRCECVALQDFRAGEQIYIFYGTRSNAEFVIHSGFFFDNNSHDRVKIKLGVSKSDRLYAMKAEVLARAGIPTSSVFALHFTEPPISAQLLAFLRVFCMTEEELKEHLLGDSAIDRIFTLGNSEFPVSWDNEVKLWTFLEDRASLLLKTYKTTIEEDKSVLKNHDLSVRAKMAIKLRLGEKEILEKAVKSAAVNREYYRQQMEEKAPLPKYEESNLGLLESSVGDSRLPLVLRNLEEEAGVQDALNIREAISKAKATENGLVNGENSIPNGTRSENESLNQESKRAVEDAKGSSSDSTAGVKE

SEQ ID NO: 18538 - protein, 11 aa, Artificial Sequence
  Synthetic polypeptide
TRPILMPTNYP

SEQ ID NO: 18539 - protein, 67 aa, Artificial Sequence
  Synthetic polypeptide
SGPNFFMCMVNRIRPDPSSCQQTTLEGFFHLRGLQVGSLFCYDEAKPNSHRGWFPRDPGSDSFMGYV

SEQ ID NO: 18540 - protein, 76 aa, Artificial Sequence
  Synthetic polypeptide
TELDQTHPHANKLPLKDSFTYEDYRWAVSSVMTRQNQIPTEDGSRVTLALIPLWDMCNHTNGLTPEDSFALAVASA

SEQ ID NO: 18541 - protein, 72 aa, Artificial Sequence
  Synthetic polypeptide
TELDQTHPHANKLPLKDSFTYEDYRWAVSSVMTRQNQIPTEDGSRVTLALIPLWDMCNHTNGLVTTSSPVLC

SEQ ID NO: 18542 - protein, 29 aa, Artificial Sequence
  Synthetic polypeptide
INCKNRTKKLFYVIKELKEYARPKFKRRL

SEQ ID NO: 18543 - protein, 41 aa, Artificial Sequence
  Synthetic polypeptide
TVKTEQKNFFTLSKSSRNMPGQNLREGSEQEGTQRVRQPRP

SEQ ID NO: 18544 - protein, 415 aa, Artificial Sequence
  Synthetic polypeptide
EKALNKKEHRGCDSPDPDTSYVLTPHTEEKYKKINEEFDNMMRNHKIAPGLPPQNFSMSVTVPVTSPNALSYTNPGSSLVSPSLAASSTLTDSSMLSPPQTTLHRNVSPGAPQRPPSTGNAGGMLSTTDLTVPNGAGSSPVGNGFVNSRASPNLIGATGANSLGKVMPTKSPPPPGGGNLGMNSRKPDLRVVIPPSSKGMMPPLNTQRISSSQATQPLATPVVSVTTPSLPPQGLVYSAMPTAYNTDYSLTSADLSALQGFNSPGMLSLGQVSAWQQHHLGQAALSSLVAGGQLSQGSNLSINTNQNISIKSEPISPPRDRMTPSGFQQQQQQQQQQQPPPPPQPQPQPPQPQPRQEMGRSPVDSLSSSSSSYDGSDREDPRGDFHSPIVLGRPPNTEDRESPSVKRMRMDAWVT

SEQ ID NO: 18545 - protein, 215 aa, Artificial Sequence
  Synthetic polypeptide
LLQKNTQRISSSQATQPLATPVVSVTTPSLPPQGLVYSAMPTAYNTDYSLTSADLSALQGFNSPGMLSLGQVSAWQQHHLGQAALSSLVAGGQLSQGSNLSINTNQNISIKSEPISPPRDRMTPSGFQQQQQQQQQQQPPPPPQPQPQPPQPQPRQEMGRSPVDSLSSSSSSYDGSDREDPRGDFHSPIVLGRPPNTEDRESPSVKRMRMDAWVT

SEQ ID NO: 18546 - protein, 29 aa, Artificial Sequence
  Synthetic polypeptide
FPLFNCSKRIPRGSVVLKPLNLLLPQSCL

SEQ ID NO: 18547 - protein, 14 aa, Artificial Sequence
  Synthetic polypeptide
SLFLIAPKEYPEDQ

SEQ ID NO: 18548 - protein, 44 aa, Artificial Sequence
  Synthetic polypeptide
LSLMCMHLTATFKIHKVKTDRTKRIPRGSVVLKPLNLLLPQSCL

SEQ ID NO: 18549 - protein, 12 aa, Artificial Sequence
  Synthetic polypeptide
RLIELKEYPEDQ

SEQ ID NO: 18550 - protein, 212 aa, Artificial Sequence
  Synthetic polypeptide
KNTQRISSSQATQPLATPVVSVTTPSLPPQGLVYSAMPTAYNTDYSLTSADLSALQGFNSPGMLSLGQVSAWQQHHLGQAALSSLVAGGQLSQGSNLSINTNQNISIKSEPISPPRDRMTPSGFQQQQQQQQQQQPPPPPQPQPQPPQPQPRQEMGRSPVDSLSSSSSSYDGSDREDPRGDFHSPIVLGRPPNTEDRESPSVKRMRMDAWVT

SEQ ID NO: 18551 - protein, 24 aa, Artificial Sequence
  Synthetic polypeptide
DRSIALQLGQQEQNSISKKNMEIK

SEQ ID NO: 18552 - protein, 26 aa, Artificial Sequence
  Synthetic polypeptide
AEIAPLHSSLGNKSKTPSQKKTWRLS

SEQ ID NO: 18553 - protein, 46 aa, Artificial Sequence
  Synthetic polypeptide
SQLHGRLRQENRLNPRGRGCSELRSLHCTPAWATRAKLHLKKKHGD

SEQ ID NO: 18554 - protein, 981 aa, Artificial Sequence
  Synthetic polypeptide
NDQTLRPIIRLLFENKKNTKSRNRKVTIYSFTGNQRNRCSTFRVKRNQTIYWQEGLLVTFDGGYLSVESSDVNWKKKKSGGMKIVCQSEVRDFSAMAFITDHVNSLIDQWFPALTATESDGTPLMEQYVPCPVCETAWAQHTDPSEKSEDVQYFDMEDCVLTAIERDFISCPRHPDLPVPLQELVPELFMTDFPARLFLENSKLEHSEDEGSVLGQGGSGTVIYRARYQGQPVAVKRFHIKKFKNFANVPADTMLRHLRATDAMKNFSEFRQEASMLHALQHPCIVALIGISIHPLCFALELAPLSSLNTVLSENARDSSFIPLGHMLTQKIAYQIASGLAYLHKKNIIFCDLKSDNILVWSLDVKEHINIKLSDYGISRQSFHEGALGVEGTPGYQAPEIRPRIVYDEKVDMFSYGMVLYELLSGQRPALGHHQLQIAKKLSKGIRPVLGQPEEVQFRRLQALMMECWDTKPEKRPLALSVVSQMKDPTFATFMYELCCGKQTAFFSSQGQEYTVVFWDGKEESRNYTVVNTEKGLMEVQRMCCPGMKVSCQLQVQRSLWTATEDQKIYIYTLKGMCPLNTPQQALDTPAVVTCFLAVPVIKKNSYLVLAGLADGLVAVFPVVRGTPKDSCSYLCSHTANRSKFSIADEDARQNPYPVKAMEVVNSGSEVWYSNGPGLLVIDCASLEICRRLEPYMAPSMVTSVVCSSEGRGEEVVWCLDDKANSLVMYHSTTYQLCARYFCGVPSPLRDMFPVRPLDTEPPAASHTANPKVPEGDSIADVSIMYSEELGTQILIHQESLTDYCSMSSYSSSPPRQAARSPSSLPSSPASSSSVPFSTDCEDSDMLHTPGAASDRSEHDLTPMDGETFSQHLQAVKILAVRDLIWVPRRGGDVIVIGLEKDSGAQRGRVIAVLKARELTPHGVLVDAAVVAKDTVVCTFENENTEWCLAVWRGWGAREFDIFYQSYEELGRLEACTRKRR

SEQ ID NO: 18555 - protein, 35 aa, Artificial Sequence
  Synthetic polypeptide
SDCFLKTRRILKAGTGKSPFTVLQETREIAVAHSE

SEQ ID NO: 18556 - protein, 50 aa, Artificial Sequence
  Synthetic polypeptide
AVIPSPGHGAAPRTLVVSAQDSLVVREAIPRDTSRALKRSDPSTNNPTAF

SEQ ID NO: 18557 - protein, 10 aa, Artificial Sequence
  Synthetic polypeptide
TKRIPTPATT

SEQ ID NO: 18558 - protein, 46 aa, Artificial Sequence
  Synthetic polypeptide
TLDVMRSEISQSQKDKYCLIPLTRVTRSSQTLRQKGFLRQLRRERQ

SEQ ID NO: 18559 - protein, 686 aa, Artificial Sequence
  Synthetic polypeptide
LGVAKLLDKKDSYASYDVNGNDYDPSPRYDASNENKHGTRCAGEVAASANNSYCIVGIAYNAKIGGIRMLDGDVTDVVEAKSLGIRPNYIDIYSASWGPDDDGKTVDGPGRLAKQAFEYGIKKGRQGLGSIFVWASGNGGREGDYCSCDGYTNSIYTISVSSATENGYKPWYLEECASTLATTYSSGAFYERKIVTTDLRQRCTDGHTGTSVSAPMVAGIIALALEAKSIPLVQVLRTTALTSACAEHSDQRVVYLEHVVVRTSISHPRRGDLQIYLVSPSGTKSQLLAKRLLDLSNEGFTNWEFMTVHCWGEKAEGQWTLEIQDLPSQVRNPEKQGKLKEWSLILYGTAEHPYHTFSAHQSRSRMLELSAPELEPPKAALSPSQVEVPEDEEDYTAQSTPGSANILQTSVCHPECGDKGCDGPNADQCLNCVHFSLGSVKTSRKCVSVCPLGYFGDTAARRCRRCHKGCETCSSRAATQCLSCRRGFYHHQEMNTCVTLCPAGFYADESQKNCLKCHPSCKKCVDEPEKCTVCKEGFSLARGSCIPDCEPGTYFDSELIRCGECHHTCGTCVGPGREECIHCAKNFHFHDWKCVPACGEGFYPEEMPGLPHKVCRRCDENCLSCAGSSRNCSRCKTGFTQLGTSCITNHTCSNADETFCEMVKSNRLCERKLFIQFCCRTCLLAG

SEQ ID NO: 18560 - protein, 760 aa, Artificial Sequence
  Synthetic polypeptide
LGVAKLLDKKDSYASYDVNGNDYDPSPRYDASNENKHGTRCAGEVAASANNSYCIVGIAYNAKIGGIRMLDGDVTDVVEAKSLGIRPNYIDIYSASWGPDDDGKTVDGPGRLAKQAFEYGIKKGRQGLGSIFVWASGNGGREGDYCSCDGYTNSIYTISVSSATENGYKPWYLEECASTLATTYSSGAFYERKIVTTDLRQRCTDGHTGTSVSAPMVAGIIALALEANSQLTWRDVQHLLVKTSRPAHLKASDWKVNGAGHKVSHFYGFGLVDAEALVVEAKKWTAVPSQHMCVAASDKRPRSIPLVQVLRTTALTSACAEHSDQRVVYLEHVVVRTSISHPRRGDLQIYLVSPSGTKSQLLAKRLLDLSNEGFTNWEFMTVHCWGEKAEGQWTLEIQDLPSQVRNPEKQGKLKEWSLILYGTAEHPYHTFSAHQSRSRMLELSAPELEPPKAALSPSQVEVPEDEEDYTAQSTPGSANILQTSVCHPECGDKGCDGPNADQCLNCVHFSLGSVKTSRKCVSVCPLGYFGDTAARRCRRCHKGCETCSSRAATQCLSCRRGFYHHQEMNTCVTLCPAGFYADESQKNCLKCHPSCKKCVDEPEKCTVCKEGFSLARGSCIPDCEPGTYFDSELIRCGECHHTCGTCVGPGREECIHCAKNFHFHDWKCVPACGEGFYPEEMPGLPHKVCRRCDENCLSCAGSSRNCSRCKTGFTQLGTSCITNHTCSNADETFCEMVKSNRLCERKLFIQFCCRTCLLAG

SEQ ID NO: 18561 - protein, 747 aa, Artificial Sequence
  Synthetic polypeptide
LGVAKLLDKKDSYASYDVNGNDYDPSPRYDASNENKHGTRCAGEVAASANNSYCIVGIAYNAKIGGIRMLDGDVTDVVEAKSLGIRPNYIDIYSASWGPDDDGKTVDGPGRLAKQAFEYGIKKGRQGLGSIFVWASGNGGREGDYCSCDGYTNSIYTISVSSATENGYKPWYLEECASTLATTYSSGAFYERKIVTTDLRQRCTDGHTGTSVSAPMVAGIIALALEANSQLTWRDVQHLLVKTSRPAHLKASDWKVNGAGHKVSHFYGFGLVDAEALVVEAKKWTAVPSQHMCVAASDKRPRSIPLVQVLRTTALTSACAEHSDQRVVYLEHVVVRTSISHPRRGDLQIYLVSPSGTKSQLLAKRLLDLSNEGFTNWEFMTVHCWGEKAEGQWTLEIQDLPSQVRNPEKQGKLKEWSLILYGTAEHPYHTFSAHQSRSRMLELSAPELEPPKAALSPSQVEVPEDEEDYTGVCHPECGDKGCDGPNADQCLNCVHFSLGSVKTSRKCVSVCPLGYFGDTAARRCRRCHKGCETCSSRAATQCLSCRRGFYHHQEMNTCVTLCPAGFYADESQKNCLKCHPSCKKCVDEPEKCTVCKEGFSLARGSCIPDCEPGTYFDSELIRCGECHHTCGTCVGPGREECIHCAKNFHFHDWKCVPACGEGFYPEEMPGLPHKVCRRCDENCLSCAGSSRNCSRCKTGFTQLGTSCITNHTCSNADETFCEMVKSNRLCERKLFIQFCCRTCLLAG

SEQ ID NO: 18562 - protein, 443 aa, Artificial Sequence
  Synthetic polypeptide
LGVAKLLDKKDSYASYDVNGNDYDPSPRYDASNENKHGTRCAGEVAASANNSYCIVGIAYNAKIGGIRMLDGDVTDVVEAKSLGIRPNYIDIYSASWGPDDDGKTVDGPGRLAKQAFEYGIKKGRQGLGSIFVWASGNGGREGDYCSCDGYTNSIYTISVSSATENGYKPWYLEECASTLATTYSSGAFYERKIVTTDLRQRCTDGHTGTSVSAPMVAGIIALALEANSQLTWRDVQHLLVKTSRPAHLKASDWKVNGAGHKVSHFYGFGLVDAEALVVEAKKWTAVPSQHMCVAASDKRPRSIPLVQVLRTTALTSACAEHSDQRVVYLEHVVVRTSISHPRRGDLQIYLVSPSGTKSQLLAKRLLDLSNEGFTNWEFMTVHCWGEKAEGQWTLEIQDLPSQVRNPEKQGDLETPVANQLTTEEREPGLKHVFRWQIEQELW

SEQ ID NO: 18563 - protein, 414 aa, Artificial Sequence
  Synthetic polypeptide
LGVAKLLDKKDSYASYDVNGNDYDPSPRYDASNENKHGTRCAGEVAASANNSYCIVGIAYNAKIGGIRMLDGDVTDVVEAKSLGIRPNYIDIYSASWGPDDDGKTVDGPGRLAKQAFEYGIKKGRQGLGSIFVWASGNGGREGDYCSCDGYTNSIYTISVSSATENGYKPWYLEECASTLATTYSSGAFYERKIVTTDLRQRCTDGHTGTSVSAPMVAGIIALALEANSQLTWRDVQHLLVKTSRPAHLKASDWKVNGAGHKVSHFYGFGLVDAEALVVEAKKWTAVPSQHMCVAASDKRPRSIPLVQVLRTTALTSACAEHSDQRVVYLEHVVVRTSISHPRRGDLQIYLVSPSGTKSQLLAKRLLDLSNEGFTNWEFMTVHCWGEKAEGQWTLEIQDLPSQVRNPEKQGNLD

SEQ ID NO: 18564 - protein, 455 aa, Artificial Sequence
  Synthetic polypeptide
LGVAKLLDKKDSYASYDVNGNDYDPSPRYDASNENKHGTRCAGEVAASANNSYCIVGIAYNAKIGGIRMLDGDVTDVVEAKSLGIRPNYIDIYSASWGPDDDGKTVDGPGRLAKQAFEYGIKKGRQGLGSIFVWASGNGGREGDYCSCDGYTNSIYTISVSSATENGYKPWYLEECASTLATTYSSGAFYERKIVTTDLRQRCTDGHTGTSVSAPMVAGIIALALEANSQLTWRDVQHLLVKTSRPAHLKASDWKVNGAGHKVSHFYGFGLVDAEALVVEAKKWTAVPSQHMCVAASDKRPRSIPLVQVLRTTALTSACAEHSDQRVVYLEHVVVRTSISHPRRGDLQIYLVSPSGTKSQLLAKRLLDLSNEGFTNWEFMTVHCWGEKAEGQWTLEIQDLPSQVRNPEKQGDLETPVANQLTTEERFVSTLSILFHWSVYLSWSQYHIVLITVAL

SEQ ID NO: 18565 - protein, 262 aa, Artificial Sequence
  Synthetic polypeptide
LGVAKLLDKKDSYASYDVNGNDYDPSPRYDASNENKHGTRCAGEVAASANNSYCIVGIAYNAKIGGIRMLDGDVTDVVEAKSLGIRPNYIDIYSASWGPDDDGKTVDGPGRLAKQAFEYGIKKGRQGLGSIFVWASGNGGREGDYCSCDGYTNSIYTISVSSATENGYKPWYLEECASTLATTYSSGAFYERKIVTTDLRQRCTDGHTGTSVSAPMVAGIIALALEANSQLTWRDVQHLLVKTSRPAHLKASDWKVNGAGHK

SEQ ID NO: 18566 - protein, 30 aa, Artificial Sequence
  Synthetic polypeptide
HPLPEATAEQLDGLWRTVENEPRRWSILWP

SEQ ID NO: 18567 - protein, 214 aa, Artificial Sequence
  Synthetic polypeptide
SNDTHFLRQLQNSLMDFGEPWKMNPGDGAFYGPKIDIKIKDAIGRYHQCATIQLDFQLPIRFNLTYVSKDGDDKKRPVIIHRAILGSVERMIAILSENYGGKWPFWLSPRQVMVIPVGPTCEKYALQVSSEFFEEGFMADVDLDHSCTLNKKIRNAQLAQYNFILVVGEKEKIDNAVNVRTRDNKIHGEILVTSAIDKLKNLRKTRTLNAEEAF

SEQ ID NO: 18568 - protein, 178 aa, Artificial Sequence
  Synthetic polypeptide
SNDTHFLRQLQNSLMDFGEPWKMNPGDGAFYGPKIDIKIKDAIGRYHQCATIQLDFQLPIRFNLTYVSKDGDDKKRPVIIHRAILGSVERMIAILSENYGGKWPFWLSPRQVMVIPVGPTCEKYALQVSSEFFEEGFMADVDLDHSCTLNKKIRNAQLAQYNFILDRFLPSVWQEAWL

SEQ ID NO: 18569 - protein, 18 aa, Artificial Sequence
  Synthetic polypeptide
KEESGNFRKKKIVKIKTD

SEQ ID NO: 18570 - protein, 254 aa, Artificial Sequence
  Synthetic polypeptide
KQIEEEIKGCLQFLQSVYSTFGFSFQLNLSTRPENFLGEIEMWNEAEKQLQNSLMDFGEPWKMNPGDGAFYGPKIDIKIKDAIGRYHQCATIQLDFQLPIRFNLTYVSKDGDDKKRPVIIHRAILGSVERMIAILSENYGGKWPFWLSPRQVMVIPVGPTCEKYALQVSSEFFEEGFMADVDLDHSCTLNKKIRNAQLAQYNFILVVGEKEKIDNAVNVRTRDNKIHGEILVTSAIDKLKNLRKTRTLNAEEAF

SEQ ID NO: 18571 - protein, 14 aa, Artificial Sequence
  Synthetic polypeptide
EEKDCENKNRLKKK

SEQ ID NO: 18572 - protein, 218 aa, Artificial Sequence
  Synthetic polypeptide
KQIEEEIKGCLQFLQSVYSTFGFSFQLNLSTRPENFLGEIEMWNEAEKQLQNSLMDFGEPWKMNPGDGAFYGPKIDIKIKDAIGRYHQCATIQLDFQLPIRFNLTYVSKDGDDKKRPVIIHRAILGSVERMIAILSENYGGKWPFWLSPRQVMVIPVGPTCEKYALQVSSEFFEEGFMADVDLDHSCTLNKKIRNAQLAQYNFILDRFLPSVWQEAWL

SEQ ID NO: 18573 - protein, 27 aa, Artificial Sequence
  Synthetic polypeptide
NLKKGESSGGISQTGLHGGALSQYVQQ

SEQ ID NO: 18574 - protein, 368 aa, Artificial Sequence
  Synthetic polypeptide
KKERAQEEYHKRDFTEVLSPNMYNSKLWEASGHWQHYSENMFTFEIEKDTFALKPMNCPGHCLMFAHRPRSWREMPIRFADFGVLHRNELSGTLSGLTRVRRFQQDDAHIFCTVEQIEEEIKGCLQFLQSVYSTFGFSFQLNLSTRPENFLGEIEMWNEAEKQLQNSLMDFGEPWKMNPGDGAFYGPKIDIKIKDAIGRYHQCATIQLDFQLPIRFNLTYVSKDGDDKKRPVIIHRAILGSVERMIAILSENYGGKWPFWLSPRQVMVIPVGPTCEKYALQVSSEFFEEGFMADVDLDHSCTLNKKIRNAQLAQYNFILVVGEKEKIDNAVNVRTRDNKIHGEILVTSAIDKLKNLRKTRTLNAEEAF

SEQ ID NO: 18575 - protein, 57 aa, Artificial Sequence
  Synthetic polypeptide
SKKRRELRRNITNGTSRRCSLPICTTVNSGKPQATGSITARTCLPLRLKRTLLPSNP

SEQ ID NO: 18576 - protein, 332 aa, Artificial Sequence
  Synthetic polypeptide
KKERAQEEYHKRDFTEVLSPNMYNSKLWEASGHWQHYSENMFTFEIEKDTFALKPMNCPGHCLMFAHRPRSWREMPIRFADFGVLHRNELSGTLSGLTRVRRFQQDDAHIFCTVEQIEEEIKGCLQFLQSVYSTFGFSFQLNLSTRPENFLGEIEMWNEAEKQLQNSLMDFGEPWKMNPGDGAFYGPKIDIKIKDAIGRYHQCATIQLDFQLPIRFNLTYVSKDGDDKKRPVIIHRAILGSVERMIAILSENYGGKWPFWLSPRQVMVIPVGPTCEKYALQVSSEFFEEGFMADVDLDHSCTLNKKIRNAQLAQYNFILDRFLPSVWQEAWL

SEQ ID NO: 18577 - protein, 363 aa, Artificial Sequence
  Synthetic polypeptide
TEEYHKRDFTEVLSPNMYNSKLWEASGHWQHYSENMFTFEIEKDTFALKPMNCPGHCLMFAHRPRSWREMPIRFADFGVLHRNELSGTLSGLTRVRRFQQDDAHIFCTVEQIEEEIKGCLQFLQSVYSTFGFSFQLNLSTRPENFLGEIEMWNEAEKQLQNSLMDFGEPWKMNPGDGAFYGPKIDIKIKDAIGRYHQCATIQLDFQLPIRFNLTYVSKDGDDKKRPVIIHRAILGSVERMIAILSENYGGKWPFWLSPRQVMVIPVGPTCEKYALQVSSEFFEEGFMADVDLDHSCTLNKKIRNAQLAQYNFILVVGEKEKIDNAVNVRTRDNKIHGEILVTSAIDKLKNLRKTRTLNAEEAF

SEQ ID NO: 18578 - protein, 58 aa, Artificial Sequence
  Synthetic polypeptide
GPPTSHAELRNITNGTSRRCSLPICTTVNSGKPQATGSITARTCLPLRLKRTLLPSNP

SEQ ID NO: 18579 - protein, 327 aa, Artificial Sequence
  Synthetic polypeptide
TEEYHKRDFTEVLSPNMYNSKLWEASGHWQHYSENMFTFEIEKDTFALKPMNCPGHCLMFAHRPRSWREMPIRFADFGVLHRNELSGTLSGLTRVRRFQQDDAHIFCTVEQIEEEIKGCLQFLQSVYSTFGFSFQLNLSTRPENFLGEIEMWNEAEKQLQNSLMDFGEPWKMNPGDGAFYGPKIDIKIKDAIGRYHQCATIQLDFQLPIRFNLTYVSKDGDDKKRPVIIHRAILGSVERMIAILSENYGGKWPFWLSPRQVMVIPVGPTCEKYALQVSSEFFEEGFMADVDLDHSCTLNKKIRNAQLAQYNFILDRFLPSVWQEAWL

SEQ ID NO: 18580 - protein, 40 aa, Artificial Sequence
  Synthetic polypeptide
GHSGSHGELPRLSLCQDLLASPWELVRWPTSLRMRLHQPL

SEQ ID NO: 18581 - protein, 51 aa, Artificial Sequence
  Synthetic polypeptide
SRERHCSFFLIPWIAHFERSQLLCSEDTQAAMESSPGSHCARTYLPVLGSW

SEQ ID NO: 18582 - protein, 332 aa, Artificial Sequence
  Synthetic polypeptide
FLGLLTLREASCCALRTLRQPWRAPQALTVPGPTCQSLGAGEVANFAAYAFAPATLVTPLGALSVLVSAILSSYFLNERLNLHGKIGCLLSILGSTVMVIHAPKEEEIETLNEMSHKLGDPGFVVFATLVVIVALILIFVVGPRHGQTNILVYITICSVIGAFSVSCVKGLGIAIKELFAGKPVLRHPLAWILLLSLIVCVSTQINYLNRALDIFNTSIVTPIYYVFFTTSVLTCSAILFKEWQDMPVDDVIGTLSGFFTIIVGIFLLHAFKDVSFSLASLPVSFRKDEKAMNGNLSNMYEVLNNNEESLTCGIEQHTGENVSRRNGNLTAF

SEQ ID NO: 18583 - protein, 7 aa, Artificial Sequence
  Synthetic polypeptide
RKKTFKL

SEQ ID NO: 18584 - protein, 44 aa, Artificial Sequence
  Synthetic polypeptide
LEFGFTGITEGERTESPCVTGTGASASEERRHSNFKRILAEKQP

SEQ ID NO: 18585 - protein, 642 aa, Artificial Sequence
  Synthetic polypeptide
LKVKGQNHRVLLAQVHRLVKKEDIQTLKEYWQKNSPRVPAGANRNRKTNGSIPQTATSGGCQPPGDSATGFHREGPTSSATLKDLESPCQERAVVLDSRSVEISQLKNTIKSLKQQKKQVEHQLEEEKKANIKKQKAKRVLEVQIQTLNIQKEELNTDLYHMKRSLRYFEEKSKDLAVRLQHSLQRKGELESVLSDVMATQKKKANQLSSPSKAGTEWKLEQSMREEALLKVQLTQLKESFQQLQLERHEYAEHLKGERARWQQRMRKMSQEICTLKKEKQQDMRRVEKLERSLSKLKNQMAEPLPPEPPAVPSEVELQHLRKELERVAGALQAQVKNNQRISLLNRGQEERIREQEERLRKQEERIQEQHKSLQQLAKPQSVFEEPNNENKSALQLEQQVKELQEKLGEEHLEAASQQNQQLTAQLSLMALPGEGHGGEHLDSEGEEAPQPMPSVPEDLESREAMSSFMDHLEEKADLSELVKKKELCFIHHWRERCHQKTHHLLSEPGGRAKDAALGGGHHQAGAQGGDEGEAAGAAADGIAAYSNYNNGHRKFLAAAHNPADEPGPGAPAPQELGAADKHGDLCEVSLTSSAQGEAREDPLLDKPTAQPIVQDHQEHPGLGSNCCVPFFCWAWLPRRRR

SEQ ID NO: 18586 - protein, 12 aa, Artificial Sequence
  Synthetic polypeptide
FFLFYFRIWHAV

SEQ ID NO: 18587 - protein, 11 aa, Artificial Sequence
  Synthetic polypeptide
FFCFILGFGML

SEQ ID NO: 18588 - protein, 23 aa, Artificial Sequence
  Synthetic polypeptide
KYKKISQLWWRASVVPATWEAEM

SEQ ID NO: 18589 - protein, 18 aa, Artificial Sequence
  Synthetic polypeptide
SQLLGRLRCDLLNRREGI

SEQ ID NO: 18590 - protein, 476 aa, Artificial Sequence
  Synthetic polypeptide
DQPGQHSDGANDVSMIQVADVGVGISGQEGMQAVMASDFAVPKFRYLERLLILHGHWCYSRLANMVLYFFYKNTMFVGLLFWFQFFCGFSASTMIDQWYLIFFNLLFSSLPPLVTGVLDRDVPANVLLTNPQLYKSGQNMEEYRPRTFWFNMADAAFQSLVCFSIPYLAYYDSNVDLFTWGTPIVTIALLTFLLHLGIETKTWTWLNWITCGFSVLLFFTVALIYNASCATCYPPSNPYWTMQALLGDPVFYLTCLMTPVAALLPRLFFRSLQGRVFPTQLQLARQLTRKSPRRCSAPKETFAQGRLPKDSGTEHSSGRTVKTSVPLSQPSWHTQQPVCSLEASGEPSTVDMSMPVREHTLLEGLSAPAPMSSAPGEAVLRSPGGCPEESKVRAASTGRVTPLSSLFSLPTFSLLNWISSWSLVSRLGSVLQFSRTEQLADGQAGRGLPVQPHSGRSGLQGPDHRLLIGASSRRSQ

SEQ ID NO: 18591 - protein, 19 aa, Artificial Sequence
  Synthetic polypeptide
AREFETSLGNIVMEPMMSA

SEQ ID NO: 18592 - protein, 143 aa, Artificial Sequence
  Synthetic polypeptide
DQPGQHSDGANDVSMIQVADVGVGISGQEGMQEMLRETTAMETLAGHARTVFRMGIFLPCCVPCILRREDKSDARSASPVTGIPLPLKAVMASDFAVPKFRYLERLLILHGHWCYSRLANMVLYFFYKNTMFVGLLFWFQFFC

SEQ ID NO: 18593 - protein, 24 aa, Artificial Sequence
  Synthetic polypeptide
CGLRIQSFDVHQRDRMREAKQRPE

SEQ ID NO: 18594 - protein, 1282 aa, Artificial Sequence
  Synthetic polypeptide
VVSEFNPLTFTSVIECEKPNNDLSRFRGCIIHDNGKKAGLYKENLLLRGCTLRNTDAVVGIVIYAGHETKALLNNSGPRYKRSKLERQMNCDVLWCVLLLVCMSLFSAVGHGLWIWRYQEKKSLFYVPKSDGSSLSPVTAAVYSFLTMIIVLQVLIPISLYVSIEIVKACQVYFINQDMQLYDEETDSQLQCRALNITEDLGQIQYIFSDKTGTLTENKMVFRRCTVSGVEYSHDANAQRLARYQEADSEEEEVVPRGGSVSQRGSIGSHQSVRVVHRTQSTKSHRRTGSRAEAKRASMLSKHTAFSSPMEKDITPDPKLLEKVSECDKSLAVARHQEHLLAHLSPELSDVFDFFIALTICNTVVVTSPDQPRTKVRVRFELKSPVKTIEDFLRRFTPSCLTSGCSSIGSLAANKSSHKLGSSFPSTPSSDGMLLRLEERLGQPTSAIASNGYSSQADNWASELAQEQESERELRYEAESPDEAALVYAARAYNCVLVERLHDQVSVELPHLGRLTFELLHTLGFDSVRKRMSVVIRHPLTDEINVYTKGADSVVMDLLQPCSSVDARGRHQKKIRSKTQNYLNVYAAEGLRTLCIAKRVLSKEEYACWLQSHLEAESSLENSEELLFQSAIRLETNLHLLGATGIEDRLQDGVPETISKLRQAGLQIWVLTGDKQETAVNIAYACKLLDHDEEVITLNATSQEACAALLDQCLCYVQSRGLQRAPEKTKGKVSMRFSSLCPPSTSTASGRRPSLVIDGRSLAYALEKNLEDKFLFLAKQCRSVLCCRSTPLQKSMVVKLVRSKLKAMTLAIGDGANDVSMIQVADVGVGISGQEGMQAVMASDFAVPKFRYLERLLILHGHWCYSRLANMVLYFFYKNTMFVGLLFWFQFFCGFSASTMIDQWYLIFFNLLFSSLPPLVTGVLDRDVPANVLLTNPQLYKSGQNMEEYRPRTFWFNMADAAFQSLVCFSIPYLAYYDSNVDLFTWGTPIVTIALLTFLLHLGIETKTWTWLNWITCGFSVLLFFTVALIYNASCATCYPPSNPYWTMQALLGDPVFYLTCLMTPVAALLPRLFFRSLQGRVFPTQLQLARQLTRKSPRRCSAPKETFAQGRLPKDSGTEHSSGRTVKTSVPLSQPSWHTQQPVCSLEASGEPSTVDMSMPVREHTLLEGLSAPAPMSSAPGEAVLRSPGGCPEESKVRAASTGRVTPLSSLFSLPTFSLLNWISSWSLVSRLGSVLQFSRTEQLADGQAGRGLPVQPHSGRSGLQGPDHRLLIGASSRRSQ

SEQ ID NO: 18595 - protein, 377 aa, Artificial Sequence
  Synthetic polypeptide
VVSEFNPLTFTSVIECEKPNNDLSRFRGCIIHDNGKKAGLYKENLLLRGCTLRNTDAVVGIVIYAGHETKALLNNSGPRYKRSKLERQMNCDVLWCVLLLVCMSLFSAVGHGLWIWRYQEKKSLFYVPKSDGSSLSPVTAAVYSFLTMIIVLQVLIPISLYVSIEIVKACQVYFINQDMQLYDEETDSQLQCRALNITEDLGQIQYIFSDKTGTLTENKMVFRRCTVSGVEYSHDANAQRLARYQEADSEEEEVVPRGGSVSQRGSIGSHQSVRVVHRTQSTKSHRRTGSRAEAKRASMLSKHTAFSSPMEKDITPDPKLLEKVSECDKSLAVARHQEHLLAHLSPELSDVFDFFIALTICNTVVVTSPDQPRTKAR

SEQ ID NO: 18596 - protein, 28 aa, Artificial Sequence
  Synthetic polypeptide
SSDGPRGAAPHSRHCPGGVGLSPGVVPD

SEQ ID NO: 18597 - protein, 183 aa, Artificial Sequence
  Synthetic polypeptide
IGVSLKNKKLTQNHTTTWKLNNLLLNDSWVNNEIKAEIKKFFETKENKENLWDAAKAVMVPEEQRLIAAIVLVVWVSALASSLIDNIPFTATMIPVLLNLSHDPEVGLPAPPLMYALAFGACLGGNGTLIGASANVVCAGIAEQHGYGFSFMEFFRLGFPMMVVSCTVGMCYLLVAHVVVGWN

SEQ ID NO: 18598 - protein, 10 aa, Artificial Sequence
  Synthetic polypeptide
MTPGHWHIST

SEQ ID NO: 18599 - protein, 48 aa, Artificial Sequence
  Synthetic polypeptide
LLGIGTSPLNRICWRTNCFANKDGPRGAAPHSRHCPGGVGLSPGVVPD

SEQ ID NO: 18600 - protein, 174 aa, Artificial Sequence
  Synthetic polypeptide
IGVSLKNKKLTQNHTTTWKLNNLLLNDSWALAHLHLIEYVGEQTALLIKMVPEEQRLIAAIVLVVWVSALASSLIDNIPFTATMIPVLLNLSHDPEVGLPAPPLMYALAFGACLGGNGTLIGASANVVCAGIAEQHGYGFSFMEFFRLGFPMMVVSCTVGMCYLLVAHVVVGWN

SEQ ID NO: 18601 - protein, 26 aa, Artificial Sequence
  Synthetic polypeptide
KGLTLLCPRCPAPGLKIPALQKTLLC

SEQ ID NO: 18602 - protein, 21 aa, Artificial Sequence
  Synthetic polypeptide
IASDCVEKVSLFFAPDVQLQV

SEQ ID NO: 18603 - protein, 751 aa, Artificial Sequence
  Synthetic polypeptide
DAANRLLQTALKRSHSSLPQMSSSRSKDSCFTENTPLLRNSLQEKGSRCIPVYHPEFITAEESWEDSSADWERRYLLSREVSGLSASASSEKGDLLDSPHIRLRLSKLRRCVQWLKVMGLFAFVVLCSILFSLYPDQGKLWQLLALSPLENYSVNLSSHVDSTLLQVDLAGALVASGPSRPGREEHIVVELTQADALGSRWRRPQQVTHNWTVYLNPRRSEHSVMSRTFEVLTRETVSISIRASLQQTQAVPLLMAHQYLRGSVETQVTIATAILAGVYALIIFERPSLTHVVEWIDFETLALLFGMMILVAIFSETGFFDYCAVKAYRLSRGRVWAMIIMLCLIAAVLSAFLDNVTTMLLFTPVTIRLCEVLNLDPRQVLIAEVIFTNIGGAATAIGDPPNVIIVSNQELRKMGLDFAGFTAHMFIGICLVLLVCFPLLRLLYWNRKLYNKEPSEIVELKHEIHVWRLTAQRISPASREETAVRRLLLGKVLALEHLLARRLHTFHRQISQEDKNWETNIQELQKKHRISDGILLAKCLTVLGFVIFMFFLNSFVPGIHLDLGWIAILGAIWLLILADIHDFEIILHRVEWATLLFFAALFVLMEALAHLHLIEYVGEQTALLIKMVPEEQRLIAAIVLVVWVSALASSLIDNIPFTATMIPVLLNLSHDPEVGLPAPPLMYALAFGACLGGNGTLIGASANVVCAGIAEQHGYGFSFMEFFRLGFPMMVVSCTVGMCYLLVAHVVVGWN

SEQ ID NO: 18604 - protein, 775 aa, Artificial Sequence
  Synthetic polypeptide
DAANRLLQTALKRSHSSLPQMSSSRSKDSCFTENTPLLRNSLQEKGSRCIPVYHPEFITAEESWEDSSADWERRYLLSREVSGLSASASSEKGDLLDSPHIRLRLSKLRRCVQWLKVMGLFAFVVLCSILFSLYPDQGKLWQLLALSPLENYSVNLSSHVDSTLLQVDLAGALVASGPSRPGREEHIVVELTQADALGSRWRRPQQVTHNWTVYLNPRRSEHSVMSRTFEVLTRETVSISIRASLQQTQAVPLLMAHQYLRGSVETQVTIATAILAGVYALIIFEIVHRTLAAMLGSLAALAALAVIGDRPSLTHVVEWIDFETLALLFGMMILVAIFSETGFFDYCAVKAYRLSRGRVWAMIIMLCLIAAVLSAFLDNVTTMLLFTPVTIRLCEVLNLDPRQVLIAEVIFTNIGGAATAIGDPPNVIIVSNQELRKMGLDFAGFTAHMFIGICLVLLVCFPLLRLLYWNRKLYNKEPSEIVELKHEIHVWRLTAQRISPASREETAVRRLLLGKVLALEHLLARRLHTFHRQISQEDKNWETNIQELQKKHRISDGILLAKCLTVLGFVIFMFFLNSFVPGIHLDLGWIAILGAIWLLILADIHDFEIILHRVEWATLLFFAALFVLMEALAHLHLIEYVGEQTALLIKMVPEEQRLIAAIVLVVWVSALASSLIDNIPFTATMIPVLLNLSHDPEVGLPAPPLMYALAFGACLGGNGTLIGASANVVCAGIAEQHGYGFSFMEFFRLGFPMMVVSCTVGMCYLLVAHVVVGWN

SEQ ID NO: 18605 - protein, 605 aa, Artificial Sequence
  Synthetic polypeptide
DAANRLLQTALKRSHSSLPQMSSSRSKDSCFTENTPLLRNSLQEKGSRCIPVYHPEFITAEESWEDSSADWERRYLLSREVSGLSASASSEKGDLLDSPHIRLRLSKLRRCVQWLKVMGLFAFVVLCSILFSLYPDQGKLWQLLALSPLENYSVNLSSHVDSTLLQVDLAGALVASGPSRPGREEHIVVELTQADALGSRWRRPQQVTHNWTVYLNPRRSEHSVMSRTFEVLTRETVSISIRASLQQTQAVPLLMAHQYLRGSVETQVTIATAILAGVYALIIFEIVHRTLAAMLGSLAALAALAVIGDRPSLTHVVEWIDFETLALLFGMMILVAIFSETGFFDYCAVKAYRLSRGRVWAMIIMLCLIAAVLSAFLDNVTTMLLFTPVTIRLCEVLNLDPRQVLIAEVIFTNIGGAATAIGDPPNVIIVSNQELRKMGLDFAGFTAHMFIGICLVLLVCFPLLRLLYWNRKLYNKEPSEIVELKHEIHVWRLTAQRISPASREETAVRRLLLGKVLALEHLLARRLHTFHRQISQEDKNWETNIQELQKKHRISDGILLAKCLTVLGFVIFMFFLNSFVPGIHLDLGGLGLVQAGRYYLSTPES

SEQ ID NO: 18606 - protein, 155 aa, Artificial Sequence
  Synthetic polypeptide
DAANRLLQTALKRSHSSLPQMSSSRSKDSCFTENTPLLRNSLQEKGSRCIPVYHPEFITAEESWEDSSADWERRYLLSREVSGLSASASSEKGDLLDSPHIRLRLSKLRRCVQWLKVMGLFAFVVLCSVTHNWTVYLNPRRSEHSVMSRTFEVLT

SEQ ID NO: 18607 - protein, 201 aa, Artificial Sequence
  Synthetic polypeptide
DAANRLLQTALKRSHSSLPQMSSSRSKDSCFTENTPLLRNSLQEKGSRCIPVYHPEFITAEESWEDSSADWERRYLLSREVSGLSASASSEKGDLLDSPHIRLRLSKLRRCVQWLKVMGLFAFVVLCSILFSLYPDQGKLWQLLALSPLENYSVNLSSHVDSTLLQVDLAGALVASGPSRPGREEHIVVELTQADALGSRW

SEQ ID NO: 18608 - protein, 521 aa, Artificial Sequence
  Synthetic polypeptide
GWLWWLTPVIPTLWEAKVPMEYNHLQEIPIIALRNRLLLLHHLSELFCPCIPMFDLEGSLDETGLGPSVGFDTLRGILISQGKEAAFRKVVQATMVRDRQHGPVVELNRIQVKRSRSKGGLAGPDGTKSVFGQMCAKMSSFGPDSLLLPHRVWKVKFVGESVDDCGGGYSESIAEICEELQNGLTPLLIVTPNGRDESGANRDCYLLSPAARAPVHSSMFRFLGVLLGIAIRTGSPLSLNLAEPVWKQLAGMSLTIADLSEVDKDFIPGLMYIRDNEATSEEFEAMSLPFTVPSASGQDIQLSSKHTHITLDNRAEYVRLAINYRLHEFDEQVAAVREGMARVVPVPLLSLFTGYELETMVCGSPDIPLHLLKSVATYKGIEPSASLIQWFWEVMESFSNTERSLFLRFVWGRTRLPRTIADFRGRDFVIQVLDKYNPPDHFLPESYTCFFLLKLPRYSCKQVLEEKLKYAIHFCKSIDTDDYARIALTGEPAADDSSDDSDNEDVDSFASDSTQDYLTGH

SEQ ID NO: 18609 - protein, 23 aa, Artificial Sequence
  Synthetic polypeptide
SQHFGRPRSPWSTITCRRSPSLR

SEQ ID NO: 18610 - protein, 135 aa, Artificial Sequence
  Synthetic polypeptide
MVVVAHTCNPNTLGGQGPHGVQSPAGDPHHCAEEPSAAAAPPLRALLPLHPHVRPGRLARRNWTRAFCWVRHSPRNSDIPGKGGGFPESSTSNYGTRSSAWPRRGAEPHPGQTIKEQRRAGRPRRHQVCLWADVC

SEQ ID NO: 18611 - protein, 43 aa, Artificial Sequence
  Synthetic polypeptide
FMKEKYNLDFIKIMNCSSKDTMKRLKPQAGKGYSQSYNLTKSV

SEQ ID NO: 18612 - protein, 759 aa, Artificial Sequence
  Synthetic polypeptide
LSPCDRPRVIESLRGIEVVDVAAGGAHSACVTAAGDLYTWGKGRYGRLGHSDSEDQLKPKLVEALQGHRVVDIACGSGDAQTLCLTDDDTVWSWGDGDYGKLGRGGSDGCKVPMKIDSLTGLGVVKVECGSQFSVALTKSGAVYTWGKGDYHRLGHGSDDHVRRPRQVQGLQGKKVIAIATGSLHCVCCTEDGEVYTWGDNDEGQLGDGTTNAIQRPRLVAALQGKKVNRVACGSAHTLAWSTSKPASAGKLPAQVPMEYNHLQEIPIIALRNRLLLLHHLSELFCPCIPMFDLEGSLDETGLGPSVGFDTLRGILISQGKEAAFRKVVQATMVRDRQHGPVVELNRIQVKRSRSKGGLAGPDGTKSVFGQMCAKMSSFGPDSLLLPHRVWKVKFVGESVDDCGGGYSESIAEICEELQNGLTPLLIVTPNGRDESGANRDCYLLSPAARAPVHSSMFRFLGVLLGIAIRTGSPLSLNLAEPVWKQLAGMSLTIADLSEVDKDFIPGLMYIRDNEATSEEFEAMSLPFTVPSASGQDIQLSSKHTHITLDNRAEYVRLAINYRLHEFDEQVAAVREGMARVVPVPLLSLFTGYELETMVCGSPDIPLHLLKSVATYKGIEPSASLIQWFWEVMESFSNTERSLFLRFVWGRTRLPRTIADFRGRDFVIQVLDKYNPPDHFLPESYTCFFLLKLPRYSCKQVLEEKLKYAIHFCKSIDTDDYARIALTGEPAADDSSDDSDNEDVDSFASDSTQDYLTGH

SEQ ID NO: 18613 - protein, 5 aa, Artificial Sequence
  Synthetic polypeptide
QVKHC

SEQ ID NO: 18614 - protein, 12 aa, Artificial Sequence
  Synthetic polypeptide
LHLIGEPKPLDR

SEQ ID NO: 18615 - protein, 67 aa, Artificial Sequence
  Synthetic polypeptide
LENLNLLTGETLLSPLVMCGPHGLKFLKPVELRLPHCDPKTWQNKCLPGDPNYLVGANCVSVLIDHF

SEQ ID NO: 18616 - protein, 87 aa, Artificial Sequence
  Synthetic polypeptide
LENLNLLTGETLLSPLVMCGPHGLKFLKPVELRLPHCASMTPDGWSFALKSSDSSSGDPKTWQNKCLPGDPNYLVGANCVSVLIDHF

SEQ ID NO: 18617 - protein, 74 aa, Artificial Sequence
  Synthetic polypeptide
LENLNLLTGETLLSPLVMCGPHGLKFLKPVELRLPHCASMTPDGDPKTWQNKCLPGDPNYLVGANCVSVLIDHF

SEQ ID NO: 18618 - protein, 46 aa, Artificial Sequence
  Synthetic polypeptide
NQNELAHDPAIPLLGTYPKEMKSLSRRDICTLMFVAALFTIAKSPE

SEQ ID NO: 18619 - protein, 1413 aa, Artificial Sequence
  Synthetic polypeptide
PSLRSRDEERISKPGAVSTPVKHADDHTPKTVEEVTVERNEKQTPSLPEPKPVYAQVGQPDVDLPVSPSDGVLPNSTHEDGILRPSMKLVKFRKGDSVGLRLAGGNDVGIFVAGVLEDSPAAKEGLEEGDQILRVNNVDFTNIIREEAVLFLLDLPKGEEVTILAQKKKDVYRRIVESDVGDSFYIRTHFEYEKESPYGLSFNKGEVFRVVDTLYNGKLGSWLAIRIGKNHKEVERGIIPNKNRAEQLASVQYTLPKTAGGDRADFWRFRGLRSSKRNLRKSREDLSAQPVQTKFPAYERVVLREAGFLRPVTIFGPIADVAREKLAREEPDIYQIAKSEPRDAGTDQRSSGIIRLHTIKQIIDQDKHALLDVTPNAVDRLNYAQWYPIVVFLNPDSKQGVKTMRMRLCPESRKSARKLYERSHKLRKNNHHLFTTTINLNSMNDGWYGALKEAIQQQQNQLVWVSEGKADGATSDDLDLHDDRLSYLSAPGSEYSMYSTDSRHTSDYEDTDTEGGAYTDQELDETLNDEVGTPPESAITRSSEPVREDSSGMHHENQTYPPYSPQAQPQPIHRIDSPGFKPASQQKAEASSPVPYLSPETNPASSTSAVNHNVNLTNVRLEEPTPAPSTSYSPQADSLRTPSTEAAHIMLRDQEPSLSSHVDPTKVYRKDPYPEEMMRQNHVLKQPAVSHPGHRPDKEPNLTYEPQLPYVEKQASRDLEQPTYRYESSSYTDQFSRNYEHRLRYEDRVPMYEEQWSYYDDKQPYPSRPPFDNQHSQDLDSRQHPEESSERGYFPRFEEPAPLSYDSRPRYEQAPRASALRHEEQPAPGYDTHGRLRPEAQPHPSAGPKPAESKQYFEQYSRSYEQVPPQGFTSRAGHFEPLHGAAAVPPLIPSSQHKPEALPSNTKPLPPPPTQTEEEEDPAMKPQSVLTRVKMFENKRSASLETKKDVNDTGSFKPPEVASKPSGAPIIGPKPTSQNQFSEHDKTLYRIPEPQKPQLKPPEDIVRSNHYDPEEDEEYYRKQLSYFDRRSFENKPPAHIAASHLSEPAKPAHSQNQSNFSSYSSKGKPPEADGVDRSFGEKRYEPIQATPPPPPLPSQYAQPSQPVTSASLHIHSKGAHGEGNSVSLDFQNSLVSKPDPPPSQNKPATFRPPNREDTAQAAFYPQKSFPDKAPVNGTEQTQKTVTPAYNRFTPKPYTSSARPFERKFESPKFNHNLLPSETAHKPDLSSKTPTSPKTLVKSHSLAQPPEFDSGVETFSIHAEKPKYQINNISTVPKAIPVSPSAVEEDEDEDGHTVVATARGIFNSNGGVLSSIETGVSIIIPQGAIPEGVEQEIYFKVCRDNSILPPLDKEKGETLLSPLVMCGPHGLKFLKPVELRLPHCDPKTWQNKCLPGDPNYLVGANCVSVLIDHF

SEQ ID NO: 18620 - protein, 54 aa, Artificial Sequence
  Synthetic polypeptide
SSNSTSGYISKGNEITVSKRYLHSHVCCSIIHNSQVSGVEMKREFLNLGLSQLL

SEQ ID NO: 18621 - protein, 1353 aa, Artificial Sequence
  Synthetic polypeptide
PSLRSRDEERISKPGAVSTPVKHADDHTPKTVEEVTVERNEKQTPSLPEPKPVYAQVGQPDVDLPVSPSDGVLPNSTHEDGILRPSMKLVKFRKGDSVGLRLAGGNDVGIFVAGVLEDSPAAKEGLEEGDQILRVNNVDFTNIIREEAVLFLLDLPKGEEVTILAQKKKDVYRRIVESDVGDSFYIRTHFEYEKESPYGLSFNKGEVFRVVDTLYNGKLGSWLAIRIGKNHKEVERGIIPNKNRAEQLASVQYTLPKTAGGDRADFWRFRGLRSSKRNLRKSREDLSAQPVQTKFPAYERVVLREAGFLRPVTIFGPIADVAREKLAREEPDIYQIAKSEPRDAGTDQRSSGIIRLHTIKQIIDQDKHALLDVTPNAVDRLNYAQWYPIVVFLNPDSKQGVKTMRMRLCPESRKSARKLYERSHKLRKNNHHLFTTTINLNSMNDGWYGALKEAIQQQQNQLVWVSEGKADGATSDDLDLHDDRLSYLSAPGSEYSMYSTDSRHTSDYEDTDTEGGAYTDQELDETLNDEVGTPPESAITRSSEPVREDSSGMHHENQTYPPYSPQAQPQPIHRIDSPGFKPASQQVYRKDPYPEEMMRQNHVLKQPAVSHPGHRPDKEPNLTYEPQLPYVEKQASRDLEQPTYRYESSSYTDQFSRNYEHRLRYEDRVPMYEEQWSYYDDKQPYPSRPPFDNQHSQDLDSRQHPEESSERGYFPRFEEPAPLSYDSRPRYEQAPRASALRHEEQPAPGYDTHGRLRPEAQPHPSAGPKPAESKQYFEQYSRSYEQVPPQGFTSRAGHFEPLHGAAAVPPLIPSSQHKPEALPSNTKPLPPPPTQTEEEEDPAMKPQSVLTRVKMFENKRSASLETKKDVNDTGSFKPPEVASKPSGAPIIGPKPTSQNQFSEHDKTLYRIPEPQKPQLKPPEDIVRSNHYDPEEDEEYYRKQLSYFDRRSFENKPPAHIAASHLSEPAKPAHSQNQSNFSSYSSKGKPPEADGVDRSFGEKRYEPIQATPPPPPLPSQYAQPSQPVTSASLHIHSKGAHGEGNSVSLDFQNSLVSKPDPPPSQNKPATFRPPNREDTAQAAFYPQKSFPDKAPVNGTEQTQKTVTPAYNRFTPKPYTSSARPFERKFESPKFNHNLLPSETAHKPDLSSKTPTSPKTLVKSHSLAQPPEFDSGVETFSIHAEKPKYQINNISTVPKAIPVSPSAVEEDEDEDGHTVVATARGIFNSNGGVLSSIETGVSIIIPQGAIPEGVEQEIYFKVCRDNSILPPLDKEKGETLLSPLVMCGPHGLKFLKPVELRLPHCASMTPDGWSFALKSSDSSSGDPKTWQNKCLPGDPNYLVGANCVSVLIDHF

SEQ ID NO: 18622 - protein, 1433 aa, Artificial Sequence
  Synthetic polypeptide
PSLRSRDEERISKPGAVSTPVKHADDHTPKTVEEVTVERNEKQTPSLPEPKPVYAQVGQPDVDLPVSPSDGVLPNSTHEDGILRPSMKLVKFRKGDSVGLRLAGGNDVGIFVAGVLEDSPAAKEGLEEGDQILRVNNVDFTNIIREEAVLFLLDLPKGEEVTILAQKKKDVYRRIVESDVGDSFYIRTHFEYEKESPYGLSFNKGEVFRVVDTLYNGKLGSWLAIRIGKNHKEVERGIIPNKNRAEQLASVQYTLPKTAGGDRADFWRFRGLRSSKRNLRKSREDLSAQPVQTKFPAYERVVLREAGFLRPVTIFGPIADVAREKLAREEPDIYQIAKSEPRDAGTDQRSSGIIRLHTIKQIIDQDKHALLDVTPNAVDRLNYAQWYPIVVFLNPDSKQGVKTMRMRLCPESRKSARKLYERSHKLRKNNHHLFTTTINLNSMNDGWYGALKEAIQQQQNQLVWVSEGKADGATSDDLDLHDDRLSYLSAPGSEYSMYSTDSRHTSDYEDTDTEGGAYTDQELDETLNDEVGTPPESAITRSSEPVREDSSGMHHENQTYPPYSPQAQPQPIHRIDSPGFKPASQQKAEASSPVPYLSPETNPASSTSAVNHNVNLTNVRLEEPTPAPSTSYSPQADSLRTPSTEAAHIMLRDQEPSLSSHVDPTKVYRKDPYPEEMMRQNHVLKQPAVSHPGHRPDKEPNLTYEPQLPYVEKQASRDLEQPTYRYESSSYTDQFSRNYEHRLRYEDRVPMYEEQWSYYDDKQPYPSRPPFDNQHSQDLDSRQHPEESSERGYFPRFEEPAPLSYDSRPRYEQAPRASALRHEEQPAPGYDTHGRLRPEAQPHPSAGPKPAESKQYFEQYSRSYEQVPPQGFTSRAGHFEPLHGAAAVPPLIPSSQHKPEALPSNTKPLPPPPTQTEEEEDPAMKPQSVLTRVKMFENKRSASLETKKDVNDTGSFKPPEVASKPSGAPIIGPKPTSQNQFSEHDKTLYRIPEPQKPQLKPPEDIVRSNHYDPEEDEEYYRKQLSYFDRRSFENKPPAHIAASHLSEPAKPAHSQNQSNFSSYSSKGKPPEADGVDRSFGEKRYEPIQATPPPPPLPSQYAQPSQPVTSASLHIHSKGAHGEGNSVSLDFQNSLVSKPDPPPSQNKPATFRPPNREDTAQAAFYPQKSFPDKAPVNGTEQTQKTVTPAYNRFTPKPYTSSARPFERKFESPKFNHNLLPSETAHKPDLSSKTPTSPKTLVKSHSLAQPPEFDSGVETFSIHAEKPKYQINNISTVPKAIPVSPSAVEEDEDEDGHTVVATARGIFNSNGGVLSSIETGVSIIIPQGAIPEGVEQEIYFKVCRDNSILPPLDKEKGETLLSPLVMCGPHGLKFLKPVELRLPHCASMTPDGWSFALKSSDSSSGDPKTWQNKCLPGDPNYLVGANCVSVLIDHF

SEQ ID NO: 18623 - protein, 1333 aa, Artificial Sequence
  Synthetic polypeptide
PSLRSRDEERISKPGAVSTPVKHADDHTPKTVEEVTVERNEKQTPSLPEPKPVYAQVGQPDVDLPVSPSDGVLPNSTHEDGILRPSMKLVKFRKGDSVGLRLAGGNDVGIFVAGVLEDSPAAKEGLEEGDQILRVNNVDFTNIIREEAVLFLLDLPKGEEVTILAQKKKDVYRRIVESDVGDSFYIRTHFEYEKESPYGLSFNKGEVFRVVDTLYNGKLGSWLAIRIGKNHKEVERGIIPNKNRAEQLASVQYTLPKTAGGDRADFWRFRGLRSSKRNLRKSREDLSAQPVQTKFPAYERVVLREAGFLRPVTIFGPIADVAREKLAREEPDIYQIAKSEPRDAGTDQRSSGIIRLHTIKQIIDQDKHALLDVTPNAVDRLNYAQWYPIVVFLNPDSKQGVKTMRMRLCPESRKSARKLYERSHKLRKNNHHLFTTTINLNSMNDGWYGALKEAIQQQQNQLVWVSEGKADGATSDDLDLHDDRLSYLSAPGSEYSMYSTDSRHTSDYEDTDTEGGAYTDQELDETLNDEVGTPPESAITRSSEPVREDSSGMHHENQTYPPYSPQAQPQPIHRIDSPGFKPASQQVYRKDPYPEEMMRQNHVLKQPAVSHPGHRPDKEPNLTYEPQLPYVEKQASRDLEQPTYRYESSSYTDQFSRNYEHRLRYEDRVPMYEEQWSYYDDKQPYPSRPPFDNQHSQDLDSRQHPEESSERGYFPRFEEPAPLSYDSRPRYEQAPRASALRHEEQPAPGYDTHGRLRPEAQPHPSAGPKPAESKQYFEQYSRSYEQVPPQGFTSRAGHFEPLHGAAAVPPLIPSSQHKPEALPSNTKPLPPPPTQTEEEEDPAMKPQSVLTRVKMFENKRSASLETKKDVNDTGSFKPPEVASKPSGAPIIGPKPTSQNQFSEHDKTLYRIPEPQKPQLKPPEDIVRSNHYDPEEDEEYYRKQLSYFDRRSFENKPPAHIAASHLSEPAKPAHSQNQSNFSSYSSKGKPPEADGVDRSFGEKRYEPIQATPPPPPLPSQYAQPSQPVTSASLHIHSKGAHGEGNSVSLDFQNSLVSKPDPPPSQNKPATFRPPNREDTAQAAFYPQKSFPDKAPVNGTEQTQKTVTPAYNRFTPKPYTSSARPFERKFESPKFNHNLLPSETAHKPDLSSKTPTSPKTLVKSHSLAQPPEFDSGVETFSIHAEKPKYQINNISTVPKAIPVSPSAVEEDEDEDGHTVVATARGIFNSNGGVLSSIETGVSIIIPQGAIPEGVEQEIYFKVCRDNSILPPLDKEKGETLLSPLVMCGPHGLKFLKPVELRLPHCDPKTWQNKCLPGDPNYLVGANCVSVLIDHF

SEQ ID NO: 18624 - protein, 51 aa, Artificial Sequence
  Synthetic polypeptide
NLKCKIQNFSSDDVMFKGNAHWNILNFGFSDYGCRTGSWIWIWNCNIWWTR

SEQ ID NO: 18625 - protein, 1731 aa, Artificial Sequence
  Synthetic polypeptide
ILDFQIMGAELAPGFGFGIAISGGRDNPHFQSGETSIVISDVLKGGPAEGQLQENDRVAMVNGVSMDNVEHAFAVQQLRKSGKNAKITIRRKKKVQIPVSRPDPEPVSDNEEDSYDEEIHDPRSGRSGVVNRRSEKIWPRDRSASRERSLSPRSDRRSVASSQPAKPTKVTLVKSRKNEEYGLRLASHIFVKEISQDSLAARDGNIQEGDVVLKINGTVTENMSLTDAKTLIERSKGKLKMVVQRDERATLLNVPDLSDSIHSANASERDDISEIQSLASDHSGRSHDRPPRRSRSRSPDQRSEPSDHSRHSPQQPSNGSLRSRDEERISKPGAVSTPVKHADDHTPKTVEEVTVERNEKQTPSLPEPKPVYAQVGQPDVDLPVSPSDGVLPNSTHEDGILRPSMKLVKFRKGDSVGLRLAGGNDVGIFVAGVLEDSPAAKEGLEEGDQILRVNNVDFTNIIREEAVLFLLDLPKGEEVTILAQKKKDVYRRIVESDVGDSFYIRTHFEYEKESPYGLSFNKGEVFRVVDTLYNGKLGSWLAIRIGKNHKEVERGIIPNKNRAEQLASVQYTLPKTAGGDRADFWRFRGLRSSKRNLRKSREDLSAQPVQTKFPAYERVVLREAGFLRPVTIFGPIADVAREKLAREEPDIYQIAKSEPRDAGTDQRSSGIIRLHTIKQIIDQDKHALLDVTPNAVDRLNYAQWYPIVVFLNPDSKQGVKTMRMRLCPESRKSARKLYERSHKLRKNNHHLFTTTINLNSMNDGWYGALKEAIQQQQNQLVWVSEGKADGATSDDLDLHDDRLSYLSAPGSEYSMYSTDSRHTSDYEDTDTEGGAYTDQELDETLNDEVGTPPESAITRSSEPVREDSSGMHHENQTYPPYSPQAQPQPIHRIDSPGFKPASQQKAEASSPVPYLSPETNPASSTSAVNHNVNLTNVRLEEPTPAPSTSYSPQADSLRTPSTEAAHIMLRDQEPSLSSHVDPTKVYRKDPYPEEMMRQNHVLKQPAVSHPGHRPDKEPNLTYEPQLPYVEKQASRDLEQPTYRYESSSYTDQFSRNYEHRLRYEDRVPMYEEQWSYYDDKQPYPSRPPFDNQHSQDLDSRQHPEESSERGYFPRFEEPAPLSYDSRPRYEQAPRASALRHEEQPAPGYDTHGRLRPEAQPHPSAGPKPAESKQYFEQYSRSYEQVPPQGFTSRAGHFEPLHGAAAVPPLIPSSQHKPEALPSNTKPLPPPPTQTEEEEDPAMKPQSVLTRVKMFENKRSASLETKKDVNDTGSFKPPEVASKPSGAPIIGPKPTSQNQFSEHDKTLYRIPEPQKPQLKPPEDIVRSNHYDPEEDEEYYRKQLSYFDRRSFENKPPAHIAASHLSEPAKPAHSQNQSNFSSYSSKGKPPEADGVDRSFGEKRYEPIQATPPPPPLPSQYAQPSQPVTSASLHIHSKGAHGEGNSVSLDFQNSLVSKPDPPPSQNKPATFRPPNREDTAQAAFYPQKSFPDKAPVNGTEQTQKTVTPAYNRFTPKPYTSSARPFERKFESPKFNHNLLPSETAHKPDLSSKTPTSPKTLVKSHSLAQPPEFDSGVETFSIHAEKPKYQINNISTVPKAIPVSPSAVEEDEDEDGHTVVATARGIFNSNGGVLSSIETGVSIIIPQGAIPEGVEQEIYFKVCRDNSILPPLDKEKGETLLSPLVMCGPHGLKFLKPVELRLPHCDPKTWQNKCLPGDPNYLVGANCVSVLIDHF

SEQ ID NO: 18626 - protein, 45 aa, Artificial Sequence
  Synthetic polypeptide
RKCSLEHSEFWIFRLWVPNWLLDLDLELQYLVDEIILIFRVGKRQ

SEQ ID NO: 18627 - protein, 1671 aa, Artificial Sequence
  Synthetic polypeptide
ILDFQIMGAELAPGFGFGIAISGGRDNPHFQSGETSIVISDVLKGGPAEGQLQENDRVAMVNGVSMDNVEHAFAVQQLRKSGKNAKITIRRKKKVQIPVSRPDPEPVSDNEEDSYDEEIHDPRSGRSGVVNRRSEKIWPRDRSASRERSLSPRSDRRSVASSQPAKPTKVTLVKSRKNEEYGLRLASHIFVKEISQDSLAARDGNIQEGDVVLKINGTVTENMSLTDAKTLIERSKGKLKMVVQRDERATLLNVPDLSDSIHSANASERDDISEIQSLASDHSGRSHDRPPRRSRSRSPDQRSEPSDHSRHSPQQPSNGSLRSRDEERISKPGAVSTPVKHADDHTPKTVEEVTVERNEKQTPSLPEPKPVYAQVGQPDVDLPVSPSDGVLPNSTHEDGILRPSMKLVKFRKGDSVGLRLAGGNDVGIFVAGVLEDSPAAKEGLEEGDQILRVNNVDFTNIIREEAVLFLLDLPKGEEVTILAQKKKDVYRRIVESDVGDSFYIRTHFEYEKESPYGLSFNKGEVFRVVDTLYNGKLGSWLAIRIGKNHKEVERGIIPNKNRAEQLASVQYTLPKTAGGDRADFWRFRGLRSSKRNLRKSREDLSAQPVQTKFPAYERVVLREAGFLRPVTIFGPIADVAREKLAREEPDIYQIAKSEPRDAGTDQRSSGIIRLHTIKQIIDQDKHALLDVTPNAVDRLNYAQWYPIVVFLNPDSKQGVKTMRMRLCPESRKSARKLYERSHKLRKNNHHLFTTTINLNSMNDGWYGALKEAIQQQQNQLVWVSEGKADGATSDDLDLHDDRLSYLSAPGSEYSMYSTDSRHTSDYEDTDTEGGAYTDQELDETLNDEVGTPPESAITRSSEPVREDSSGMHHENQTYPPYSPQAQPQPIHRIDSPGFKPASQQVYRKDPYPEEMMRQNHVLKQPAVSHPGHRPDKEPNLTYEPQLPYVEKQASRDLEQPTYRYESSSYTDQFSRNYEHRLRYEDRVPMYEEQWSYYDDKQPYPSRPPFDNQHSQDLDSRQHPEESSERGYFPRFEEPAPLSYDSRPRYEQAPRASALRHEEQPAPGYDTHGRLRPEAQPHPSAGPKPAESKQYFEQYSRSYEQVPPQGFTSRAGHFEPLHGAAAVPPLIPSSQHKPEALPSNTKPLPPPPTQTEEEEDPAMKPQSVLTRVKMFENKRSASLETKKDVNDTGSFKPPEVASKPSGAPIIGPKPTSQNQFSEHDKTLYRIPEPQKPQLKPPEDIVRSNHYDPEEDEEYYRKQLSYFDRRSFENKPPAHIAASHLSEPAKPAHSQNQSNFSSYSSKGKPPEADGVDRSFGEKRYEPIQATPPPPPLPSQYAQPSQPVTSASLHIHSKGAHGEGNSVSLDFQNSLVSKPDPPPSQNKPATFRPPNREDTAQAAFYPQKSFPDKAPVNGTEQTQKTVTPAYNRFTPKPYTSSARPFERKFESPKFNHNLLPSETAHKPDLSSKTPTSPKTLVKSHSLAQPPEFDSGVETFSIHAEKPKYQINNISTVPKAIPVSPSAVEEDEDEDGHTVVATARGIFNSNGGVLSSIETGVSIIIPQGAIPEGVEQEIYFKVCRDNSILPPLDKEKGETLLSPLVMCGPHGLKFLKPVELRLPHCASMTPDGWSFALKSSDSSSGDPKTWQNKCLPGDPNYLVGANCVSVLIDHF

SEQ ID NO: 18628 - protein, 1751 aa, Artificial Sequence
  Synthetic polypeptide
ILDFQIMGAELAPGFGFGIAISGGRDNPHFQSGETSIVISDVLKGGPAEGQLQENDRVAMVNGVSMDNVEHAFAVQQLRKSGKNAKITIRRKKKVQIPVSRPDPEPVSDNEEDSYDEEIHDPRSGRSGVVNRRSEKIWPRDRSASRERSLSPRSDRRSVASSQPAKPTKVTLVKSRKNEEYGLRLASHIFVKEISQDSLAARDGNIQEGDVVLKINGTVTENMSLTDAKTLIERSKGKLKMVVQRDERATLLNVPDLSDSIHSANASERDDISEIQSLASDHSGRSHDRPPRRSRSRSPDQRSEPSDHSRHSPQQPSNGSLRSRDEERISKPGAVSTPVKHADDHTPKTVEEVTVERNEKQTPSLPEPKPVYAQVGQPDVDLPVSPSDGVLPNSTHEDGILRPSMKLVKFRKGDSVGLRLAGGNDVGIFVAGVLEDSPAAKEGLEEGDQILRVNNVDFTNIIREEAVLFLLDLPKGEEVTILAQKKKDVYRRIVESDVGDSFYIRTHFEYEKESPYGLSFNKGEVFRVVDTLYNGKLGSWLAIRIGKNHKEVERGIIPNKNRAEQLASVQYTLPKTAGGDRADFWRFRGLRSSKRNLRKSREDLSAQPVQTKFPAYERVVLREAGFLRPVTIFGPIADVAREKLAREEPDIYQIAKSEPRDAGTDQRSSGIIRLHTIKQIIDQDKHALLDVTPNAVDRLNYAQWYPIVVFLNPDSKQGVKTMRMRLCPESRKSARKLYERSHKLRKNNHHLFTTTINLNSMNDGWYGALKEAIQQQQNQLVWVSEGKADGATSDDLDLHDDRLSYLSAPGSEYSMYSTDSRHTSDYEDTDTEGGAYTDQELDETLNDEVGTPPESAITRSSEPVREDSSGMHHENQTYPPYSPQAQPQPIHRIDSPGFKPASQQKAEASSPVPYLSPETNPASSTSAVNHNVNLTNVRLEEPTPAPSTSYSPQADSLRTPSTEAAHIMLRDQEPSLSSHVDPTKVYRKDPYPEEMMRQNHVLKQPAVSHPGHRPDKEPNLTYEPQLPYVEKQASRDLEQPTYRYESSSYTDQFSRNYEHRLRYEDRVPMYEEQWSYYDDKQPYPSRPPFDNQHSQDLDSRQHPEESSERGYFPRFEEPAPLSYDSRPRYEQAPRASALRHEEQPAPGYDTHGRLRPEAQPHPSAGPKPAESKQYFEQYSRSYEQVPPQGFTSRAGHFEPLHGAAAVPPLIPSSQHKPEALPSNTKPLPPPPTQTEEEEDPAMKPQSVLTRVKMFENKRSASLETKKDVNDTGSFKPPEVASKPSGAPIIGPKPTSQNQFSEHDKTLYRIPEPQKPQLKPPEDIVRSNHYDPEEDEEYYRKQLSYFDRRSFENKPPAHIAASHLSEPAKPAHSQNQSNFSSYSSKGKPPEADGVDRSFGEKRYEPIQATPPPPPLPSQYAQPSQPVTSASLHIHSKGAHGEGNSVSLDFQNSLVSKPDPPPSQNKPATFRPPNREDTAQAAFYPQKSFPDKAPVNGTEQTQKTVTPAYNRFTPKPYTSSARPFERKFESPKFNHNLLPSETAHKPDLSSKTPTSPKTLVKSHSLAQPPEFDSGVETFSIHAEKPKYQINNISTVPKAIPVSPSAVEEDEDEDGHTVVATARGIFNSNGGVLSSIETGVSIIIPQGAIPEGVEQEIYFKVCRDNSILPPLDKEKGETLLSPLVMCGPHGLKFLKPVELRLPHCASMTPDGWSFALKSSDSSSGDPKTWQNKCLPGDPNYLVGANCVSVLIDHF

SEQ ID NO: 18629 - protein, 1651 aa, Artificial Sequence
  Synthetic polypeptide
ILDFQIMGAELAPGFGFGIAISGGRDNPHFQSGETSIVISDVLKGGPAEGQLQENDRVAMVNGVSMDNVEHAFAVQQLRKSGKNAKITIRRKKKVQIPVSRPDPEPVSDNEEDSYDEEIHDPRSGRSGVVNRRSEKIWPRDRSASRERSLSPRSDRRSVASSQPAKPTKVTLVKSRKNEEYGLRLASHIFVKEISQDSLAARDGNIQEGDVVLKINGTVTENMSLTDAKTLIERSKGKLKMVVQRDERATLLNVPDLSDSIHSANASERDDISEIQSLASDHSGRSHDRPPRRSRSRSPDQRSEPSDHSRHSPQQPSNGSLRSRDEERISKPGAVSTPVKHADDHTPKTVEEVTVERNEKQTPSLPEPKPVYAQVGQPDVDLPVSPSDGVLPNSTHEDGILRPSMKLVKFRKGDSVGLRLAGGNDVGIFVAGVLEDSPAAKEGLEEGDQILRVNNVDFTNIIREEAVLFLLDLPKGEEVTILAQKKKDVYRRIVESDVGDSFYIRTHFEYEKESPYGLSFNKGEVFRVVDTLYNGKLGSWLAIRIGKNHKEVERGIIPNKNRAEQLASVQYTLPKTAGGDRADFWRFRGLRSSKRNLRKSREDLSAQPVQTKFPAYERVVLREAGFLRPVTIFGPIADVAREKLAREEPDIYQIAKSEPRDAGTDQRSSGIIRLHTIKQIIDQDKHALLDVTPNAVDRLNYAQWYPIVVFLNPDSKQGVKTMRMRLCPESRKSARKLYERSHKLRKNNHHLFTTTINLNSMNDGWYGALKEAIQQQQNQLVWVSEGKADGATSDDLDLHDDRLSYLSAPGSEYSMYSTDSRHTSDYEDTDTEGGAYTDQELDETLNDEVGTPPESAITRSSEPVREDSSGMHHENQTYPPYSPQAQPQPIHRIDSPGFKPASQQVYRKDPYPEEMMRQNHVLKQPAVSHPGHRPDKEPNLTYEPQLPYVEKQASRDLEQPTYRYESSSYTDQFSRNYEHRLRYEDRVPMYEEQWSYYDDKQPYPSRPPFDNQHSQDLDSRQHPEESSERGYFPRFEEPAPLSYDSRPRYEQAPRASALRHEEQPAPGYDTHGRLRPEAQPHPSAGPKPAESKQYFEQYSRSYEQVPPQGFTSRAGHFEPLHGAAAVPPLIPSSQHKPEALPSNTKPLPPPPTQTEEEEDPAMKPQSVLTRVKMFENKRSASLETKKDVNDTGSFKPPEVASKPSGAPIIGPKPTSQNQFSEHDKTLYRIPEPQKPQLKPPEDIVRSNHYDPEEDEEYYRKQLSYFDRRSFENKPPAHIAASHLSEPAKPAHSQNQSNFSSYSSKGKPPEADGVDRSFGEKRYEPIQATPPPPPLPSQYAQPSQPVTSASLHIHSKGAHGEGNSVSLDFQNSLVSKPDPPPSQNKPATFRPPNREDTAQAAFYPQKSFPDKAPVNGTEQTQKTVTPAYNRFTPKPYTSSARPFERKFESPKFNHNLLPSETAHKPDLSSKTPTSPKTLVKSHSLAQPPEFDSGVETFSIHAEKPKYQINNISTVPKAIPVSPSAVEEDEDEDGHTVVATARGIFNSNGGVLSSIETGVSIIIPQGAIPEGVEQEIYFKVCRDNSILPPLDKEKGETLLSPLVMCGPHGLKFLKPVELRLPHCDPKTWQNKCLPGDPNYLVGANCVSVLIDHF

SEQ ID NO: 18630 - protein, 366 aa, Artificial Sequence
  Synthetic polypeptide
ILDFQIMGAELAPGFGFGIAISGGRDNPHFQSGETSIVISDVLKGGPAEGQLQENDRVAMVNGVSMDNVEHAFAVQQLRKSGKNAKITIRRKKKVQIPVSRPDPEPVSDNEEDSYDEEIHDPRSGRSGVVNRRSEKIWPRDRSASRERSLSPRSDRRSVASSQPAKPTKVTLVKSRKNEEYGLRLASHIFVKEISQDSLAARDGNIQEGDVVLKINGTVTENMSLTDAKTLIERSKGKLKMVVQRDERATLLNVPDLSDSIHSANASERDDISEIQSLASDHSGRSHDRPPRRSRSRSPDQRSEPSDHSRHSPQQPSNGRVTRTFENLKKIMILLSRKMCMCTYTQQLHTISGDSQGSIGHHLTHG

SEQ ID NO: 18631 - protein, 121 aa, Artificial Sequence
  Synthetic polypeptide
ILDFQIMGAELAPGFGFGIAISGGRDNPHFQSGETSIVISDVLKGGPAEGQLQENDRVAMVNGVSMDNVEHAFAVQQLRKSGKNAKITIRRKKKVQIPVSRPDPEPVSDNEEDSYDEEIHD

SEQ ID NO: 18632 - protein, 92 aa, Artificial Sequence
  Synthetic polypeptide
DWLSRAPYFCHDSVPNLLFDSGQATSPFWARVSRGGKTTEETSGTSAGRRKESKQQETESQKGARGSNPDIEHTERGTKYGPVPHETFSQIL

SEQ ID NO: 18633 - protein, 564 aa, Artificial Sequence
  Synthetic polypeptide
TGCQGPRISAMTQSLICSLILDKPPLLFGLVFPEEVKQQKKQVEHQLEEEKKANNKKQKAKRVLEVQIQTLNIQKEELNTDLYHMKRSLRYFEEKSKDLAVRLQHSLQRKGELESVLSNVMATQKKKANQLSSRSKARTEWKLEQSMREETLLKVQLTQLKESFQQVQLERDEYSEHLKGERARWQQRMRKMSQEICTLKKEKQQDMRRVEELERSLSKLKNQMAEPLPPEPPAVPSEVELQHLRKELERVAGELQAQVKKNQRISLLNQRQEERIQEQEERLRKQEERIQEQHKSLQQLAKPQSVFEEPNNENKNALQLEQQVKELQEKLGEEHLEAASQQNQQLTAQLSLMALPGEGHGGEHLDSEGEEAPQPMPSVPEDLESREAMSSFMDHLKEKADLSELVKKELCFIHHWRDRRHQKTHHLLSEPGGCAKDAALGGGHHQAGAQGGDEGEAAGAAADGIAAYSNYNNGHRKFLAAAHNPADEPGPGAPAPQELGAADKHGDLREVSLTSSAQGEAREDPLLDKPTAQPIVQDHQEHPGLGSNCCVPFLCWAWLPRRRR

SEQ ID NO: 18634 - protein, 92 aa, Artificial Sequence
  Synthetic polypeptide
DWLSRAPYFCHDSVPNLLFDSGQATSPFWARVSRGGKTTEETSGTSAGRRKESKQRETESRKGARGSNPDIDHTERGTKYGPVPHGTFSQIL

SEQ ID NO: 18635 - protein, 564 aa, Artificial Sequence
  Synthetic polypeptide
TGCQGPRISAMTQSLICSLILDKPPLLFGLVFPEEVKQQKKQVEHQLEEEKKANNERQKAERVLEVQIQTLIIQKEELNTDLYHMERSLRYFEEESKDLAVRLQHSLQCKGELERALSAVIATEKKKANQLSSCSKAHTEWELEQSLQDQALLKAQLTQLKESFQQLQLERDECAEHIEGERARWHQRMSKMSQEICTLKKEKQDMRWVEQLEWSLSKLKNQTAEPLPPEPPAVPSEVELQHLRKELERVAGELQSQVKNNQHISLLNRRQEERIREQEERLRKQEERLQEQHEKLRQLAKPQSVFEELNNENKSTLQLEQQVKELQEKLGEEHLEVASQQNQQLTAQLSLMALPGEGHGGEHLDSEGEEAPQPMPSVPEDPESREAMSSFMDHLKEKADLSELLKKQELRFIQYWQERCHQKIHHLLSEPGGRAKDAALGGGHHQAGAQGGDEGEAAGAAADGIAAYSNYNNGHRKFLAAAHNSADEPGPGAPAPQELGAADKHGDLREVTLTSSAQGEAREDPLLDKPTAQPIVQDHQEHPGLGSNCCVPLFCWAWLPRRRR

SEQ ID NO: 18636 - protein, 47 aa, Artificial Sequence
  Synthetic polypeptide
MSLSLSATATQPSVFFTRMSAFLSQSLGLTFPSTQSQSLGWTVSTNL

SEQ ID NO: 18637 - protein, 497 aa, Artificial Sequence
  Synthetic polypeptide
LSPPPRAKALAGQSVRICKGPRAVFSRILLLFSLTDSMEDEDAACGGQGQLSTVLLVNLGRMEFPSYTINRKTHIFQDRDDLIRYAAATHMLSDISSAMANGNWEEAKELAQCAKRDWNRLKNHPSLRCHEDLPLFLRCFTVGWIYTRILSRFVEILQRLHMYEEAVRELESLLSQRIYCPDSRGRWWDRLALNLHQHLKRLEPTIKCITEGLADPEVRTGHRLSLYQRAVRLRESPSCKKFKHLFQQLPEMAVQDVKHVTITGRLCPQRGMCKSVFVMEAGEAADPTTVLCSVEELALAHYRRSGFDQGIHGEGSTFSTLYGLLLWDIIFMDGIPDVFRNACQAFPLDLCTDSFFTSRRPALEARLQLIHDAPEESLRAWVAATWHEQEGRVASLVSWDRFTSLQQAQDLVSCLGGPVLSGVCRHLAADFRHCRGGLPDLVVWNSQSRHFKLVEVKGPNDRLSHKQMIWLAELQKLGAEVEVCHVVAVGAKSQSLS

SEQ ID NO: 18638 - protein, 62 aa, Artificial Sequence
  Synthetic polypeptide
VPLAFCHGHPALSVLHQDECIPVSEPWTDFPLHPEPKPWLDSQYESVKAPGLCFPASCYCFR

SEQ ID NO: 18639 - protein, 66 aa, Artificial Sequence
  Synthetic polypeptide
GQAWWLMPVIPALWEAEADGSLEVRNLKPAWPTGSSCQNQANSARKSKFGFRSTGTSQISWPFPHS

SEQ ID NO: 18640 - protein, 154 aa, Artificial Sequence
  Synthetic polypeptide
NQPGQQDPHVRTRQTQPENQSLASGVLEHHRSRGHFHIHDWSNSSPTEPALHGLWPGDLLCGYHLLVHPCPGHLWCQQVSGAIRDDDWKDDDRHAVLCGHHAGRAHEFRSSPSSHSASRGEALLETGPKHLLHALLDDLWRGVCRPDRPLRHGN

SEQ ID NO: 18641 - protein, 736 aa, Artificial Sequence
  Synthetic polypeptide
GQEFETSLANRILMSEPGKLSQKIKVWLQEYWNITDLVAISTFMIGAILRLQNQPYMGYGRVIYCVDIIFWYIRVLDIFGVNKYLGPYVMMIGKMMIDMLYFVVIMLVVLMSFGVARQAILHPEEKPSWKLARNIFYMPYWMIYGEVFADQIDLYAMEINPPCGENLYDEEGKRLPPCIPGAWLTPALMACYLLVANILLVNLLIAVFNNTFFEVKSISNQVWKFQRYQLIMTFHDRPVLPPPMIILSHIYIIIMRLSGRCRKKREGDQEERDRGLKLFLSDEELKRLHEFEEQCVQEHFREKEDEQQSSSDERIRVTSERVENMSMRLEEINERETFMKTSLQTVDLRLAQLEELSNRMVNALENLAGIDRSDLIQARSRASSECEATYLLRQSSINSADGYSLYRYHFNGEELLFEDTSLSTSPGTGVRKKTCSFRIKEEKDVKTHLVPECQNSLHLSLGTSTSATPDGSHLAVDDLKNAEESKLGPDIGISKEDDERQTDSKKEETISPSLNKTDVIHGQDKSDVQNTQLTVETTNIEGTISYPLEETKITRYFPDETINACKTMKSRSFVYSRGRKLVGGVNQDVEYSSITDQQLTTEWQCQVQKITRSHSTDIPYIVSEAAVQAEHKEQFADMQDEHHVAEAIPRIPRLSLTITDRNGMENLLSVKPDQTLGFPSLRSKSLHGHPRNVKSIQGKLDRSGHASSVSSLVIVSGMTAEEKKVKKEKASTETEC

SEQ ID NO: 18642 - protein, 523 aa, Artificial Sequence
  Synthetic polypeptide
GQEFETSLANRILMSEPGKLSQKIKVWLQEYWNITDLVAISTFMIGAILRLQNQPYMGYGRVIYCVDIIFWYIRVLDIFGVNKYLGPYVMMIGKMMIDMLYFVVIMLVVLMSFGVARQAILHPEEKPSWKLARNIFYMPYWMIYGEVFADQIDLYAMEINPPCGENLYDEEGKRLPPCIPGAWLTPALMACYLLVANILLVNLLIAVFNNTFFEVKSISNQVWKFQRYQLIMTFHDRPVLPPPMIILSHIYIIIMRLSGRCRKKREGDQEERDRGLKLFLSDEELKRLHEFEEQCVQEHFREKEDEQQSSSDERIRVTSERVENMSMRLEEINERETFMKTSLQTVDLRLAQLEELSNRMVNALENLAGIDRSDLIQARSRASSECEATYLLRQSSINSADGYSLYRYHFNGEELLFEDTSLSTSPGTGVRKKTCSFRIKEEKDVKTHLVPECQNSLHLSLGTSTSATPDGSHLAVDDLKNAEESKLGPDIGISKEDDERQTDSKKEETISPSLNKTDVIHGQ

SEQ ID NO: 18643 - protein, 748 aa, Artificial Sequence
  Synthetic polypeptide
GQAWWLMPVIPALWEAEADGSLEILMSEPGKLSQKIKVWLQEYWNITDLVAISTFMIGAILRLQNQPYMGYGRVIYCVDIIFWYIRVLDIFGVNKYLGPYVMMIGKMMIDMLYFVVIMLVVLMSFGVARQAILHPEEKPSWKLARNIFYMPYWMIYGEVFADQIDLYAMEINPPCGENLYDEEGKRLPPCIPGAWLTPALMACYLLVANILLVNLLIAVFNNTFFEVKSISNQVWKFQRYQLIMTFHDRPVLPPPMIILSHIYIIIMRLSGRCRKKREGDQEERDRGLKLFLSDEELKRLHEFEEQCVQEHFREKEDEQQSSSDERIRVTSERVENMSMRLEEINERETFMKTSLQTVDLRLAQLEELSNRMVNALENLAGIDRSDLIQARSRASSECEATYLLRQSSINSADGYSLYRYHFNGEELLFEDTSLSTSPGTGVRKKTCSFRIKEEKDVKTHLVPECQNSLHLSLGTSTSATPDGSHLAVDDLKNAEESKLGPDIGISKEDDERQTDSKKEETISPSLNKTDVIHGQDKSDVQNTQLTVETTNIEGTISYPLEETKITRYFPDETINACKTMKSRSFVYSRGRKLVGGVNQDVEYSSITDQQLTTEWQCQVQKITRSHSTDIPYIVSEAAVQAEHKEQFADMQDEHHVAEAIPRIPRLSLTITDRNGMENLLSVKPDQTLGFPSLRSKSLHGHPRNVKSIQGKLDRSGHASSVSSLVIVSGMTAEEKKVKKEKASTETEC

SEQ ID NO: 18644 - protein, 46 aa, Artificial Sequence
  Synthetic polypeptide
SQHSGRLRRMDHLRSSCQNQANSARKSKFGFRSTGTSQISWPFPHS

SEQ ID NO: 18645 - protein, 535 aa, Artificial Sequence
  Synthetic polypeptide
GQAWWLMPVIPALWEAEADGSLEILMSEPGKLSQKIKVWLQEYWNITDLVAISTFMIGAILRLQNQPYMGYGRVIYCVDIIFWYIRVLDIFGVNKYLGPYVMMIGKMMIDMLYFVVIMLVVLMSFGVARQAILHPEEKPSWKLARNIFYMPYWMIYGEVFADQIDLYAMEINPPCGENLYDEEGKRLPPCIPGAWLTPALMACYLLVANILLVNLLIAVFNNTFFEVKSISNQVWKFQRYQLIMTFHDRPVLPPPMIILSHIYIIIMRLSGRCRKKREGDQEERDRGLKLFLSDEELKRLHEFEEQCVQEHFREKEDEQQSSSDERIRVTSERVENMSMRLEEINERETFMKTSLQTVDLRLAQLEELSNRMVNALENLAGIDRSDLIQARSRASSECEATYLLRQSSINSADGYSLYRYHFNGEELLFEDTSLSTSPGTGVRKKTCSFRIKEEKDVKTHLVPECQNSLHLSLGTSTSATPDGSHLAVDDLKNAEESKLGPDIGISKEDDERQTDSKKEETISPSLNKTDVIHGQ

SEQ ID NO: 18646 - protein, 23 aa, Artificial Sequence
  Synthetic polypeptide
HVLLWPVHQPAYPPSAKCNTQQK

SEQ ID NO: 18647 - protein, 26 aa, Artificial Sequence
  Synthetic polypeptide
SQHFGRLRQKNHLRSTWKRPASRTSS

SEQ ID NO: 18648 - protein, 254 aa, Artificial Sequence
  Synthetic polypeptide
QVQWLMPIIPALWEAEAEESLEEHLEAASQQNQQLTAQLSLMALPGEGHGGEHLDSEGEEAPRPMPSVPEDPESREAMSSFMDHLKEKADLSELVKKQELRFIQYWQERCHQKIHHLLSEPGGRAKDAALGGGHHQAGAQGGDEGEAAGAAADGIAAYSNYNNGHRKFLAAAHNSADEPGPGAPAPQELGAADKHGDLREVTLTSSAQGEAREDPLLDKPTAQPIVQDHQEHPGLGSNCCVPLFCWAWLPRRRR

SEQ ID NO: 18649 - protein, 92 aa, Artificial Sequence; identical to SEQ ID NO: 18634
  Synthetic polypeptide

SEQ ID NO: 18650 - protein, 565 aa, Artificial Sequence
  Synthetic polypeptide
TGCQGPRISAMTQSLICSLILDKPPLLFGLVFPEEVKQQKKQVEHQLEEEKKANNERQKAERELEVQIQTLIIQKEELNTDLYHMERSLRYFEEESKDLAVRLQHSLQCKGELESALSAVIATEKKKANQLSSCSKAHTEWELEQSLQDQALLKAQLTQLKESFQQLQLERDECAEHIEGERARWHQRMSKMSQEICTLKKEKQQDMRRVEELERSLSKLKNQMAEPLPPEPPAVPSEVELQHLRKELERVAGELQSQVKNNQHISLLNRRQEERIREQEERLRKQEERLQEQHEKLRQLAKPQSVFEELNNENKSTLQLEQQVKELQEKLGEEHLEAASQQNQQLTAQLSLMALPGEGHGGEHLDSEGEEAPRPMPSVPEDPESREAMSSFMDHLKEKADLSELVKKQELRFIQYWQERCHQKIHHLLSEPGGRAKDAALGGGHHQAGAQGGDEGEAAGAAADGIAAYSNYNNGHRKFLAAAHNSADEPGPGAPAPQELGAADKHGDLREVTLTSSAQGEAREDPLLDKPTAQPIVQDHQEHPGLGSNCCVPLFCWAWLPRRRR

SEQ ID NO: 18651 - protein, 78 aa, Artificial Sequence
  Synthetic polypeptide
DWLSRAPYFCHDSVPNLLFDSGQATSPFWARVSRGGKTTEETSGTSAGRRKESKQRETESRKGARGSNPDIDHTERGT

SEQ ID NO: 18652 - protein, 77 aa, Artificial Sequence
  Synthetic polypeptide
TGCQGPRISAMTQSLICSLILDKPPLLFGLVFPEEVKQQKKQVEHQLEEEKKANNERQKAERELEVQIQTLIIQKEE

SEQ ID NO: 18653 - protein, 254 aa, Artificial Sequence
  Synthetic polypeptide
QVQWLMPIIPALWEAEAEESLEEHLEAASQQNQQLTAQLSLMALPGEGHGGEHLDSEGEEAPQPMPSVPEDLESREAMSSFMDHLKEKADLSELVKKQELRFIQYWQERCHQKIHHLLSEPGGRAKDAALGGGHHQAGAQGGDEGEAAGAAADGIAAYSNYNNGHRKFLAAAHNSADEPGPGAPAPQELGAADKHGDLREVTLTSSAQGEAREDPLLDKPTAQPIVQDHQEHPGLGSNCCVPLFCWAWLPRRRR

SEQ ID NO: 18654 - protein, 26 aa, Artificial Sequence
  Synthetic polypeptide
SQHFGRLRQKNHLRSTWKRPASRTSS

SEQ ID NO: 18655 - protein, 21 aa, Artificial Sequence
  Synthetic polypeptide
ENVAHIHHGILCSHKKGQKRA

SEQ ID NO: 18656 - protein, 188 aa, Artificial Sequence
  Synthetic polypeptide
FLKDLELEIPFDPVIPLLDIYPKDYKSCYYKDICTCIFIVALFTIAKTWNQAKCPSMRDWIKKMWHIYTMEYYAVIKKAKKEHKMEESHLENAQKSFETTVRYFGMKPKSGEKEITPSYVFMVWYEFCSDFKTIWKRESKNISKERLKMAQESVSKLTSEKKVETKKINPTASLKERLRQKEASVTTN

SEQ ID NO: 18657 - protein, 29 aa, Artificial Sequence
  Synthetic polypeptide
KRPKKSIRWKKVTWRMHRKVLKQQYDILG

SEQ ID NO: 18658 - protein, 27 aa, Artificial Sequence
  Synthetic polypeptide
RRTCLLPLPPRLHSLNFGHFISGASMQ

SEQ ID NO: 18659 - protein, 25 aa, Artificial Sequence
  Synthetic polypeptide
LSFFSFLPPCEEGHVCFPFHHDCTV

SEQ ID NO: 18660 - protein, 711 aa, Artificial Sequence
  Synthetic polypeptide
WFCKGLLPLLDSHSSPSCHHVKKDMFASPSTTTAQFELRAFHIRGEHAMITARLEETIENLKHELEHRWRGGCEERKDVCISTDDDCPPKTFRNVCVQTDRETFLKPCESESKTTRSNQLVPKKLNISSLSQLSPPNDHKDIHAALQPMEGMASNQQKALPPPPASIPPPPPLPSGLGSLSPAPPMPPVSAGPPLPPPPPPPPPLPPPSSAGPPPPPPPPPLPNSPAPPNPGGPPPAPPPPGLAPPPPPGLFFGLGSSSSQCPRKPAIEPSCPMKPLYWTRIQISDRSQNATPTLWDSLEEPDIRDPSEFEYLFSKDTTQQKKKPLSETYEKKNKVKKIIKLLDGKRSQTVGILISSLHLEMKDIQQAIFNVDDSVVDLETLAALYENRAQEDELVKIRKYYETSKEEELKLLDKPEQFLHELAQIPNFAERAQCIIFRSVFSEGITSLHRKVEIITRASKDLLHVKSVKDILALILAFGNYMNGGNRTRGQADGYSLEILPKLKDVKSRDNGINLVDYVVKYYLRYYDQEAGTEKSVFPLPEPQDFFLASQVKFEDLIKDLRKLKRQLEASEKQMVVVCKESPKEYLQPFKDKLEEFFQKAKKEHKMEESHLENAQKSFETTVRYFGMKPKSGEKEITPSYVFMVWYEFCSDFKTIWKRESKNISKERLKMAQESVSKLTSEKKVETKKINPTASLKERLRQKEASVTTN

SEQ ID NO: 18661 - protein, 293 aa, Artificial Sequence
  Synthetic polypeptide
RGDFSHDCKFPEASPAMQNSVEDDSDAETYGEENDEQGNYSKRKIVSNWDRYQDIEKEVNNESGESQRGTDFSVLLSSAGDSFSQFRFAEEKEWDSEASCPKQNSAFYVDSELLVRALQELPLCLRLNVAAELVQGTVPLEVPQVKPKRTDDGKGLGMQLKGPLGPGGRGPIFELKSVAAGCPVLLGKDNPSPGPSRDSQKPTSPLQSAGDHLEEELDLLLNLDAPIKEGDNILPDQTSQDLKSKEDGEVVQEEEVCAKPSVTEEKNMEPEQPSTSKNVTEEELEDWLDSMIS

SEQ ID NO: 18662 - protein, 166 aa, Artificial Sequence
  Synthetic polypeptide
VLTRSDGFISIWHFPCWHSFSFLLPCEEVTSVMIVSFLRPPQPCRTLLKMTAMQRPMEKRMMNREIILKERLSLTGIDIKILKKRSIMKVESHRGEQISVSSLALQGTHSHSSGLLRRKNGIVKLLVQNRIQHFMWIVSYWFEPFKSCLSASDSTLLPNWSRVQFL

SEQ ID NO: 18663 - protein, 9 aa, Artificial Sequence
  Synthetic polypeptide
GLPSHAELC

SEQ ID NO: 18664 - protein, 13 aa, Artificial Sequence
  Synthetic polypeptide
HRRWVISAFPTET

SEQ ID NO: 18665 - protein, 25 aa, Artificial Sequence
  Synthetic polypeptide
FLHFQLRPESELHHRGTQPTVRRRT

SEQ ID NO: 18666 - protein, 55 aa, Artificial Sequence
  Synthetic polypeptide
DWLSGAPYFCHDSVPNLLFDSGQATSPFWARVSRGGKTTEETSGTSAGRRKESKQ

SEQ ID NO: 18667 - protein, 544 aa, Artificial Sequence
  Synthetic polypeptide
TGCQGPRISAMTQSLICSLILDKPPLLFGLVFPEEVKQQKKQVEHQLEEEKKANNEKQKAERELEGQIQRLNTEKKKLNTDLYHMKHSLRYFEEESKDLAGRLQRSSQRIGELEWSLCAVAATQKKKPDGFSSRSKALLKRQLEQSIREQILLKGHVTQLKESLKEVQLERDQYAEQIKGERAQWQQRMRKMSQEVCTLKEEKKHDTHRVEELERSLSRLKNQMAEPLPPDAPAVSSEVELQDLRKELERVAGELQAQVENNQCISLLNRGQKERLREQEERLQEQQERLREREKRLQQLAEPQSDLEELKHENKSALQLEQQVKELQEKLGQVMETLTSAEKEPEAAVPASGTGGESSGLMDLLEEKADLREHVEKLELGFIQYRRERCHQKVHRLLTEPGDSAKDASPGGGHHQAGPGQGGEEGEAAGAAGDGVAACGSYSEGHGKFLAAARNPAAEPSPGAPAPQELGAADKHGDLCEASLTNSVEPAQGEAREGSSQDNPTAQPVVQLLGEMQDHQEHPGLGSNCCVPCFCWAWLPRRRR

SEQ ID NO: 18668 - protein, 580 aa, Artificial Sequence
  Synthetic polypeptide
GRAQWLTPVIPTLRETEAGGSQGQEIETIQANTSSSASSSLHARQSPCQEQAAVLNSRSIKISRLNDTIKSLKQQKKQVEHQLEEEKKANNEKQKAERELEGQIQRLNTEKKKLNTDLYHMKHSLRYFEEESKDLAGRLQRSSQRIGELEWSLCAVAATQKKKPDGFSSRSKALLKRQLEQSIREQILLKGHVTQLKESLKEVQLERDQYAEQIKGERAQWQQRMRKMSQEVCTLKEEKKHDTHRVEELERSLSRLKNQMAEPLPPDAPAVSSEVELQDLRKELERVAGELQAQVENNQCISLLNRGQKERLREQEERLQEQQERLREREKRLQQLAEPQSDLEELKHENKSALQLEQQVKELQEKLGQVMETLTSAEKEPEAAVPASGTGGESSGLMDLLEEKADLREHVEKLELGFIQYRRERCHQKVHRLLTEPGDSAKDASPGGGHHQAGPGQGGEEGEAAGAAGDGVAACGSYSEGHGKFLAAARNPAAEPSPGAPAPQELGAADKHGDLCEASLTNSVEPAQGEAREGSSQDNPTAQPVVQLLGEMQDHQEHPGLGSNCCVPCFCWAWLPRRRR

SEQ ID NO: 18669 - protein, 45 aa, Artificial Sequence
  Synthetic polypeptide
SPHFGRPRQVDHKVRRSRPSRQTRPPPPPPLCMRVRARAKNKQQS

SEQ ID NO: 18670 - protein, 65 aa, Artificial Sequence
  Synthetic polypeptide
PGTVAHACNPHTSGDRGRWITRSGDRDHPGKHVLLRLLLSACASEPVPRTSSSPELEVHKNQSTE

SEQ ID NO: 18671 - protein, 64 aa, Artificial Sequence
  Synthetic polypeptide
IRCSKNIGRETALVFQQQRRGTRKQMAVALRRPLLVVATHLRLPPPPPPLCMRVRARAKNKQQS

SEQ ID NO: 18672 - protein, 36 aa, Artificial Sequence
  Synthetic polypeptide
PYRVVGVIKSDVQRILAEKPPWCSSSSEEEHESKWQ

SEQ ID NO: 18673 - protein, 598 aa, Artificial Sequence
  Synthetic polypeptide
LIELLVSLNQMFKEYWQRNRPGVPAAAKRNTKANGSSPETAASGGCHSSEASSSASSSLHARQSPCQEQAAVLNSRSIKISRLNDTIKSLKQQKKQVEHQLEEEKKANNEKQKAERELEGQIQRLNTEKKKLNTDLYHMKHSLRYFEEESKDLAGRLQRSSQRIGELEWSLCAVAATQKKKPDGFSSRSKALLKRQLEQSIREQILLKGHVTQLKESLKEVQLERDQYAEQIKGERAQWQQRMRKMSQEVCTLKEEKKHDTHRVEELERSLSRLKNQMAEPLPPDAPAVSSEVELQDLRKELERVAGELQAQVENNQCISLLNRGQKERLREQEERLQEQQERLREREKRLQQLAEPQSDLEELKHENKSALQLEQQVKELQEKLGQVMETLTSAEKEPEAAVPASGTGGESSGLMDLLEEKADLREHVEKLELGFIQYRRERCHQKVHRLLTEPGDSAKDASPGGGHHQAGPGQGGEEGEAAGAAGDGVAACGSYSEGHGKFLAAARNPAAEPSPGAPAPQELGAADKHGDLCEASLTNSVEPAQGEAREGSSQDNPTAQPVVQLLGEMQDHQEHPGLGSNCCVPCFCWAWLPRRRR

SEQ ID NO: 18674 - protein, 55 aa, Artificial Sequence; identical to SEQ ID NO: 18666
  Synthetic polypeptide

SEQ ID NO: 18675 - protein, 544 aa, Artificial Sequence
  Synthetic polypeptide
TGCQGPRISAMTQSLICSLILDKPPLLFGLVFPEEVKQQKKQVEHQLEEEKKANNEKQKAERELEGQIQRLNTEKKKLNTDLYHMKHSLRYFEEESKDLAGRLQRSSQRIGELEWSLCAVAATQKKKPDGFSSRSKALLKRQLEQSIREQILLKGHVTQLKESLKEVQLERDQYAEQIKGERAQWQQRMRKMSQEVCTLKEEKKHDTHRVEELERSLSRLKNQMAEPLPPDAPAVSSEVELQDLRKELERVAGELQAQVENNQCISLLNRGQKERLREQEERLQEQQERLREREKRLQQLAEPQSDLEELKHENKSALQLEQQVKELQEKLGQVMETLTSAEKEPEAAVPASGTGGESSGLMDLLEEKADLREHVEKLELGFIQYRRERCHQKVHRLLTEPGDSAKDASPGGGHHQAGPGQGGEEGEAAGAAGDGVAACGSYSEGHGKFLAAARNPAAEPSPGAPAPQELGAADKHGDLCEASLTNSVEPAQGEAREGSSQDNPTAQPVLQLLGEMQDHQEHPGLGSNCCVPCFCWAWLPRRRR

SEQ ID NO: 18676 - protein, 45 aa, Artificial Sequence; identical to SEQ ID NO: 18669
  Synthetic polypeptide

SEQ ID NO: 18677 - protein, 65 aa, Artificial Sequence; identical to SEQ ID NO: 18670
  Synthetic polypeptide

SEQ ID NO: 18678 - protein, 580 aa, Artificial Sequence
  Synthetic polypeptide
GRAQWLTPVIPTLRETEAGGSQGQEIETIQANTSSSASSSLHARQSPCQEQAAVLNSRSIKISRLNDTIKSLKQQKKQVEHQLEEEKKANNEKQKAERELEGQIQRLNTEKKKLNTDLYHMKHSLRYFEEESKDLAGRLQRSSQRIGELEWSLCAVAATQKKKPDGFSSRSKALLKRQLEQSIREQILLKGHVTQLKESLKEVQLERDQYAEQIKGERAQWQQRMRKMSQEVCTLKEEKKHDTHRVEELERSLSRLKNQMAEPLPPDAPAVSSEVELQDLRKELERVAGELQAQVENNQCISLLNRGQKERLREQEERLQEQQERLREREKRLQQLAEPQSDLEELKHENKSALQLEQQVKELQEKLGQVMETLTSAEKEPEAAVPASGTGGESSGLMDLLEEKADLREHVEKLELGFIQYRRERCHQKVHRLLTEPGDSAKDASPGGGHHQAGPGQGGEEGEAAGAAGDGVAACGSYSEGHGKFLAAARNPAAEPSPGAPAPQELGAADKHGDLCEASLTNSVEPAQGEAREGSSQDNPTAQPVLQLLGEMQDHQEHPGLGSNCCVPCFCWAWLPRRRR

SEQ ID NO: 18679 - protein, 64 aa, Artificial Sequence; identical to SEQ ID NO: 18671
  Synthetic polypeptide

SEQ ID NO: 18680 - protein, 36 aa, Artificial Sequence; identical to SEQ ID NO: 18672
  Synthetic polypeptide

SEQ ID NO: 18681 - protein, 598 aa, Artificial Sequence
  Synthetic polypeptide
LIELLVSLNQMFKEYWQRNRPGVPAAAKRNTKANGSSPETAASGGCHSSEASSSASSSLHARQSPCQEQAAVLNSRSIKISRLNDTIKSLKQQKKQVEHQLEEEKKANNEKQKAERELEGQIQRLNTEKKKLNTDLYHMKHSLRYFEEESKDLAGRLQRSSQRIGELEWSLCAVAATQKKKPDGFSSRSKALLKRQLEQSIREQILLKGHVTQLKESLKEVQLERDQYAEQIKGERAQWQQRMRKMSQEVCTLKEEKKHDTHRVEELERSLSRLKNQMAEPLPPDAPAVSSEVELQDLRKELERVAGELQAQVENNQCISLLNRGQKERLREQEERLQEQQERLREREKRLQQLAEPQSDLEELKHENKSALQLEQQVKELQEKLGQVMETLTSAEKEPEAAVPASGTGGESSGLMDLLEEKADLREHVEKLELGFIQYRRERCHQKVHRLLTEPGDSAKDASPGGGHHQAGPGQGGEEGEAAGAAGDGVAACGSYSEGHGKFLAAARNPAAEPSPGAPAPQELGAADKHGDLCEASLTNSVEPAQGEAREGSSQDNPTAQPVLQLLGEMQDHQEHPGLGSNCCVPCFCWAWLPRRRR

SEQ ID NO: 18682 - protein, 5 aa, Artificial Sequence
  Synthetic polypeptide
KGDNC

SEQ ID NO: 18683 - protein, 241 aa, Artificial Sequence
  Synthetic polypeptide
LQTRNRPTFHEKVTTVDRFQGQQNDYILLSLVRTRAVGHLRDVRRLVVAMSRARLGLYIFARVSLFQNCFELTPAFSQLTARPLHLHIIPTEPFPTTRKNGERPSHEVQIIKNMPQMANFVYNMYMHLIQTTHHYHQTLLQLPPAMVEEGEEVQNQETELETEEEAMTVQADIIPSPTDTSCRQETPAFQTDTTPSETGATSTPEAIPALSETTPTVVGAVSAPAEANTPQDATSAPEETK

SEQ ID NO: 18684 - protein, 52 aa, Artificial Sequence
  Synthetic polypeptide
SMHLLYSSAISLLHIYSRAMKTCPQKYLYMNIYCSFMQDSFKLETGQLFMKR

SEQ ID NO: 18685 - protein, 13 aa, Artificial Sequence
  Synthetic polypeptide
NLGKASILKIISG

SEQ ID NO: 18686 - protein, 34 aa, Artificial Sequence
  Synthetic polypeptide
GHLAETVIKILWKHMYSNYTAENSINKTLVKPVS

SEQ ID NO: 18687 - protein, 107 aa, Artificial Sequence
  Synthetic polypeptide
NYQKRLKLGLDPDKHLGKTLDQMEPYLIELSKKYGVHVCGEGGEYETFTLDCPLFKKKIIVDSSEVVIHSADAFAPVAYLRFLELHLEDKVSSVPDNYRTSNYIYNF

SEQ ID NO: 18688 - protein, 3 aa, Artificial Sequence
  Synthetic polypeptide
NWV

SEQ ID NO: 18689 - protein, 17 aa, Artificial Sequence
  Synthetic polypeptide
LLLFLKLSEKVETGFRS

SEQ ID NO: 18690 - protein, 119 aa, Artificial Sequence
  Synthetic polypeptide
NYQKRLKLGLDPDKHLGKTLDQMEPYLIELSKKYGVHVCGEGGEYETFTLDCPLFKKKIIVDSSEVVIHSADAFAPVAYLRFLELHLEDKCLTTTEHLIIYIIFEKCFGTLFIKPPFLY

SEQ ID NO: 18691 - protein, 57 aa, Artificial Sequence
  Synthetic polypeptide
NYQKRLKLGLDPDKHLGKTLDQMEPYLIELSKKYGVHVCGEGGEYETFTLDCPLFKK

SEQ ID NO: 18692 - protein, 136 aa, Artificial Sequence
  Synthetic polypeptide
FSKIRNSSRAKTAYAIGHEHEVLLRDLLLEKNLSFLDEDQLRAKGYDKTPDFILQVPVAVEGHIIHWIESKASFGDECSHHAYLHDQFWSYWNRFGPGLVIYWYGFIQELDCNRERGILLKACFPTNIVTLCHSIA

SEQ ID NO: 18693 - protein, 23 aa, Artificial Sequence
  Synthetic polypeptide
SLRLGILLGQRLPMPLVMSMRSC

SEQ ID NO: 18694 - protein, 9 aa, Artificial Sequence
  Synthetic polypeptide
GKDCLCHWS

SEQ ID NO: 18695 - protein, 142 aa, Artificial Sequence
  Synthetic polypeptide
FSKIRNSSRAKTAYAIGHEHEVLLRDLLLEKNLSFLDEDQLRAKGYDKTPDFILQVPVVMLCPLAVEGHIIHWIESKASFGDECSHHAYLHDQFWSYWNRFGPGLVIYWYGFIQELDCNRERGILLKACFPTNIVTLCHSIA

SEQ ID NO: 18696 - protein, 75 aa, Artificial Sequence
  Synthetic polypeptide
FSKIRNSSRAKTAYAIGHEHEVLLRDLLLEKNLSFLDEDQLRAKGYDKTPDFILQVPVAVEGHIIHWIESKASFG

SEQ ID NO: 18697 - protein, 64 aa, Artificial Sequence
  Synthetic polypeptide
VIHLTSSHHVDILSSQIITGREFGPGLVIYWYGFIQELDCNRERGILLKACFPTNIVTLCHSIA

SEQ ID NO: 18698 - protein, 33 aa, Artificial Sequence
  Synthetic polypeptide
CYATRPESFTSLHLIMWTFYHLKSSQEENLGQA

SEQ ID NO: 18699 - protein, 73 aa, Artificial Sequence
  Synthetic polypeptide
PNAMPPGLSHSPHFISSCGHFIISNHHRKRIWARLSHLLVWIYPGAGLQPGKGHPAQSLFPHEHCHLMPQHSL

SEQ ID NO: 18700 - protein, 95 aa, Artificial Sequence
  Synthetic polypeptide
PNAMPPGLSHSPHFISSCGHFIISNHHRKRIWARLSHLLVWIYPGAGLQPGKGHPAQSLFPHEHCHLMPQHSLTLKILEEKLGGKETQHCITIVE

SEQ ID NO: 18701 - protein, 414 aa, Artificial Sequence
  Synthetic polypeptide
VGLKVQIILTEAEKWEKSEGPSHEEEDTFSSVFHTQIPPEEYEMQMQKLNKDFTCDVERNESLIKSGKKPFSNTEKIELRGKHNQDFIKRNIELAKESRNPVVMVDREKKRLVELLKDLDEKDSGLSSSEGDQSGWVVPVKGYELAVTQHQQLAEIDIKLQELSAASPTISSFSPRLENRNNQKPDRDGERNMEVTPGEKILRNTKEQRDLHNRLREIDEKLKMMKENVLESTSCLSEEQLKCLLDECILKQKSIIKLSSERKKEDIEDVTPVFPQLSRSIISKLLNESETKVQKTEVEDADMLESEECEASKGYYLTKALTGHNMSEALVTEAENMKCLQFSKDVIISDTKDYFMSKTLGIGRLKRPSFLDDPLYGISVSLSSEDQHLKLSSPENTIADEQETKDAAEECKEP

SEQ ID NO: 18702 - protein, 53 aa, Artificial Sequence
  Synthetic polypeptide
QRLKSGRKVRVLLMRRKTPFPQCFILKSLQKNMKCRCRNSIKILPVMWKEMSH

SEQ ID NO: 18703 - protein, 35 aa, Artificial Sequence
  Synthetic polypeptide
EVRRPSARQPPRLRSTTQSSIHWRGKYLMPSPVNW

SEQ ID NO: 18704 - protein, 14 aa, Artificial Sequence
  Synthetic polypeptide
EVLLSPLSTGEENI

SEQ ID NO: 18705 - protein, 436 aa, Artificial Sequence
  Synthetic polypeptide
GASLPGRPSSEMWGAPLPCRPVWDVRSTSARPRPCLGGEEHLCLPPPLRSEETLCPATAPSEKYYSVLYPLERKISDAKSRELVMYIWAHAVVASVPVFAVTNVADIYATSTCTEVWSNSLGHLVYVLVYNITTVIVPVVVVFLFLILIRRALSASQKKKVIIAALRTPQNTISIPYASQREAELHATLLSMVMVFILCSVPYATLVVYQTVLNVPDTSVFLLLTAVWLPKVSLLANPVLFLTVNKSVRKCLIGTLVQLHHRYSRRNVVSTGSGMAEASLEPSIRSGSQLLEMFHIGQQQIFKPTEDEEESEAKYIGSADFQAKEIFSTCLEGEQGPQFAPSAPPLSTVDSVSQVAPAAPVEPETFPDKYSLQFGFGPFELPPQWLSETRNSKKRLLPPLGNTPEELIQTKVPKVGRVERKMSRNNKVSIFPKVDS

SEQ ID NO: 18706 - protein, 471 aa, Artificial Sequence
  Synthetic polypeptide
EVRRPSARQPPRLRKFGNMEVTRKLDKSRLPGIKFIKNLACSGICASLVCVPFDIILSTSPHCCWWIYTMLFCKVVKFLHKVFCSVTILSFPAIALDRYYSVLYPLERKISDAKSRELVMYIWAHAVVASVPVFAVTNVADIYATSTCTEVWSNSLGHLVYVLVYNITTVIVPVVVVFLFLILIRRALSASQKKKVIIAALRTPQNTISIPYASQREAELHATLLSMVMVFILCSVPYATLVVYQTVLNVPDTSVFLLLTAVWLPKVSLLANPVLFLTVNKSVRKCLIGTLVQLHHRYSRRNVVSTGSGMAEASLEPSIRSGSQLLEMFHIGQQQIFKPTEDEEESEAKYIGSADFQAKEIFSTCLEGEQGPQFAPSAPPLSTVDSVSQVAPAAPVEPETFPDKYSLQFGFGPFELPPQWLSETRNSKKRLLPPLGNTPEELIQTKVPKVGRVERKMSRNNKVSIFPKVDS

SEQ ID NO: 18707 - protein, 72 aa, Artificial Sequence
  Synthetic polypeptide
ESLATWRSLENLIRADCLGLSSLKTWPARGFVPAWSVCPSTSSSAPVLTVAGGSTPCSSARSSNFCTKYSAL

SEQ ID NO: 18708 - protein, 70 aa, Artificial Sequence
  Synthetic polypeptide
GASLPGRPSSEMWGAPLPCRPVWDVRSTSARPRPCLGGEEHLCLPPPLRSEETLCPATAPSEKVWQHGGH

SEQ ID NO: 18709 - protein, 25 aa, Artificial Sequence
  Synthetic polypeptide
GAPLPGRDPVWEVLLSPLSTGEENI

SEQ ID NO: 18710 - protein, 400 aa, Artificial Sequence
  Synthetic polypeptide
DVGSASALPPRLGCEEHLCPAATLSGRYYSVLYPLERKISDAKSRELVMYIWAHAVVASVPVFAVTNVADIYATSTCTEVWSNSLGHLVYVLVYNITTVIVPVVVVFLFLILIRRALSASQKKKVIIAALRTPQNTISIPYASQREAELHATLLSMVMVFILCSVPYATLVVYQTVLNVPDTSVFLLLTAVWLPKVSLLANPVLFLTVNKSVRKCLIGTLVQLHHRYSRRNVVSTGSGMAEASLEPSIRSGSQLLEMFHIGQQQIFKPTEDEEESEAKYIGSADFQAKEIFSTCLEGEQGPQFAPSAPPLSTVDSVSQVAPAAPVEPETFPDKYSLQFGFGPFELPPQWLSETRNSKKRLLPPLGNTPEELIQTKVPKVGRVERKMSRNNKVSIFPKVDS

SEQ ID NO: 18711 - protein, 58 aa, Artificial Sequence
  Synthetic polypeptide
GASLPGRPSSEMWGAPLPCRPVWDVRSTSARPRPCLGGTTQSSIHWRGKYLMPSPVNW

SEQ ID NO: 18712 - protein, 83 aa, Artificial Sequence
  Synthetic polypeptide
GAPLPGRDPVWESLATWRSLENLIRADCLGLSSLKTWPARGFVPAWSVCPSTSSSAPVLTVAGGSTPCSSARSSNFCTKYSAL

SEQ ID NO: 18713 - protein, 34 aa, Artificial Sequence
  Synthetic polypeptide
DVGSASALPPRLGCEEHLCPAATLSGRVWQHGGH

SEQ ID NO: 18714 - protein, 494 aa, Artificial Sequence
  Synthetic polypeptide
GASLPGRPSSEMWGAPLPCRPVWDVRSTSARPRPCLGEFGNMEVTRKLDKSRLPGIKFIKNLACSGICASLVCVPFDIILSTSPHCCWWIYTMLFCKVVKFLHKVFCSVTILSFPAIALDRYYSVLYPLERKISDAKSRELVMYIWAHAVVASVPVFAVTNVADIYATSTCTEVWSNSLGHLVYVLVYNITTVIVPVVVVFLFLILIRRALSASQKKKVIIAALRTPQNTISIPYASQREAELHATLLSMVMVFILCSVPYATLVVYQTVLNVPDTSVFLLLTAVWLPKVSLLANPVLFLTVNKSVRKCLIGTLVQLHHRYSRRNVVSTGSGMAEASLEPSIRSGSQLLEMFHIGQQQIFKPTEDEEESEAKYIGSADFQAKEIFSTCLEGEQGPQFAPSAPPLSTVDSVSQVAPAAPVEPETFPDKYSLQFGFGPFELPPQWLSETRNSKKRLLPPLGNTPEELIQTKVPKVGRVERKMSRNNKVSIFPKVDS

SEQ ID NO: 18715 - protein, 497 aa, Artificial Sequence
  Synthetic polypeptide
KVMIFELAYHVQSFLSEHNKPPPKSFHEEMLERRAQEEQQRLLEAKRKEEQEQREILHEIQRRKEEIKEEKKRKEMAKQERLEIASLSNQDHTSKKDPGGHRTAAILHGGSPDFVGNGKHRANSSGRSRRERQYSVCNSEDSPGSCEILYFNMGSPDQLMVHKGKCIGSDEQLGKLVYNALETATGGFVLLYEWVLQWQKKMGPFLTSQEKEKIDKCKKQIQGTETEFNSLVKLSHPNVVRYLAMNLKEQDDSIVVDILVEHISGVSLAAHLSHSGPIPVHQLRRYTAQLLSGLDYLHSNSVVHKVLSASNVLVDAEGTVKITDYSISKRLADICKEDVFEQTRVRFSDNALPYKTGKKGDVWRLGLLLLSLSQGQECGEYPVTIPSDLPADFQDFLKKCVCLDDKERWSPQQLLKHSFINPQPKMPLVEQSPEDSEGQDYVETVIPSNRLPSAAFFSETQRQFSRYFIEFEELQLLGKGAFGAVIKVWYRVIPSPL

SEQ ID NO: 18716 - protein, 9 aa, Artificial Sequence
  Synthetic polypeptide
GSCRRKVKR

SEQ ID NO: 18717 - protein, 18 aa, Artificial Sequence
  Synthetic polypeptide
MLRRDEGAAEEKLKGDDL

SEQ ID NO: 18718 - protein, 1502 aa, Artificial Sequence
  Synthetic polypeptide
KVMIFELAYHVQSFLSEHNKPPPKSFHEEMLERRAQEEQQRLLEAKRKEEQEQREILHEIQRRKEEIKEEKKRKEMAKQERLEIASLSNQDHTSKKDPGGHRTAAILHGGSPDFVGNGKHRANSSGRSRRERQYSVCNSEDSPGSCEILYFNMGSPDQLMVHKGKCIGSDEQLGKLVYNALETATGGFVLLYEWVLQWQKKMGPFLTSQEKEKIDKCKKQIQGTETEFNSLVKLSHPNVVRYLAMNLKEQDDSIVVDILVEHISGVSLAAHLSHSGPIPVHQLRRYTAQLLSGLDYLHSNSVVHKVLSASNVLVDAEGTVKITDYSISKRLADICKEDVFEQTRVRFSDNALPYKTGKKGDVWRLGLLLLSLSQGQECGEYPVTIPSDLPADFQDFLKKCVCLDDKERWSPQQLLKHSFINPQPKMPLVEQSPEDSEGQDYVETVIPSNRLPSAAFFSETQRQFSRYFIEFEELQLLGKGAFGAVIKVQNKLDGCCYAVKRIPINPASRQFRRIKGEVTLLSRLHHENIVRYYNAWIERHERPAGPGTPPPDSGPLAKDDRAARGQPASDTDGLDSVEAAAPPPILSSSVEWSTSGERSASARFPATGPGSSDDEDDDEDEHGGVFSQSFLPASDSESDIIFDNEDENSKSQNQMEYCEKSTLRDTIDQGLYRDTVRLWRLFREILDGLAYIHEKGMIHRDLKPVNIFLDSDDHVKIGDFGLATDHLAFSADSKQDDQTGDLIKSDPSGHLTGMVGTALYVSPEVQGSTKSAYNQKVDLFSLGIIFFEMSYHPMVTASERIFVLNQLRDPTSPKFPEDFDDGEHAKQKSVISWLLNHDPAKRPTATELLKSELLPPPQMEESELHEVLHHTLTNVDGKAYRTMMAQIFSQRISPAIDYTYDSDILKGNFSIRTAKMQQHVCETIIRIFKRHGAVQLCTPLLLPRNRQIYEHNEAALFMDHSGMLVMLPFDLRIPFARYVARNNILNLKRYCIERVFRPRKLDRFHPKELLECAFDIVTSTTNSFLPTAEIIYTIYEIIQEFPALQERNYSIYLNHTMLLKAILLHCGIPEDKLSQVYIILYDAVTEKLTRREVEAKFCNLSLSSNSLCRLYKFIEQKGDLQDLMPTINSLIKQKTGIAQLVKYGLKDLEEVVGLLKKLGIKLQVLINLGLVYKVQQHNGIIFQFVAFIKRRQRAVPEILAAGGRYDLLIPQFRGPQALGPVPTAIGVSIAIDKISAAVLNMEESVTISSCDLLVVSVGQMSMSRAINLTQKLWTAGITAEIMYDWSQSQEELQEYCRHHEITYVALVSDKEGSHVKVKSFEKERQTEKRVLETELVDHVLQKLRTKVTDERNGREASDNLAVQNLKGSFSNASGLFEIHGATVVPIVSVLAPEKLSASTRRRYETQVQTRLQTSLANLHQKSSEIEILAVDLPKETILQFLSLEWDADEQAFNTTVKQLLSRLPKQRYLKLVCDEIYNIKVEKKVSVLFLYSYRDDYYRILF

SEQ ID NO: 18719 - protein, 1530 aa, Artificial Sequence
  Synthetic polypeptide
KVMIFELAYHVQSFLSEHNKPPPKSFHEEMLERRAQEEQQRLLEAKRKEEQEQREILHEIQRRKEEIKEEKKRKEMAKQERLEIASLSNQDHTSKKDPGGHRTAAILHGGSPDFVGNGKHRANSSGRSRRERQYSVCNSEDSPGSCEILYFNMGSPDQLMVHKGKCIGSDEQLGKLVYNALETATGGFVLLYEWVLQWQKKMGPFLTSQEKEKIDKCKKQIQGTETEFNSLVKLSHPNVVRYLAMNLKEQDDSIVVDILVEHISGVSLAAHLSHSGPIPVHQLRRYTAQLLSGLDYLHSNSVVHKVLSASNVLVDAEGTVKITDYSISKRLADICKEDVFEQTRVRFSDNALPYKTGKKGDVWRLGLLLLSLSQGQECGEYPVTIPSDLPADFQDFLKKCVCLDDKERWSPQQLLKHSFINPQPKMPLVEQSPEDSEGQDYVETVIPSNRLPSAAFFSETQRQFSRYFIEFEELQLLGKGAFGAVIKVQNKLDGCCYAVKRIPINPASRQFRRIKGEVTLLSRLHHENIVRYYNAWIERHERPAGPGTPPPDSGPLAKDDRAARGQPASDTDGLDSVEAAAPPPILSSSVEWSTSGERSASARFPATGPGSSDDEDDDEDEHGGVFSQSFLPASDSESDIIFDNEDENSKSQNQDEDCNEKNGCHESEPSVTTEAVHYLYIQMEYCEKSTLRDTIDQGLYRDTVRLWRLFREILDGLAYIHEKGMIHRDLKPVNIFLDSDDHVKIGDFGLATDHLAFSADSKQDDQTGDLIKSDPSGHLTGMVGTALYVSPEVQGSTKSAYNQKVDLFSLGIIFFEMSYHPMVTASERIFVLNQLRDPTSPKFPEDFDDGEHAKQKSVISWLLNHDPAKRPTATELLKSELLPPPQMEESELHEVLHHTLTNVDGKAYRTMMAQIFSQRISPAIDYTYDSDILKGNFSIRTAKMQQHVCETIIRIFKRHGAVQLCTPLLLPRNRQIYEHNEAALFMDHSGMLVMLPFDLRIPFARYVARNNILNLKRYCIERVFRPRKLDRFHPKELLECAFDIVTSTTNSFLPTAEIIYTIYEIIQEFPALQERNYSIYLNHTMLLKAILLHCGIPEDKLSQVYIILYDAVTEKLTRREVEAKFCNLSLSSNSLCRLYKFIEQKGDLQDLMPTINSLIKQKTGIAQLVKYGLKDLEEVVGLLKKLGIKLQVLINLGLVYKVQQHNGIIFQFVAFIKRRQRAVPEILAAGGRYDLLIPQFRGPQALGPVPTAIGVSIAIDKISAAVLNMEESVTISSCDLLVVSVGQMSMSRAINLTQKLWTAGITAEIMYDWSQSQEELQEYCRHHEITYVALVSDKEGSHVKVKSFEKERQTEKRVLETELVDHVLQKLRTKVTDERNGREASDNLAVQNLKGSFSNASGLFEIHGATVVPIVSVLAPEKLSASTRRRYETQVQTRLQTSLANLHQKSSEIEILAVDLPKETILQFLSLEWDADEQAFNTTVKQLLSRLPKQRYLKLVCDEIYNIKVEKKVSVLFLYSYRDDYYRILF

SEQ ID NO: 18720 - protein, 6 aa, Artificial Sequence
  Synthetic polypeptide
SILKLR

SEQ ID NO: 18721 - protein, 507 aa, Artificial Sequence
  Synthetic polypeptide
HFLAIKYFKIKVMIFELAYHVQSFLSEHNKPPPKSFHEEMLERRAQEEQQRLLEAKRKEEQEQREILHEIQRRKEEIKEEKKRKEMAKQERLEIASLSNQDHTSKKDPGGHRTAAILHGGSPDFVGNGKHRANSSGRSRRERQYSVCNSEDSPGSCEILYFNMGSPDQLMVHKGKCIGSDEQLGKLVYNALETATGGFVLLYEWVLQWQKKMGPFLTSQEKEKIDKCKKQIQGTETEFNSLVKLSHPNVVRYLAMNLKEQDDSIVVDILVEHISGVSLAAHLSHSGPIPVHQLRRYTAQLLSGLDYLHSNSVVHKVLSASNVLVDAEGTVKITDYSISKRLADICKEDVFEQTRVRFSDNALPYKTGKKGDVWRLGLLLLSLSQGQECGEYPVTIPSDLPADFQDFLKKCVCLDDKERWSPQQLLKHSFINPQPKMPLVEQSPEDSEGQDYVETVIPSNRLPSAAFFSETQRQFSRYFIEFEELQLLGKGAFGAVIKVWYRVIPSPL

SEQ ID NO: 18722 - protein, 1512 aa, Artificial Sequence
  Synthetic polypeptide
HFLAIKYFKIKVMIFELAYHVQSFLSEHNKPPPKSFHEEMLERRAQEEQQRLLEAKRKEEQEQREILHEIQRRKEEIKEEKKRKEMAKQERLEIASLSNQDHTSKKDPGGHRTAAILHGGSPDFVGNGKHRANSSGRSRRERQYSVCNSEDSPGSCEILYFNMGSPDQLMVHKGKCIGSDEQLGKLVYNALETATGGFVLLYEWVLQWQKKMGPFLTSQEKEKIDKCKKQIQGTETEFNSLVKLSHPNVVRYLAMNLKEQDDSIVVDILVEHISGVSLAAHLSHSGPIPVHQLRRYTAQLLSGLDYLHSNSVVHKVLSASNVLVDAEGTVKITDYSISKRLADICKEDVFEQTRVRFSDNALPYKTGKKGDVWRLGLLLLSLSQGQECGEYPVTIPSDLPADFQDFLKKCVCLDDKERWSPQQLLKHSFINPQPKMPLVEQSPEDSEGQDYVETVIPSNRLPSAAFFSETQRQFSRYFIEFEELQLLGKGAFGAVIKVQNKLDGCCYAVKRIPINPASRQFRRIKGEVTLLSRLHHENIVRYYNAWIERHERPAGPGTPPPDSGPLAKDDRAARGQPASDTDGLDSVEAAAPPPILSSSVEWSTSGERSASARFPATGPGSSDDEDDDEDEHGGVFSQSFLPASDSESDIIFDNEDENSKSQNQMEYCEKSTLRDTIDQGLYRDTVRLWRLFREILDGLAYIHEKGMIHRDLKPVNIFLDSDDHVKIGDFGLATDHLAFSADSKQDDQTGDLIKSDPSGHLTGMVGTALYVSPEVQGSTKSAYNQKVDLFSLGIIFFEMSYHPMVTASERIFVLNQLRDPTSPKFPEDFDDGEHAKQKSVISWLLNHDPAKRPTATELLKSELLPPPQMEESELHEVLHHTLTNVDGKAYRTMMAQIFSQRISPAIDYTYDSDILKGNFSIRTAKMQQHVCETIIRIFKRHGAVQLCTPLLLPRNRQIYEHNEAALFMDHSGMLVMLPFDLRIPFARYVARNNILNLKRYCIERVFRPRKLDRFHPKELLECAFDIVTSTTNSFLPTAEIIYTIYEIIQEFPALQERNYSIYLNHTMLLKAILLHCGIPEDKLSQVYIILYDAVTEKLTRREVEAKFCNLSLSSNSLCRLYKFIEQKGDLQDLMPTINSLIKQKTGIAQLVKYGLKDLEEVVGLLKKLGIKLQVLINLGLVYKVQQHNGIIFQFVAFIKRRQRAVPEILAAGGRYDLLIPQFRGPQALGPVPTAIGVSIAIDKISAAVLNMEESVTISSCDLLVVSVGQMSMSRAINLTQKLWTAGITAEIMYDWSQSQEELQEYCRHHEITYVALVSDKEGSHVKVKSFEKERQTEKRVLETELVDHVLQKLRTKVTDERNGREASDNLAVQNLKGSFSNASGLFEIHGATVVPIVSVLAPEKLSASTRRRYETQVQTRLQTSLANLHQKSSEIEILAVDLPKETILQFLSLEWDADEQAFNTTVKQLLSRLPKQRYLKLVCDEIYNIKVEKKVSVLFLYSYRDDYYRILF

SEQ ID NO: 18723 - protein, 1540 aa, Artificial Sequence
  Synthetic polypeptide
HFLAIKYFKIKVMIFELAYHVQSFLSEHNKPPPKSFHEEMLERRAQEEQQRLLEAKRKEEQEQREILHEIQRRKEEIKEEKKRKEMAKQERLEIASLSNQDHTSKKDPGGHRTAAILHGGSPDFVGNGKHRANSSGRSRRERQYSVCNSEDSPGSCEILYFNMGSPDQLMVHKGKCIGSDEQLGKLVYNALETATGGFVLLYEWVLQWQKKMGPFLTSQEKEKIDKCKKQIQGTETEFNSLVKLSHPNVVRYLAMNLKEQDDSIVVDILVEHISGVSLAAHLSHSGPIPVHQLRRYTAQLLSGLDYLHSNSVVHKVLSASNVLVDAEGTVKITDYSISKRLADICKEDVFEQTRVRFSDNALPYKTGKKGDVWRLGLLLLSLSQGQECGEYPVTIPSDLPADFQDFLKKCVCLDDKERWSPQQLLKHSFINPQPKMPLVEQSPEDSEGQDYVETVIPSNRLPSAAFFSETQRQFSRYFIEFEELQLLGKGAFGAVIKVQNKLDGCCYAVKRIPINPASRQFRRIKGEVTLLSRLHHENIVRYYNAWIERHERPAGPGTPPPDSGPLAKDDRAARGQPASDTDGLDSVEAAAPPPILSSSVEWSTSGERSASARFPATGPGSSDDEDDDEDEHGGVFSQSFLPASDSESDIIFDNEDENSKSQNQDEDCNEKNGCHESEPSVTTEAVHYLYIQMEYCEKSTLRDTIDQGLYRDTVRLWRLFREILDGLAYIHEKGMIHRDLKPVNIFLDSDDHVKIGDFGLATDHLAFSADSKQDDQTGDLIKSDPSGHLTGMVGTALYVSPEVQGSTKSAYNQKVDLFSLGIIFFEMSYHPMVTASERIFVLNQLRDPTSPKFPEDFDDGEHAKQKSVISWLLNHDPAKRPTATELLKSELLPPPQMEESELHEVLHHTLTNVDGKAYRTMMAQIFSQRISPAIDYTYDSDILKGNFSIRTAKMQQHVCETIIRIFKRHGAVQLCTPLLLPRNRQIYEHNEAALFMDHSGMLVMLPFDLRIPFARYVARNNILNLKRYCIERVFRPRKLDRFHPKELLECAFDIVTSTTNSFLPTAEIIYTIYEIIQEFPALQERNYSIYLNHTMLLKAILLHCGIPEDKLSQVYIILYDAVTEKLTRREVEAKFCNLSLSSNSLCRLYKFIEQKGDLQDLMPTINSLIKQKTGIAQLVKYGLKDLEEVVGLLKKLGIKLQVLINLGLVYKVQQHNGIIFQFVAFIKRRQRAVPEILAAGGRYDLLIPQFRGPQALGPVPTAIGVSIAIDKISAAVLNMEESVTISSCDLLVVSVGQMSMSRAINLTQKLWTAGITAEIMYDWSQSQEELQEYCRHHEITYVALVSDKEGSHVKVKSFEKERQTEKRVLETELVDHVLQKLRTKVTDERNGREASDNLAVQNLKGSFSNASGLFEIHGATVVPIVSVLAPEKLSASTRRRYETQVQTRLQTSLANLHQKSSEIEILAVDLPKETILQFLSLEWDADEQAFNTTVKQLLSRLPKQRYLKLVCDEIYNIKVEKKVSVLFLYSYRDDYYRILF

SEQ ID NO: 18724 - protein, 1049 aa, Artificial Sequence
  Synthetic polypeptide
LQSFTDSPKIGEAMSLEGDEWELSKENVQPLRQGRIMSTLQGALAQESACNNTLQQQKRAFEYEIRFYTGNDPLDVWDRYISWTEQNYPQGGKESNMSTLLERAVEALQGEKRYYSDPRFLNLWLKLGRLCNEPLDMYSYLHNQGIGVSLAQFYISWAEEYEARENFRKADAIFQEGIQQKAEPLERLQSQHRQFQARVSRQTLLALEKEEEEEVFESSVPQRSTLAELKSKGKKTARAPIIRVGGALKAPSQNRGLQNPFPQQMQNNSRITVFDENADEASTAELSKPTVQPWIAPPMPRAKENELQAGPWNTGRSLEHRPRGNTASLIAVPAVLPSFTPYVEETARQPVMTPCKIEPSINHILSTRKPGKEEGDPLQRVQSHQQASEEKKEKMMYCKEKIYAGVGEFSFEEIRAEVFRKKLKEQREAELLTSAEKRAEMQKQIEEMEKKLKEIQTTQQERTGDQQEETMPTKETTKLQIASESQKIPGMTLSSSVCQVNCCARETSLAENIWQEQPHSKGPSVPFSIFDEFLLSEKKNKSPPADPPRVLAQRRPLAVLKTSESITSNEDVSPDVCDEFTGIEPLSEDAIITGFRNVTICPNPEDTCDFARAARFVSTPFHEIMSLKDLPSDPERLLPEEDLDVKTSEDQQTACGTIYSQTLSIKKLSPIIEDSREATHSSGFSGSSASVASTSSIKCLQIPEKLELTNETSENPTQSPWCSQYRRQLLKSLPELSASAELCIEDRPMPKLEIEKEIELGNEDYCIKREYLICEDYKLFWVAPRNSAELTVIKVSSQPVPWDFYINLKLKERLNEDFDHFCSCYQYQDGCIVWHQYINCFTLQDLLQHSEYITHEITVLIIYNLLTIVEMLHKAEIVHGDLSPRCLILRNRIHDPYDCNKNNQALKIVDFSYSVDLRVQLDVFTLSGFRTVQILEGQKILANCSSPYQVDLFGIADLAHLLLFKEHLQVFWDGSFWKLSQNISELKDGELWNKFFVRILNANDEATVSVLGELAAEMNGVFDTTFQSHLNKALWKVGKLTSPGALLFQ

SEQ ID NO: 18725 - protein, 44 aa, Artificial Sequence
  Synthetic polypeptide
EVLLEIFTLKHLFLELTHQHYDCSHSLIRQKLVKPCPWREMNGN

SEQ ID NO: 18726 - protein, 95 aa, Artificial Sequence
  Synthetic polypeptide
LQSFTDSPKIGEAMSLEGDEWELSKENVQPLRQGRIMSTLQGALAQESACNNTLQQQKRDGVSLFRPGWSAVARSWLTGSSASWVHANLLPQPPE

SEQ ID NO: 18727 - protein, 1063 aa, Artificial Sequence
  Synthetic polypeptide
LQSFTDSPKIGEAMSLEGDEWELSKENVQPLRQGRIMSTLQGALAQESACNNTLQQQKRAFEYEIRFYTGNDPLDVWDRWVFLFHKDNRNINRYISWTEQNYPQGGKESNMSTLLERAVEALQGEKRYYSDPRFLNLWLKLGRLCNEPLDMYSYLHNQGIGVSLAQFYISWAEEYEARENFRKADAIFQEGIQQKAEPLERLQSQHRQFQARVSRQTLLALEKEEEEEVFESSVPQRSTLAELKSKGKKTARAPIIRVGGALKAPSQNRGLQNPFPQQMQNNSRITVFDENADEASTAELSKPTVQPWIAPPMPRAKENELQAGPWNTGRSLEHRPRGNTASLIAVPAVLPSFTPYVEETARQPVMTPCKIEPSINHILSTRKPGKEEGDPLQRVQSHQQASEEKKEKMMYCKEKIYAGVGEFSFEEIRAEVFRKKLKEQREAELLTSAEKRAEMQKQIEEMEKKLKEIQTTQQERTGDQQEETMPTKETTKLQIASESQKIPGMTLSSSVCQVNCCARETSLAENIWQEQPHSKGPSVPFSIFDEFLLSEKKNKSPPADPPRVLAQRRPLAVLKTSESITSNEDVSPDVCDEFTGIEPLSEDAIITGFRNVTICPNPEDTCDFARAARFVSTPFHEIMSLKDLPSDPERLLPEEDLDVKTSEDQQTACGTIYSQTLSIKKLSPIIEDSREATHSSGFSGSSASVASTSSIKCLQIPEKLELTNETSENPTQSPWCSQYRRQLLKSLPELSASAELCIEDRPMPKLEIEKEIELGNEDYCIKREYLICEDYKLFWVAPRNSAELTVIKVSSQPVPWDFYINLKLKERLNEDFDHFCSCYQYQDGCIVWHQYINCFTLQDLLQHSEYITHEITVLIIYNLLTIVEMLHKAEIVHGDLSPRCLILRNRIHDPYDCNKNNQALKIVDFSYSVDLRVQLDVFTLSGFRTVQILEGQKILANCSSPYQVDLFGIADLAHLLLFKEHLQVFWDGSFWKLSQNISELKDGELWNKFFVRILNANDEATVSVLGELAAEMNGVFDTTFQSHLNKALWKVGKLTSPGALLFQ

SEQ ID NO: 18728 - protein, 11 aa, Artificial Sequence
  Synthetic polypeptide
EAEAGGSPEGI

SEQ ID NO: 18729 - protein, 1004 aa, Artificial Sequence
  Synthetic polypeptide
SQHFRRPRQADHLRAFEYEIRFYTGNDPLDVWDRYISWTEQNYPQGGKESNMSTLLERAVEALQGEKRYYSDPRFLNLWLKLGRLCNEPLDMYSYLHNQGIGVSLAQFYISWAEEYEARENFRKADAIFQEGIQQKAEPLERLQSQHRQFQARVSRQTLLALEKEEEEEVFESSVPQRSTLAELKSKGKKTARAPIIRVGGALKAPSQNRGLQNPFPQQMQNNSRITVFDENADEASTAELSKPTVQPWIAPPMPRAKENELQAGPWNTGRSLEHRPRGNTASLIAVPAVLPSFTPYVEETARQPVMTPCKIEPSINHILSTRKPGKEEGDPLQRVQSHQQASEEKKEKMMYCKEKIYAGVGEFSFEEIRAEVFRKKLKEQREAELLTSAEKRAEMQKQIEEMEKKLKEIQTTQQERTGDQQEETMPTKETTKLQIASESQKIPGMTLSSSVCQVNCCARETSLAENIWQEQPHSKGPSVPFSIFDEFLLSEKKNKSPPADPPRVLAQRRPLAVLKTSESITSNEDVSPDVCDEFTGIEPLSEDAIITGFRNVTICPNPEDTCDFARAARFVSTPFHEIMSLKDLPSDPERLLPEEDLDVKTSEDQQTACGTIYSQTLSIKKLSPIIEDSREATHSSGFSGSSASVASTSSIKCLQIPEKLELTNETSENPTQSPWCSQYRRQLLKSLPELSASAELCIEDRPMPKLEIEKEIELGNEDYCIKREYLICEDYKLFWVAPRNSAELTVIKVSSQPVPWDFYINLKLKERLNEDFDHFCSCYQYQDGCIVWHQYINCFTLQDLLQHSEYITHEITVLIIYNLLTIVEMLHKAEIVHGDLSPRCLILRNRIHDPYDCNKNNQALKIVDFSYSVDLRVQLDVFTLSGFRTVQILEGQKILANCSSPYQVDLFGIADLAHLLLFKEHLQVFWDGSFWKLSQNISELKDGELWNKFFVRILNANDEATVSVLGELAAEMNGVFDTTFQSHLNKALWKVGKLTSPGALLFQ

SEQ ID NO: 18730 - protein, 1018 aa, Artificial Sequence
  Synthetic polypeptide
SQHFRRPRQADHLRAFEYEIRFYTGNDPLDVWDRWVFLFHKDNRNINRYISWTEQNYPQGGKESNMSTLLERAVEALQGEKRYYSDPRFLNLWLKLGRLCNEPLDMYSYLHNQGIGVSLAQFYISWAEEYEARENFRKADAIFQEGIQQKAEPLERLQSQHRQFQARVSRQTLLALEKEEEEEVFESSVPQRSTLAELKSKGKKTARAPIIRVGGALKAPSQNRGLQNPFPQQMQNNSRITVFDENADEASTAELSKPTVQPWIAPPMPRAKENELQAGPWNTGRSLEHRPRGNTASLIAVPAVLPSFTPYVEETARQPVMTPCKIEPSINHILSTRKPGKEEGDPLQRVQSHQQASEEKKEKMMYCKEKIYAGVGEFSFEEIRAEVFRKKLKEQREAELLTSAEKRAEMQKQIEEMEKKLKEIQTTQQERTGDQQEETMPTKETTKLQIASESQKIPGMTLSSSVCQVNCCARETSLAENIWQEQPHSKGPSVPFSIFDEFLLSEKKNKSPPADPPRVLAQRRPLAVLKTSESITSNEDVSPDVCDEFTGIEPLSEDAIITGFRNVTICPNPEDTCDFARAARFVSTPFHEIMSLKDLPSDPERLLPEEDLDVKTSEDQQTACGTIYSQTLSIKKLSPIIEDSREATHSSGFSGSSASVASTSSIKCLQIPEKLELTNETSENPTQSPWCSQYRRQLLKSLPELSASAELCIEDRPMPKLEIEKEIELGNEDYCIKREYLICEDYKLFWVAPRNSAELTVIKVSSQPVPWDFYINLKLKERLNEDFDHFCSCYQYQDGCIVWHQYINCFTLQDLLQHSEYITHEITVLIIYNLLTIVEMLHKAEIVHGDLSPRCLILRNRIHDPYDCNKNNQALKIVDFSYSVDLRVQLDVFTLSGFRTVQILEGQKILANCSSPYQVDLFGIADLAHLLLFKEHLQVFWDGSFWKLSQNISELKDGELWNKFFVRILNANDEATVSVLGELAAEMNGVFDTTFQSHLNKALWKVGKLTSPGALLFQ

SEQ ID NO: 18731 - protein, 19 aa, Artificial Sequence
  Synthetic polypeptide
RAWQPTFAIPALWEAKDTM

SEQ ID NO: 18732 - protein, 713 aa, Artificial Sequence
  Synthetic polypeptide
GHGSPRLPSQHFGRPRTPCKIEPSINHILSTRKPGKEEGDPLQRVQSHQQASEEKKEKMMYCKEKIYAGVGEFSFEEIRAEVFRKKLKEQREAELLTSAEKRAEMQKQIEEMEKKLKEIQTTQQERTGDQQEETMPTKETTKLQIASESQKIPGMTLSSSVCQVNCCARETSLAENIWQEQPHSKGPSVPFSIFDEFLLSEKKNKSPPADPPRVLAQRRPLAVLKTSESITSNEDVSPDVCDEFTGIEPLSEDAIITGFRNVTICPNPEDTCDFARAARFVSTPFHEIMSLKDLPSDPERLLPEEDLDVKTSEDQQTACGTIYSQTLSIKKLSPIIEDSREATHSSGFSGSSASVASTSSIKCLQIPEKLELTNETSENPTQSPWCSQYRRQLLKSLPELSASAELCIEDRPMPKLEIEKEIELGNEDYCIKREYLICEDYKLFWVAPRNSAELTVIKVSSQPVPWDFYINLKLKERLNEDFDHFCSCYQYQDGCIVWHQYINCFTLQDLLQHSEYITHEITVLIIYNLLTIVEMLHKAEIVHGDLSPRCLILRNRIHDPYDCNKNNQALKIVDFSYSVDLRVQLDVFTLSGFRTVQILEGQKILANCSSPYQVDLFGIADLAHLLLFKEHLQVFWDGSFWKLSQNISELKDGELWNKFFVRILNANDEATVSVLGELAAEMNGVFDTTFQSHLNKALWKVGKLTSPGALLFQ

SEQ ID NO: 18733 - protein, 24 aa, Artificial Sequence
  Synthetic polypeptide
GMAAHVCHPSTLGGQGHHVKLNLV

SEQ ID NO: 18734 - protein, 25 aa, Artificial Sequence
  Synthetic polypeptide
GHGSPRLPSQHFGRPRTPCKIEPSI

SEQ ID NO: 18735 - protein, 2334 aa, Artificial Sequence
  Synthetic polypeptide
LTFSDNIERPVRRRHSSILKPPRSPLQDLRGGNERVQESNALRNKKNSRRVSFADTIKVFQTESHMKIVRKSEMEGCSAMVPSQLQLLPPGFKRFSCLSLPETETGENLLLIQNKKLEDNYCEITGMNTLLSAPIHTQMQQKEFSIIEHTRERKHANDQTVIFSDENQMDLTSSHTVMITKGLLDNPISEKSTKIDTTSFLANLKLHTEDSRMKKEVNFSVDQNTSSENKIDFNDFIKRLKTGKCSAFPDVPDKENFEIPIYSKEPNSASSTHQMHVSLKEDENNSNITRLFREKDDGMNFTQCHTANIQTLIPTSSETNSRESKGNDITIYGNDFMDLTFNHTLQILPATGNFSEIENQTQNAMDVTTGYGTKASGNKTVFKSKQNTAFQDLSINSADKIHITRSHIMGAETHIVSQTCNQDARILAMTPESIYSNPSIQGCKTVFYSSCNDAMEMTKCLSNMREEKNLLKHDSNYAKMYCNPDAMSSLTEKTIYSGEENMDITKSHTVAIDNQIFKQDQSNVQIAAAPTPEKEMMLQNLMTTSEDGKMNVNCNSVPHVSKERIQQSLSNPLSISLTDRKTELLSGENMDLTESHTSNLGSQVPLAAYNLAPESTSESHSQSKSSSDECEEITKSRNEPFQRSDIIAKNSLTDTWNKDKDWVLKILPYLDKDSPQSADCNQEIATSHNIVYCGGVLDKQITNRNTVSWEQSLFSTTKPLFSSGQFSMKNHDTAISSHTVKSVLGQNSKLAEPLRKSLSNPTPDYCHDKMIICSEEEQNMDLTKSHTVVIGFGPSELQELGKTNLEHTTGQLTTMNRQIAVKVEKCGKSPIEKSGVLKSNCIMDVLEDESVQKPKFPKEKQNVKIWGRKSVGGPKIDKTIVFSEDDKNDMDITKSYTIEINHRPLLEKRDCHLVPLAGTSETILYTCRQDDMEITRSHTTALECKTVSPDEITTRPMDKTVVFVDNHVELEMTESHTVFIDYQEKERTDRPNFELSQRKSLGTPTVICTPTEESVFFPGNGESDRLVANDSQLTPLEEWSNNRGPVEVADNMELSKSATCKNIKDVQSPGFLNEPLSSKSQRRKSLKLKNDKTIVFSENHKNDMDITQSCMVEIDNESALEDKEDFHLAGASKTILYSCGQDDMEITRSHTTALECKTLLPNEIAIRPMDKTVLFTDNYSDLEVTDSHTVFIDCQATEKILEENPKFGIGKGKNLGVSFPKDNSCVQEIAEKQALAVGNKIVLHTEQKQQLFAATNRTTNEIIKFHSAAMDEKVIGKVVDQACTLEKAQVESCQLNNRDRRNVDFTSSHATAVCGSSDNYSCLPNVISCTDNLEGSAMLLCDKDEEKANYCPVQNDLAYANDFASEYYLESEGQPLSAPCPLLEKEEVIQTSTKGQLDCVITLHKDQDLIKDPRNLLANQTLVYSQDLGEMTKLNSKRVSFKLPKDQMKVYVDDIYVIPQPHFSTDQPPLPKKGQSSINKEEVILSKAGNKSLNIIENSSAPICENKPKILNSEEWFAAACKKELKENIQTTNYNTALDFHSNSDVTKQVIQTHVNAGEAPDPVITSNVPCFHSIKPNLNNLNGKTGEFLAFQTVHLPPLPEQLLELGNKAHNDMHIVQATEIHNINIISSNAKDSRDEENKKSHNGAETTSLPPKTVFKDKVRRCSLGIFLPRLPNKRNCSVTGIDDLEQIPADTTDINHLETQPVSSKDSGIGSVAGKLNLSPSQYINEENLPVYPDEINSSDSINIETEEKALIETYQKEISPYENKMGKTCNSQKRTWVQEEEDIHKEKKIRKNEIKFSDTTQDREIFDHHTEEDIDKSANSVLIKNLSRTPSSCSSSLDSIKADGTSLDFSTYRSSQMESQFLRDTICEESLREKLQDGRITIREFFILLQVHILIQKPRQSNLPGNFTVNTPPTPEDLMLSQYVYRPKIQIYREDCEARRQKIEELKLSASNQDKLLVDINKNLWEKMRHCSDKELKAFGIYLNKIKSCFTKMTKVFTHQGKVALYGKLVQSAQNEREKLQIKIDEMDKILKKIDNCLTEMETETKNLEDEEKNNPVEEWDSEMRAAEKELEQLKTEEEELQRNLLELEVQKEQTLAQIDFMQKQRNRTEELLDQLSLSEWDVVEWSDDQAVFTFVYDTIQLTITFEESVVGFPFLDKRYRKIVDVNFQSLLDEDQAPPSSLLVHKLIFQYVEEKESWKKTCTTQHQLPKMLEEFSLVVHHCRLLGEEIEYLKRWGPNYNLMNIDINNNELRLLFSSSAAFAKFEITLFLSAYYPSVPLPSTIQNHVGNTSQDDIATILSKVPLENNYLKNVVKQIYQDLFQDCHFYH

SEQ ID NO: 18736 - protein, 5 aa, Artificial Sequence
  Synthetic polypeptide
PLVTI

SEQ ID NO: 18737 - protein, 105 aa, Artificial Sequence
  Synthetic polypeptide
LTFSDNIERPVRRRHSSILKPPRSPLQDLRGGNERVQESNALRNKKNSRRVSFADTIKVFQTESHMKIVRKSEMEETGENLLLIQNKKLEDNYCEITVFNYRTYP

SEQ ID NO: 18738 - protein, 2308 aa, Artificial Sequence
  Synthetic polypeptide
LTFSDNIERPVRRRHSSILKPPRSPLQDLRGGNERVQESNALRNKKNSRRVSFADTIKVFQTESHMKIVRKSEMEETETGENLLLIQNKKLEDNYCEITGMNTLLSAPIHTQMQQKEFSIIEHTRERKHANDQTVIFSDENQMDLTSSHTVMITKGLLDNPISEKSTKIDTTSFLANLKLHTEDSRMKKEVNFSVDQNTSSENKIDFNDFIKRLKTGKCSAFPDVPDKENFEIPIYSKEPNSASSTHQMHVSLKEDENNSNITRLFREKDDGMNFTQCHTANIQTLIPTSSETNSRESKGNDITIYGNDFMDLTFNHTLQILPATGNFSEIENQTQNAMDVTTGYGTKASGNKTVFKSKQNTAFQDLSINSADKIHITRSHIMGAETHIVSQTCNQDARILAMTPESIYSNPSIQGCKTVFYSSCNDAMEMTKCLSNMREEKNLLKHDSNYAKMYCNPDAMSSLTEKTIYSGEENMDITKSHTVAIDNQIFKQDQSNVQIAAAPTPEKEMMLQNLMTTSEDGKMNVNCNSVPHVSKERIQQSLSNPLSISLTDRKTELLSGENMDLTESHTSNLGSQVPLAAYNLAPESTSESHSQSKSSSDECEEITKSRNEPFQRSDIIAKNSLTDTWNKDKDWVLKILPYLDKDSPQSADCNQEIATSHNIVYCGGVLDKQITNRNTVSWEQSLFSTTKPLFSSGQFSMKNHDTAISSHTVKSVLGQNSKLAEPLRKSLSNPTPDYCHDKMIICSEEEQNMDLTKSHTVVIGFGPSELQELGKTNLEHTTGQLTTMNRQIAVKVEKCGKSPIEKSGVLKSNCIMDVLEDESVQKPKFPKEKQNVKIWGRKSVGGPKIDKTIVFSEDDKNDMDITKSYTIEINHRPLLEKRDCHLVPLAGTSETILYTCRQDDMEITRSHTTALECKTVSPDEITTRPMDKTVVFVDNHVELEMTESHTVFIDYQEKERTDRPNFELSQRKSLGTPTVICTPTEESVFFPGNGESDRLVANDSQLTPLEEWSNNRGPVEVADNMELSKSATCKNIKDVQSPGFLNEPLSSKSQRRKSLKLKNDKTIVFSENHKNDMDITQSCMVEIDNESALEDKEDFHLAGASKTILYSCGQDDMEITRSHTTALECKTLLPNEIAIRPMDKTVLFTDNYSDLEVTDSHTVFIDCQATEKILEENPKFGIGKGKNLGVSFPKDNSCVQEIAEKQALAVGNKIVLHTEQKQQLFAATNRTTNEIIKFHSAAMDEKVIGKVVDQACTLEKAQVESCQLNNRDRRNVDFTSSHATAVCGSSDNYSCLPNVISCTDNLEGSAMLLCDKDEEKANYCPVQNDLAYANDFASEYYLESEGQPLSAPCPLLEKEEVIQTSTKGQLDCVITLHKDQDLIKDPRNLLANQTLVYSQDLGEMTKLNSKRVSFKLPKDQMKVYVDDIYVIPQPHFSTDQPPLPKKGQSSINKEEVILSKAGNKSLNIIENSSAPICENKPKILNSEEWFAAACKKELKENIQTTNYNTALDFHSNSDVTKQVIQTHVNAGEAPDPVITSNVPCFHSIKPNLNNLNGKTGEFLAFQTVHLPPLPEQLLELGNKAHNDMHIVQATEIHNINIISSNAKDSRDEENKKSHNGAETTSLPPKTVFKDKVRRCSLGIFLPRLPNKRNCSVTGIDDLEQIPADTTDINHLETQPVSSKDSGIGSVAGKLNLSPSQYINEENLPVYPDEINSSDSINIETEEKALIETYQKEISPYENKMGKTCNSQKRTWVQEEEDIHKEKKIRKNEIKFSDTTQDREIFDHHTEEDIDKSANSVLIKNLSRTPSSCSSSLDSIKADGTSLDFSTYRSSQMESQFLRDTICEESLREKLQDGRITIREFFILLQVHILIQKPRQSNLPGNFTVNTPPTPEDLMLSQYVYRPKIQIYREDCEARRQKIEELKLSASNQDKLLVDINKNLWEKMRHCSDKELKAFGIYLNKIKSCFTKMTKVFTHQGKVALYGKLVQSAQNEREKLQIKIDEMDKILKKIDNCLTEMETETKNLEDEEKNNPVEEWDSEMRAAEKELEQLKTEEEELQRNLLELEVQKEQTLAQIDFMQKQRNRTEELLDQLSLSEWDVVEWSDDQAVFTFVYDTIQLTITFEESVVGFPFLDKRYRKIVDVNFQSLLDEDQAPPSSLLVHKLIFQYVEEKESWKKTCTTQHQLPKMLEEFSLVVHHCRLLGEEIEYLKRWGPNYNLMNIDINNNELRLLFSSSAAFAKFEITLFLSAYYPSVPLPSTIQNHVGNTSQDDIATILSKVPLENNYLKNVVKQIYQDLFQDCHFYH

SEQ ID NO: 18739 - protein, 72 aa, Artificial Sequence
  Synthetic polypeptide
LTFSDNIERPVRRRHSSILKPPRSPLQDLRGPHLDTETPTEQSPRQFYCKHTTYSRRPDVKSICLPTQDTDL

SEQ ID NO: 18740 - protein, 32 aa, Artificial Sequence
  Synthetic polypeptide
GQEFETGLAHMLVSLSWTSVIGRLLMSIFNLC

SEQ ID NO: 18741 - protein, 38 aa, Artificial Sequence
  Synthetic polypeptide
LTPVLPTLWEAEVGGSSEVRSSKPAWPTCWFPFPGQAL

SEQ ID NO: 18742 - protein, 206 aa, Artificial Sequence
  Synthetic polypeptide
SRLYSQHFGRLRWADHLRSGVRNRPGPHVGFPFLDKRYRKIVDVNFQSLLDEDQAPPSSLLVHKLIFQYVEEKESWKKTCTTQHQLPKMLEEFSLVVHHCRLLGEEIEYLKRWGPNYNLMNIDINNNELRLLFSSSAAFAKFEITLFLSAYYPSVPLPSTIQNHVGNTSQDDIATILSKVPLENNYLKNVVKQIYQDLFQDCHFYH

SEQ ID NO: 18743 - protein, 128 aa, Artificial Sequence
  Synthetic polypeptide
VSLEVDLLLLNLESLALSPRLECSGVIHSLQLLPPGFNRFSCLSSWSSWDYGIKQPLLSLRLTWKLSWIYPQRSRRLSWRPFLGTAPAPQRLLSLSCSVNSRNSGDSAGLRNKPERPSLAASALPGLP

SEQ ID NO: 18744 - protein, 15 aa, Artificial Sequence
  Synthetic polypeptide
TLRVLLCHPGWSAVV

SEQ ID NO: 18745 - protein, 929 aa, Artificial Sequence
  Synthetic polypeptide
GRAWWLTPIISALREAKTRGSHEISSLRPAWAIYIDLGKANEPNHVELGRKDDAKVHKMFLDHTGSHLLIALSSTEVLYVNRNGQKVRPLARWKGQLVESVGWNKALGTESSTGPILVGTAQGHIFEAELSASEGGLFGPAPDLYFRPLYVLNEEGGPAPVCSLEAERGPDGRSFVIATTRQRLFQFIGRAAEGAEAQGFSGLFAAYTDHPPPFREFPSNLGYSELAFYTPKLRSAPRAFAWMMGDGVLYGALDCGRPDSLLSEERVWEYPEGVGPGASPPLAIVLTQFHFLLLLADRVEAVCTLTGQVVLRDHFLEKFGPLKHMVKDSSTGQLWAYTERAVFRYHVQREARDVWRTYLDMNRFDLAKEYCRERPDCLDTVLAREADFCFRQRRYLESARCYALTQSYFEEIALKFLEARQEEALAEFLQRKLASLKPAERTQATLLTTWLTELYLSRLGALQGDPEALTLYRETKECFRTFLSSPRHKEWLFASRASIHELLASHGDTEHMVYFAVIMQDYERVVAYHCQHEAYEEALAVLARHRDPQLFYKFSPILIRHIPRQLVDAWIEMGSRLDARQLIPALVNYSQGGEVQQVSQAIRYMEFCVNVLGETEQAIHNYLLSLYARGRPDSLLAYLEQAGASPHRVHYDLKYALRLCAEHGHHRACVHVYKVLELYEEAVDLALQVDVDLAKQCADLPEEDEELRKKLWLKIARHVVQEEEDVQTAMACLASCPLLKIEDVLPFFPDFVTIDHFKEAICSSLKAYNHHIQELQREMEEATASAQRIRRDLQELRGRYGTVEPQDKCATCDFPLLNRPFYLFLCGHMFHADCLLQAVRPGLPAYKQARLEELQRKLGAAPPPAKGSARAKEAEGGAATAGPSREQLKADLDELVAAECVYCGELMIRSIDRPFIDPQRYEEEQLSWL

SEQ ID NO: 18746 - protein, 41 aa, Artificial Sequence
  Synthetic polypeptide
DQPGQYTLTWARQMSPTTWSWDVRMTQKFTRCSLTILALTC

SEQ ID NO: 18747 - protein, 12 aa, Artificial Sequence
  Synthetic polypeptide
NQQFETSLGNIH

SEQ ID NO: 18748 - protein, 35 aa, Artificial Sequence
  Synthetic polypeptide
GRAWWLTPIISALREAKTRGSHEISSLRPAWAIYI

SEQ ID NO: 18749 - protein, 8 aa, Artificial Sequence
  Synthetic polypeptide
DQPGQYTL

SEQ ID NO: 18750 - protein, 77 aa, Artificial Sequence
  Synthetic polypeptide
GRAWWLTPIISALREAKTRGSHEISSLRPAWAIYIDLGKANEPNHVELGRKDDAKVHKMFLDHTGGCGPGQAVCRPA

SEQ ID NO: 18751 - protein, 50 aa, Artificial Sequence
  Synthetic polypeptide
DQPGQYTLTWARQMSPTTWSWDVRMTQKFTRCSLTILVDVDLAKQCADLP

SEQ ID NO: 18752 - protein, 50 aa, Artificial Sequence
  Synthetic polypeptide
GQAPWLMHVIPALWEAKADGSRVLTTFYSVVLVGFPLVSICILPMLPWLP

SEQ ID NO: 18753 - protein, 49 aa, Artificial Sequence
  Synthetic polypeptide
SQHFGRPRRMDHEYLQPFILWFLWDSRWFPSVFYPCCPGCLERSLLPFQ

SEQ ID NO: 18754 - protein, 121 aa, Artificial Sequence
  Synthetic polypeptide
PGAVADACNPSTLGGQGGWITSTYNLLFCGSCGIPVGFHLYSTHAALAALRGHFCLSSDKMVCYLLKTKAIVNASEMDIQNVPLSEKIAELKEKIVLTHNRLKSLMKILSEVTPDQSKPEN

SEQ ID NO: 18755 - protein, 30 aa, Artificial Sequence
  Synthetic polypeptide
WLVPIIPLLWEAKSGGLLEPRSSGPAWATW

SEQ ID NO: 18756 - protein, 316 aa, Artificial Sequence
  Synthetic polypeptide
SHYFGKPSQEDCLSLGVQDQPGQHGNRDSKVPSEGKKSLYTDESSKPGKNKRTAITTPNFKKLHEAHFKEMESIDQYIERKKKHFEEHNSMNELKQQPINKGGVRTPVPPRGRLSVASTPISQRRSQGRSCGPASQSTLGLKGSLKRSAISAAKTGVRFSAATKDNEHKRSLTKTPARKSAHVTVSGGTPKGEAVLGTHKLKTITGNSAAVITPFKLTTEATQTPVSNKKPVFDLKASLSRPLNYEPHKGKLKPWGQSKENNYLNQHVNRINFYKKTYKQPHLQTKEEQRKKREQERKEKKAKVLGMRRGLILAED

SEQ ID NO: 18757 - protein, 75 aa, Artificial Sequence
  Synthetic polypeptide
EFRTSLGNMVTEIQRYLQKERNLSTQMSHPNLEKIKELQSLLQTLRSFMKLILRKWSPLINILREKRNILKNTIP

SEQ ID NO: 18758 - protein, 277 aa, Artificial Sequence
  Synthetic polypeptide
SHYFGKPSQEDCLSLGVQDQPGQHGNRDSKVPSEGKKSLYTDESSKPGKNKRTAITTPNFKKLHEAHFKEMESIDQYIERKKKHFEEHNSMNELKQQPINKGGVRTPVPPRGRLSVASTPISQRRSQGRSCGPASQSTLGLKGSLKRSAISAAKTGVRFSAATKDNEHKRSLTKTPARKSAHVTVSGGTPKGEAVLGTHKLKTITGNSAAGKLKPWGQSKENNYLNQHVNRINFYKKTYKQPHLQTKEEQRKKREQERKEKKAKVLGMRRGLILAED

SEQ ID NO: 18759 - protein, 276 aa, Artificial Sequence
  Synthetic polypeptide
SHYFGKPSQEDCLSLGVQDQPGQHGNRDSKVPSEGKKSLYTDESSKPGKNKRTAITTPNFKKLHEAHFKEMESIDQYIERKKKHFEEHNSMNELKQPINKGGVRTPVPPRGRLSVASTPISQRRSQGRSCGPASQSTLGLKGSLKRSAISAAKTGVRFSAATKDNEHKRSLTKTPARKSAHVTVSGGTPKGEAVLGTHKLKTITGNSAAGKLKPWGQSKENNYLNQHVNRINFYKKTYKQPHLQTKEEQRKKREQERKEKKAKVLGMRRGLILAED

SEQ ID NO: 18760 - protein, 315 aa, Artificial Sequence
  Synthetic polypeptide
SHYFGKPSQEDCLSLGVQDQPGQHGNRDSKVPSEGKKSLYTDESSKPGKNKRTAITTPNFKKLHEAHFKEMESIDQYIERKKKHFEEHNSMNELKQPINKGGVRTPVPPRGRLSVASTPISQRRSQGRSCGPASQSTLGLKGSLKRSAISAAKTGVRFSAATKDNEHKRSLTKTPARKSAHVTVSGGTPKGEAVLGTHKLKTITGNSAAVITPFKLTTEATQTPVSNKKPVFDLKASLSRPLNYEPHKGKLKPWGQSKENNYLNQHVNRINFYKKTYKQPHLQTKEEQRKKREQERKEKKAKVLGMRRGLILAED

SEQ ID NO: 18761 - protein, 159 aa, Artificial Sequence
  Synthetic polypeptide
SHYFGKPSQEDCLSLGVQDQPGQHGNRDSKVPSEGKKSLYTDESSKPGKNKRTAITTPNFKKLHEAHFKEMESIDQYIERKKKHFEEHNSMNELKQPINKGGVRTPVPPRGRLSVASTPISQRRSQGRSCGPASQSTLGLKGSLKRSAISAAKTGVRFK

SEQ ID NO: 18762 - protein, 322 aa, Artificial Sequence
  Synthetic polypeptide
GQAQWLTLVILTLWEAKVDGSPEVRIETSLGNRDSKVPSEGKKSLYTDESSKPGKNKRTAITTPNFKKLHEAHFKEMESIDQYIERKKKHFEEHNSMNELKQQPINKGGVRTPVPPRGRLSVASTPISQRRSQGRSCGPASQSTLGLKGSLKRSAISAAKTGVRFSAATKDNEHKRSLTKTPARKSAHVTVSGGTPKGEAVLGTHKLKTITGNSAAVITPFKLTTEATQTPVSNKKPVFDLKASLSRPLNYEPHKGKLKPWGQSKENNYLNQHVNRINFYKKTYKQPHLQTKEEQRKKREQERKEKKAKVLGMRRGLILAED

SEQ ID NO: 18763 - protein, 85 aa, Artificial Sequence
  Synthetic polypeptide
HFGRPRWMDHLRSGSRPAWVTEIQRYLQKERNLSTQMSHPNLEKIKELQSLLQTLRSFMKLILRKWSPLINILREKRNILKNTIP

SEQ ID NO: 18764 - protein, 8 aa, Artificial Sequence
  Synthetic polypeptide
GQDRDQPG

SEQ ID NO: 18765 - protein, 283 aa, Artificial Sequence
  Synthetic polypeptide
GQAQWLTLVILTLWEAKVDGSPEVRIETSLGNRDSKVPSEGKKSLYTDESSKPGKNKRTAITTPNFKKLHEAHFKEMESIDQYIERKKKHFEEHNSMNELKQQPINKGGVRTPVPPRGRLSVASTPISQRRSQGRSCGPASQSTLGLKGSLKRSAISAAKTGVRFSAATKDNEHKRSLTKTPARKSAHVTVSGGTPKGEAVLGTHKLKTITGNSAAGKLKPWGQSKENNYLNQHVNRINFYKKTYKQPHLQTKEEQRKKREQERKEKKAKVLGMRRGLILAED

SEQ ID NO: 18766 - protein, 282 aa, Artificial Sequence
  Synthetic polypeptide
GQAQWLTLVILTLWEAKVDGSPEVRIETSLGNRDSKVPSEGKKSLYTDESSKPGKNKRTAITTPNFKKLHEAHFKEMESIDQYIERKKKHFEEHNSMNELKQPINKGGVRTPVPPRGRLSVASTPISQRRSQGRSCGPASQSTLGLKGSLKRSAISAAKTGVRFSAATKDNEHKRSLTKTPARKSAHVTVSGGTPKGEAVLGTHKLKTITGNSAAGKLKPWGQSKENNYLNQHVNRINFYKKTYKQPHLQTKEEQRKKREQERKEKKAKVLGMRRGLILAED

SEQ ID NO: 18767 - protein, 321 aa, Artificial Sequence
  Synthetic polypeptide
GQAQWLTLVILTLWEAKVDGSPEVRIETSLGNRDSKVPSEGKKSLYTDESSKPGKNKRTAITTPNFKKLHEAHFKEMESIDQYIERKKKHFEEHNSMNELKQPINKGGVRTPVPPRGRLSVASTPISQRRSQGRSCGPASQSTLGLKGSLKRSAISAAKTGVRFSAATKDNEHKRSLTKTPARKSAHVTVSGGTPKGEAVLGTHKLKTITGNSAAVITPFKLTTEATQTPVSNKKPVFDLKASLSRPLNYEPHKGKLKPWGQSKENNYLNQHVNRINFYKKTYKQPHLQTKEEQRKKREQERKEKKAKVLGMRRGLILAED

SEQ ID NO: 18768 - protein, 165 aa, Artificial Sequence
  Synthetic polypeptide
GQAQWLTLVILTLWEAKVDGSPEVRIETSLGNRDSKVPSEGKKSLYTDESSKPGKNKRTAITTPNFKKLHEAHFKEMESIDQYIERKKKHFEEHNSMNELKQPINKGGVRTPVPPRGRLSVASTPISQRRSQGRSCGPASQSTLGLKGSLKRSAISAAKTGVRFK

SEQ ID NO: 18769 - protein, 18 aa, Artificial Sequence
  Synthetic polypeptide
SQHFGRPRRADHEVFSCY

SEQ ID NO: 18770 - protein, 180 aa, Artificial Sequence
  Synthetic polypeptide
PGAVAHACNPSTLGGRDGRIMRFSAATKDNEHKRSLTKTPARKSAHVTVSGGTPKGEAVLGTHKLKTITGNSAAVITPFKLTTEATQTPVSNKKPVFDLKASLSRPLNYEPHKGKLKPWGQSKENNYLNQHVNRINFYKKTYKQPHLQTKEEQRKKREQERKEKKAKVLGMRRGLILAED

SEQ ID NO: 18771 - protein, 141 aa, Artificial Sequence
  Synthetic polypeptide
PGAVAHACNPSTLGGRDGRIMRFSAATKDNEHKRSLTKTPARKSAHVTVSGGTPKGEAVLGTHKLKTITGNSAAGKLKPWGQSKENNYLNQHVNRINFYKKTYKQPHLQTKEEQRKKREQERKEKKAKVLGMRRGLILAED

SEQ ID NO: 18772 - protein, 340 aa, Artificial Sequence
  Synthetic polypeptide
GWAQWLTPVIPVLWEAGGSRGQEIETILANMVAEITGVVETAKVYQLGGTRTNKGLQLRHGNDQRVFRLEFVSNQEFTESEFMKWKEAMFSAGMQLPTLDEINKKELSIKEALNYKFNDQDIEEIVKEKERFRKAPPNYAMKKTQLLKEKAMAEDLGDQDKAKQIQDQLNELEERAEALDRQRTKNISAISYINQRNREWNIVESEKALVAESHNMKNQQMDPFTRRQCKPTIVSNSRDPAVQAAILAQLNAKYGSGVLPDAPKEMSKGQGKDKDLNSKSASDLSEDLFKVHDFDVKIDLQVPSSESKALAITSKAPPAKDGAPRRSLNLEDYKKRRGLI

SEQ ID NO: 18773 - protein, 37 aa, Artificial Sequence
  Synthetic polypeptide
SQYFGRQVDHEVRRSRPSWLTWSLRLRVLWKLPKFTN

SEQ ID NO: 18774 - protein, 3 aa, Artificial Sequence
  Synthetic polypeptide
HGR

SEQ ID NO: 18775 - protein, 119 aa, Artificial Sequence
  Synthetic polypeptide
FTPVNPALWEAEEGGALQASRDPPPSPGGAPAAAGLPAGLPGGGCVAEGEEPGGLGGGFAGHSHAASTVTEAAEFPGGAGREHAPTAGAAAGGTEAAAGGPPSLGGHPGATGGAGSTLG

SEQ ID NO: 18776 - protein, 1019 aa, Artificial Sequence
  Synthetic polypeptide
TQHFGRPRKEALFRQAGTRRHRLEELRQLQAFLQDSQEVAAWLREKNLVALEEGLLDTAMLPAQLQKQQNFQAELDASMHQQQELQREGQRLLQGGHPASEAIQERLEELGALWGELQDNSQKKVAKLQKACEALRLRRSMEELENWLEPIEVELRAPTVGQALPGVGELLGTQRELEAAVDKKARQAEALLGQAQAFVREGHCLAQDVEEQARRLLQRFKSLREPLQERRTALEARSLLLKFFRDADEEMAWVQEKLPLAAAQDYGQSLSAVRHLQEQHQNLESEMSSHEALTRVVLGTGYKLVQAGHFAAHEVAARVQQLEKAMAHLRAEAARRRLLLQQAQEAQQFLTELLEAGSWLAERGHVLDSEDMGHSAEATQALLRRLEATKRDLEAFSPRIERLQQTAALLESRKNPESPKVLAQLQAVREAHAELLRRAEARGHGLQEQLQLHQLERETLLLDAWLTTKAATAESQDYGQDLEGVKVLEEKFDAFRKEVQSLGQAKVYALRKLAGTLERGAPRRYPHIQAQRSRIEAAWERLDQAIKARTENLAAAHEVHSFQQAAAELQGRMQEKTALMKGEDGGHSLSSVRTLQQQHRRLERELEAMEKEVARLQTEACRLGQLHPAAPGGLAKVQEAWATLQAKAQERGQWLAQAAQGHAFLGRCQELLAWAQERQELASSEELAEDVAGAEQLLGQHEELGQEIRECRLQAQDLRQEGQQLVDNSHFMSAEVTECLQELEGRLQELEEAWALRWQRCAESWGLQKLRQRLEQAEAWLACWEGLLLKPDYGHSVSDVELLLHRHQDLEKLLAAQEEKFAQMQKTEMEQELLLQPQELKPGRAGSSLTSFQWRPSGHQGLGAQLAETRDPQDAKGTPTMEGSLEFKQHLLPGGRQPSSSSWDSCRGNLQGSSLSLFLDERMAAEKVASIALLDLTGARCERLRGRHGRKHTFSLRLTSGAEILFAAPSEEQAESWWRALGSTAAQSLSPKLKAKPVSSLNECTTKDARPGCLLRSDP

SEQ ID NO: 18777 - protein, 51 aa, Artificial Sequence
  Synthetic polypeptide
MGAVVHACKPSTLGGRGRRRSSGKPGPAAIAWRSSGSCRPSCRTPRRWLRG

SEQ ID NO: 18778 - protein, 1377 aa, Artificial Sequence
  Synthetic polypeptide
ILALPQRSQDTVGDACIRSISDLSLQLKNRDPEEVKIICQRRSQLNNRWASFHGNLLRYQQQLEGALEIHVLSRELDNVTKRIQEKEALIQALDCGKDLESVQRLLRKHEELEREVHPIQAQVESLEREVGRLCQRSPEAAHGLRHRQQEVAESWWQLRSRAQKRREALDALHQAQKLQAMLQELLVSAQRLRAQMDTSPAPRSPVEARRMLEEHQECKAELDSWTDSISLARSTGQQLLTAGHPFSSDIRQVLAGLEQELSSLEGAWQEHQLQLQQALELQLFLSSVEKMERWLCSKEDSLASEGLWDPLAPMEPLLWKHKMLEWDLEVQAGKISALEATARGLHQGGHPEAQSALGRCQAMLLRKEALFRQAGTRRHRLEELRQLQAFLQDSQEVAAWLREKNLVALEEGLLDTAMLPAQLQKQQNFQAELDASMHQQQELQREGQRLLQGGHPASEAIQERLEELGALWGELQDNSQKKVAKLQKACEALRLRRSMEELENWLEPIEVELRAPTVGQALPGVGELLGTQRELEAAVDKKARQAEALLGQAQAFVREGHCLAQDVEEQARRLLQRFKSLREPLQERRTALEARSLLLKFFRDADEEMAWVQEKLPLAAAQDYGQSLSAVRHLQEQHQNLESEMSSHEALTRVVLGTGYKLVQAGHFAAHEVAARVQQLEKAMAHLRAEAARRRLLLQQAQEAQQFLTELLEAGSWLAERGHVLDSEDMGHSAEATQALLRRLEATKRDLEAFSPRIERLQQTAALLESRKNPESPKVLAQLQAVREAHAELLRRAEARGHGLQEQLQLHQLERETLLLDAWLTTKAATAESQDYGQDLEGVKVLEEKFDAFRKEVQSLGQAKVYALRKLAGTLERGAPRRYPHIQAQRSRIEAAWERLDQAIKARTENLAAAHEVHSFQQAAAELQGRMQEKTALMKGEDGGHSLSSVRTLQQQHRRLERELEAMEKEVARLQTEACRLGQLHPAAPGGLAKVQEAWATLQAKAQERGQWLAQAAQGHAFLGRCQELLAWAQERQELASSEELAEDVAGAEQLLGQHEELGQEIRECRLQAQDLRQEGQQLVDNSHFMSAEVTECLQELEGRLQELEEAWALRWQRCAESWGLQKLRQRLEQAEAWLACWEGLLLKPDYGHSVSDVELLLHRHQDLEKLLAAQEEKFAQMQKTEMEQELLLQPQELKPGRAGSSLTSFQWRPSGHQGLGAQLAETRDPQDAKGTPTMEGSLEFKQHLLPGGRQPSSSSWDSCRGNLQGSSLSLFLDERMAAEKVASIALLDLTGARCERLRGRHGRKHTFSLRLTSGAEILFAAPSEEQAESWWRALGSTAAQSLSPKLKAKPVSSLNECTTKDARPGCLLRSDP

SEQ ID NO: 18779 - protein, 103 aa, Artificial Sequence
  Synthetic polypeptide
AAVGRELDSKGAGLESWLCRKGARTQWVMPASGASVTCHCSSRTGTLRKSRSSASGEASSTTGGRVSMATCSGTSSSSKGPWRYTCCPESWTMSPRGFRRRKP

SEQ ID NO: 18780 - protein, 20 aa, Artificial Sequence
  Synthetic polypeptide
TPKELGLNPGSAAKEPGHSG

SEQ ID NO: 18781 - protein, 191 aa, Artificial Sequence
  Synthetic polypeptide
AKIAPLHSSQDNSEQLENYDFTKFHSLKPKLIEAVDNMLSNKISPLMNLISQEETSTPTQLVQGGAFDGTTEGPFNQGYGEGAKEGADEEEWVVAKDKPVYDELFYTLSPINGKISGVNAKKEMVTSKLPNSVLGKIWKLADCDCDGMLDEEEFALAKHLIKIKLDGYELPSSLPPHLVPPSHRKSLPKAD

SEQ ID NO: 18782 - protein, 39 aa, Artificial Sequence
  Synthetic polypeptide
EDYLSPGGEGCSEPRSHHCTPARTTVNSLRTMTSPNSTR

SEQ ID NO: 18783 - protein, 69 aa, Artificial Sequence
  Synthetic polypeptide
DNTCACSGCVGFRGWNPSHVFSVRQPGRVAGARPSRHCDLPEWGLWVYLVHLHTLQGPSLVPGGLAGPH

SEQ ID NO: 18784 - protein, 503 aa, Artificial Sequence
  Synthetic polypeptide
GFNEIIRVPVVAVLGSGGGTRAMSSLYGSLAGLQELGLLDTVTYLSGVSGSTWCISTLYRDPAWSQVALQGPIERAQVHVCSSKMGALSTERLQYYTQELGVRERSGHSVSLIDLWGLLVEYLLYQEENPAKLSDQQEAVRQGQNPYPIYTSVNVRTNLSGEDFAEWCEFTPYEVGFPKYGAYVPTELFGSELFMGRLLQLQPEPRICYLQGMWGSAFATSLDEIFLKTAGSGLSFLEWYRGSVNITDDCQKPQLHNPSRLRTRLLTPQGPFSQAVLDIFTSRFTSAQSFNFTRGLCLHKDYVAGREFVAWKDTHPDAFPNQLTPMRDCLYLVDGGFAINSPFPLALLPQRAVDLILSFDYSLEAPFEVLKMTEKYCLDRGIPFPSIEVGPEDMEEARECYLFAKAEDPRSPIVLHFPLVNRTFRTHLAPGVERQTAEEKAFGDFVINRPDTPYGMMNFTYEPQDFYRLVALSRYNVLNNVETLKCALQLALDRHQARERAGA

SEQ ID NO: 18785 - protein, 4 aa, Artificial Sequence
  Synthetic polypeptide
YVCL

SEQ ID NO: 18786 - protein, 42 aa, Artificial Sequence
  Synthetic polypeptide
GQEFEASLGNMATPCLQKISWMWWHVLIIPAALEAEVATDLK

SEQ ID NO: 18787 - protein, 12 aa, Artificial Sequence
  Synthetic polypeptide
FQLLWRLRLQQI

SEQ ID NO: 18788 - protein, 40 aa, Artificial Sequence
  Synthetic polypeptide
GQEFEASLGNMATPCLQKISWMWWHVLIIPAALEAECQQM

SEQ ID NO: 18789 - protein, 15 aa, Artificial Sequence
  Synthetic polypeptide
FQLLWRLSASRCSIT

SEQ ID NO: 18790 - protein, 266 aa, Artificial Sequence
  Synthetic polypeptide
GQAQWLMPVIPALGEANAGESLKPRSSRPAWATRPRLGVTLHKVVVAGALYLLFSGMEGVLRVTGAQTDLASLAFIPLAFLDTALCWWIFISLTQTMKLLKLRRNIVKLSLYRHFTNTLILAVAASIVFIIWTTMKFRIVTCQSDWRELWVDDAIWRLLFSMILFVIMVLWRPSANNQRFAFSPLSEEEEEDEQKEPMLKESFEGMKMRSTKQEPNGNSKVNKAQEDDLKWVEENVPSSVTDVALPALLDSDEERMITHFERSKME

SEQ ID NO: 18791 - protein, 35 aa, Artificial Sequence
  Synthetic polypeptide
SQPLGRPMQENRLSLGVLDQPGQHGHALESLFIRL

SEQ ID NO: 18792 - protein, 14 aa, Artificial Sequence
  Synthetic polypeptide
TSLGNTATPWSHSS

SEQ ID NO: 18793 - protein, 180 aa, Artificial Sequence
  Synthetic polypeptide
GQAQWLMPVIPALGEANAGESLKPRSSRPAWATRPRLGVTLHKVVVAGALYLLFSGMEGVLRVTGYFSYPLTLIVNLALSAIDACVILWIFISLTQTMKLLKLRRNIVKLSLYRHFTNTLILAVAASIVFIIWTTMKFRIVTCQSDWRELWVDDAIWRLLFSMILFVIMVLWRPSANNQR

SEQ ID NO: 18794 - protein, 149 aa, Artificial Sequence
  Synthetic polypeptide
RQKIPVFQRGGSVIPIKTTVGKSTGWMTESSYGLRVALSTKGSSVGELYLDDGHSFQYLHQKQFLHRKFSFCSSVLINSFADQRGHYPSKCVVEKILVLGFRKEPSSVTTHSSDGKDQPVAFTYCAKTSILSLEKLSLNIATDWEVRII

SEQ ID NO: 18795 - protein, 19 aa, Artificial Sequence
  Synthetic polypeptide
TIAHMHRDRRFQCFSEVEV

SEQ ID NO: 18796 - protein, 32 aa, Artificial Sequence
  Synthetic polypeptide
HICIETEDSSVSARWKCDTNKDNCRKIHRLDD

SEQ ID NO: 18797 - protein, 724 aa, Artificial Sequence
  Synthetic polypeptide
NPISTKNTKISQEICENPRFIIDGANRTDICQGELGDCWFLAAIACLTLNQHLLFRVIPHDQSFIENYAGIFHFQFWRYGEWVDVVIDDCLPTYNNQLVFTKSNHRNEFWSALLEKAYAKLHGSYEALKGGNTTEAMEDFTGGVAEFFEIRDAPSDMYKIMKKAIERGSLMGCSIDDGTNMTYGTSPSGLNMGELIARMVRNMDNSLLQDSDLDPRGSDERPTRTIIPVQYETRMACGLVRGHAYSVTGLDEVPFKGEKVKLVRLRNPWGQVEWNGSWSDRWKDWSFVDKDEKARLQHQVTEDGEFWMSYEDFIYHFTKLEICNLTADALQSDKLQTWTVSVNEGRWVRGCSAGGCRNFPDTFWTNPQYRLKLLEEDDDPDDSEVICSFLVALMQKNRRKDRKLGASLFTIGFAIYEVPKEMHGNKQHLQKDFFLYNASKARSKTYINMREVSQRFRLPPSEYVIVPSTYEPHQEGEFILRVFSEKRNLSEEVENTISVDRPVPIIFVSDRANSNKELGVDQESEEGKGKTSPDKQKQSPQPQPGSSDQESEEQQQFRNIFKQIAGDDMEICADELKKVLNTVVNKHKDLKTHGFTLESCRSMIALMDTDGSGKLNLQEFHHLWNKIKAWQKIFKHYDTDQSGTINSYEMRNAVNDAGFHLNNQLYDIITMRYADKHMNIDFDSFICCFVRLEGMFRAFHAFDKDGDGIIKLNVLEWLQLTMYA

SEQ ID NO: 18798 - protein, 69 aa, Artificial Sequence
  Synthetic polypeptide
AGRGGSHLQSQHFGRPRRVDHLSPGVQDQLGHHGETLSLPKIQRLARKFARIPDLSLMEPTELTSVKES

SEQ ID NO: 18799 - protein, 11 aa, Artificial Sequence
  Synthetic polypeptide
PGNLRESPIYH

SEQ ID NO: 18800 - protein, 724 aa, Artificial Sequence
  Synthetic polypeptide
NPISTKNTKISQEICENPRFIIDGANRTDICQGELGDCWFLAAIACLTLNQHLLFRVIPHDQSFIENYAGIFHFQFWRYGEWVDVVIDDCLPTYNNQLVFTKSNHRNEFWSALLEKAYAKLHGSYEALKGGNTTEAMEDFTGGVAEFFEIRDAPSDMYKIMKKAIERGSLMGCSIDDGTNMTYGTSPSGLNMGELIARMVRNMDNSLLQDSDLDPRGSDERPTRTIIPVQYETRMACGLVRGHAYSVTGLDEVPFKGEKVKLVRLRNPWGQVEWNGSWSDRWKDWSFVDKDEKARLQHQVTEDGEFWMSYEDFIYHFTKLEICNLTADALQSDKLQTWTVSVNEGRWVRGCSAGGCRNFPDTFWTNPQYRLKLLEEDDDPDDSEVICSFLVALMQKNRRKDRKLGASLFTIGFAIYEVPHQMHGNKQHLQKDFFLYNASKARSKTYINMREVSQRFRLPPSEYVIVPSTYEPHQEGEFILRVFSEKRNLSEEVENTISVDRPVPIIFVSDRANSNKELGVDQESEEGKGKTSPDKQKQSPQPQPGSSDQESEEQQQFRNIFKQIAGDDMEICADELKKVLNTVVNKHKDLKTHGFTLESCRSMIALMDTDGSGKLNLQEFHHLWNKIKAWQKIFKHYDTDQSGTINSYEMRNAVNDAGFHLNNQLYDIITMRYADKHMNIDFDSFICCFVRLEGMFRAFHAFDKDGDGIIKLNVLEWLQLTMYA

SEQ ID NO: 18801 - protein, 638 aa, Artificial Sequence
  Synthetic polypeptide
NPISTKNTKISQEICENPRFIIDGANRTDICQGELGDCWFLAAIACLTLNQHLLFRVIPHDQSFIENYAGIFHFQFWRYGEWVDVVIDDCLPTYNNQLVFTKSNHRNEFWSALLEKAYAKLHGSYEALKGGNTTEAMEDFTGGVAEFFEIRDAPSDMYKIMKKAIERGSLMGCSIDTIIPVQYETRMACGLVRGHAYSVTGLDEVPFKGEKVKLVRLRNPWGQVEWNGSWSDRWKDWSFVDKDEKARLQHQVTEDGEFWMSYEDFIYHFTKLEICNLTADALQSDKLQTWTVSVNEGRWVRGCSAGGCRNFPDTFWTNPQYRLKLLEEDDDPDDSEVICSFLVALMQKNRRKDRKLGASLFTIGFAIYEVPKEMHGNKQHLQKDFFLYNASKARSKTYINMREVSQRFRLPPSEYVIVPSTYEPHQEGEFILRVFSEKRNLSEEVENTISVDRPVPQPGSSDQESEEQQQFRNIFKQIAGDDMEICADELKKVLNTVVNKHKDLKTHGFTLESCRSMIALMDTDGSGKLNLQEFHHLWNKIKAWQKIFKHYDTDQSGTINSYEMRNAVNDAGFHLNNQLYDIITMRYADKHMNIDFDSFICCFVRLEGMFRAFHAFDKDGDGIIKLNVLEWLQLTMYA

SEQ ID NO: 18802 - protein, 730 aa, Artificial Sequence
  Synthetic polypeptide
NPISTKNTKISQEICENPRFIIDGANRTDICQGELGDCWFLAAIACLTLNQHLLFRVIPHDQSFIENYAGIFHFQFWRYGEWVDVVIDDCLPTYNNQLVFTKSNHRNEFWSALLEKAYAKLHGSYEALKGGNTTEAMEDFTGGVAEFFEIRDAPSDMYKIMKKAIERGSLMGCSIDDGTNMTYGTSPSGLNMGELIARMVRNMDNSLLQDSDLDPRGSDERPTRTIIPVQYETRMACGLVRGHAYSVTGLDEVPFKGEKVKLVRLRNPWGQVEWNGSWSDRWKDWSFVDKDEKARLQHQVTEDGEFWMSYEDFIYHFTKLEICNLTADALQSDKLQTWTVSVNEGRWVRGCSAGGCRNFPDTFWTNPQYRLKLLEEDDDPDDSEVICSFLVALMQKNRRKDRKLGASLFTIGFAIYEVPKEMHGNKQHLQKDFFLYNASKARSKTYINMREVSQRFRLPPSEYVIVPSTYEPHQEGEFILRVFSEKRNLSEEVENTISVDRPVKKKKTKPIIFVSDRANSNKELGVDQESEEGKGKTSPDKQKQSPQPQPGSSDQESEEQQQFRNIFKQIAGDDMEICADELKKVLNTVVNKHKDLKTHGFTLESCRSMIALMDTDGSGKLNLQEFHHLWNKIKAWQKIFKHYDTDQSGTINSYEMRNAVNDAGFHLNNQLYDIITMRYADKHMNIDFDSFICCFVRLEGMFRAFHAFDKDGDGIIKLNVLEWLQLTMYA

SEQ ID NO: 18803 - protein, 22 aa, Artificial Sequence
  Synthetic polypeptide
GCCEPRLRHWTPAWVTEERPCL

SEQ ID NO: 18804 - protein, 1173 aa, Artificial Sequence
  Synthetic polypeptide
QRKDHVCRFIGCGRNDRFNYVVMQLQGRNLADLRRSQSRGTFTISTTLRLGRQILESIESIHSVGFLHRDIKPSNFAMGRFPSTCRKCYMLDFGLARQFTNSCGDVRPPRAVAGFRGTVRYASINAHRNREMGRHDDLWSLFYMLVEFVVGQLPWRKIKDKEQVGSIKERYDHRLMLKHLPPEFSIFLDHISSLDYFTKPDYQLLTSVFDNSIKTFGVIESDPFDWEKTGNDGSLTTTTTSTTPQLHTRLTPAAIGIANATPIPGDLLRENTDEVFPDEQLSDGENGIPVGVSPDKLPGSLGHPRPQEKDVWEEMDANKNKIKLGICKAATEEENSHGQANGLLNAPSLGSPIRVRSEITQPDRDIPLVRKLRSIHSFELEKRLTLEPKPDTDKFLETCLEKMQKDTSAGKESILPALLHKPCVPAVSRTDHIWHYDEEYLPDASKPASANTPEQADGGGSNGFIAVNLSSCKQEIDSKEWVIVDKEQDLQDFRTNEAVGHKTTGSPSDEEPEVLQVLEASPQDEKLQLGPWAENDHLKKETSGVVLALSAEGPPTAASEQYTDRLELQPGAASQFIAATPTSLMEAQAEGPLTAITIPRPSVASTQSTSGSFHCGQQPEKKDLQPMEPTVELYSPRENFSGLVVTEGEPPSGGSRTDLGLQIDHIGHDMLPNIRESNKSQDLGPKELPDHNRLVVREFENLPGETEEKSILLESDNEDEKLSRGQHCIEISSLPGDLVIVEKDHSATTEPLDVTKTQTFSVVPNQDKNNEIMKLLTVGTSEISSRDIDPHVEGQIGQVAEMQKNKISKDDDIMSEDLPGHQGDLSTFLHQEGKREKITPRNGELFHCVSENEHGAPTRKDMVRSSFVTRHSRIPVLAQEIDSTLESSSPVSAKEKLLQKKAYQPDLVKLLVEKRQFKSFLGDLSSASDKLLEEKLATVPAPFCEEEVLTPFSRLTVDSHLSRSAEDSFLSPIISQSRKSKIPRPVSWVNTDQVNSSTSSQFFPRPPPGKPPTRPGVEARLRRYKVLGSSNSDSDLFSRLAQILQNGSQKPRSTTQCKSPGSPHNPKTPPKSPVVPRRSPSASPRSSSLPRTSSSSPSRAGRPHHDQRSSSPHLGRSKSPPSHSGSSSSRRSCQQEHCKPSKNGLKGSGSLHHHSASTKTPQGKSKPASKLSR

SEQ ID NO: 18805 - protein, 169 aa, Artificial Sequence
  Synthetic polypeptide
AEIAPLDSSLGNRGKTMFVDLLAVGGMIDSTMWSCSCRVGIWQIFAVASPEAHSPLVPLSGWVDRFWSLLKAFILWDSCIETSNRRTSLWVAFLVHVGNVTCLILAWLDNLPIPVVTSDHLELWQVFEGQFVMHQSTHIGTGKWEDMMTFGPYSTCWWSLWLVSCPGEK

SEQ ID NO: 18806 - protein, 407 aa, Artificial Sequence
  Synthetic polypeptide
QRKDHVCRFIGCGRNDRFNYVVMQLQGRNLADLRRSQSRGTFTISTTLRLGRQILESIESIHSVGFLHRDIKPSNFAMGRFPSTCRKCYMLDFGLARQFTNSCGDVRPPRAVAGFRGTVRYASINAHRNREMGRHDDLWSLFYMLVEFVVGQLPWRKIKDKEQVGSIKERYDHRLMLKHLPPEFSIFLDHISSLDYFTKPDYQLLTSVFDNSIKTFGVIESDPFDWEKTGNDGSLTTTTTSTTPQLHTRLTPAAIGIANATPIPGDLLRENTDEVFPDEQLSDGENGIPVGVSPDKLPGSLGHPRPQEKDVWEEMDANKNKIKLGICKAATEEENSHGQANGLLNAPSLGSPIRVRSEITQPDRDIPLVRKLRSIHSFELEKRLTLEPKPDTDKFLETWYKIVYFSF

SEQ ID NO: 18807 - protein, 372 aa, Artificial Sequence
  Synthetic polypeptide
QRKDHVCRFIGCGRNDRFNYVVMQLQGRNLADLRRSQSRGTFTISTTLRLGRQILESIESIHSVGFLHRDIKPPRAVAGFRGTVRYASINAHRNREMGRHDDLWSLFYMLVEFVVGQLPWRKIKDKEQVGSIKERYDHRLMLKHLPPEFSIFLDHISSLDYFTKPDYQLLTSVFDNSIKTFGVIESDPFDWEKTGNDGSLTTTTTSTTPQLHTRLTPAAIGIANATPIPGDLLRENTDEVFPDEQLSDGENGIPVGVSPDKLPGSLGHPRPQEKDVWEEMDANKNKIKLGICKAATEEENSHGQANGLLNAPSLGSPIRVRSEITQPDRDIPLVRKLRSIHSFELEKRLTLEPKPDTDKFLETWYKIVYFSF

SEQ ID NO: 18808 - protein, 134 aa, Artificial Sequence
  Synthetic polypeptide
AEIAPLDSSLGNRGKTMFVDLLAVGGMIDSTMWSCSCRVGIWQIFAVASPEAHSPLVPLSGWVDRFWSLLKAFILWDSCIETSNRLELWQVFEGQFVMHQSTHIGTGKWEDMMTFGPYSTCWWSLWLVSCPGEK

SEQ ID NO: 18809 - protein, 72 aa, Artificial Sequence
  Synthetic polypeptide
QRKDHVCRFIGCGRNDRFNYVVMQLQGRNLADLRRSQSRGTFTISTTLRLGRQILESIESIHSVGFLHRDIK

SEQ ID NO: 18810 - protein, 83 aa, Artificial Sequence
  Synthetic polypeptide
AEIAPLDSSLGNRGKTMFVDLLAVGGMIDSTMWSCSCRVGIWQIFAVASPEAHSPLVPLSGWVDRFWSLLKAFILWDSCIETS

SEQ ID NO: 18811 - protein, 62 aa, Artificial Sequence
  Synthetic polypeptide
QRKDHVCRFIGCGRNDRFNYVVMQLQGRNLADLRRSQSRGTFTISTTLRLGRQILESIESIH

SEQ ID NO: 18812 - protein, 74 aa, Artificial Sequence
  Synthetic polypeptide
AEIAPLDSSLGNRGKTMFVDLLAVGGMIDSTMWSCSCRVGIWQIFAVASPEAHSPLVPLSGWVDRFWSLLKAFI

SEQ ID NO: 18813 - protein, 170 aa, Artificial Sequence
  Synthetic polypeptide
GCCEPRLRHWTPAWGKTMFVDLLAVGGMIDSTMWSCSCRVGIWQIFAVASPEAHSPLVPLSGWVDRFWSLLKAFILWDSCIETSNRRTSLWVAFLVHVGNVTCLILAWLDNLPIPVVTSDHLELWQVFEGQFVMHQSTHIGTGKWEDMMTFGPYSTCWWSLWLVSCPGEK

SEQ ID NO: 18814 - protein, 34 aa, Artificial Sequence
  Synthetic polypeptide
QEAEAGESLEPERPEVAVSRDCAIGLQPGERPCL

SEQ ID NO: 18815 - protein, 1182 aa, Artificial Sequence
  Synthetic polypeptide
AEIAPLDSSLGKDHVCRFIGCGRNDRFNYVVMQLQGRNLADLRRSQSRGTFTISTTLRLGRQILESIESIHSVGFLHRDIKPSNFAMGRFPSTCRKCYMLDFGLARQFTNSCGDVRPPRAVAGFRGTVRYASINAHRNREMGRHDDLWSLFYMLVEFVVGQLPWRKIKDKEQVGSIKERYDHRLMLKHLPPEFSIFLDHISSLDYFTKPDYQLLTSVFDNSIKTFGVIESDPFDWEKTGNDGSLTTTTTSTTPQLHTRLTPAAIGIANATPIPGDLLRENTDEVFPDEQLSDGENGIPVGVSPDKLPGSLGHPRPQEKDVWEEMDANKNKIKLGICKAATEEENSHGQANGLLNAPSLGSPIRVRSEITQPDRDIPLVRKLRSIHSFELEKRLTLEPKPDTDKFLETCLEKMQKDTSAGKESILPALLHKPCVPAVSRTDHIWHYDEEYLPDASKPASANTPEQADGGGSNGFIAVNLSSCKQEIDSKEWVIVDKEQDLQDFRTNEAVGHKTTGSPSDEEPEVLQVLEASPQDEKLQLGPWAENDHLKKETSGVVLALSAEGPPTAASEQYTDRLELQPGAASQFIAATPTSLMEAQAEGPLTAITIPRPSVASTQSTSGSFHCGQQPEKKDLQPMEPTVELYSPRENFSGLVVTEGEPPSGGSRTDLGLQIDHIGHDMLPNIRESNKSQDLGPKELPDHNRLVVREFENLPGETEEKSILLESDNEDEKLSRGQHCIEISSLPGDLVIVEKDHSATTEPLDVTKTQTFSVVPNQDKNNEIMKLLTVGTSEISSRDIDPHVEGQIGQVAEMQKNKISKDDDIMSEDLPGHQGDLSTFLHQEGKREKITPRNGELFHCVSENEHGAPTRKDMVRSSFVTRHSRIPVLAQEIDSTLESSSPVSAKEKLLQKKAYQPDLVKLLVEKRQFKSFLGDLSSASDKLLEEKLATVPAPFCEEEVLTPFSRLTVDSHLSRSAEDSFLSPIISQSRKSKIPRPVSWVNTDQVNSSTSSQFFPRPPPGKPPTRPGVEARLRRYKVLGSSNSDSDLFSRLAQILQNGSQKPRSTTQCKSPGSPHNPKTPPKSPVVPRRSPSASPRSSSLPRTSSSSPSRAGRPHHDQRSSSPHLGRSKSPPSHSGSSSSRRSCQQEHCKPSKNGLKGSGSLHHHSASTKTPQGKSKPASKLSR

SEQ ID NO: 18816 - protein, 416 aa, Artificial Sequence
  Synthetic polypeptide
AEIAPLDSSLGKDHVCRFIGCGRNDRFNYVVMQLQGRNLADLRRSQSRGTFTISTTLRLGRQILESIESIHSVGFLHRDIKPSNFAMGRFPSTCRKCYMLDFGLARQFTNSCGDVRPPRAVAGFRGTVRYASINAHRNREMGRHDDLWSLFYMLVEFVVGQLPWRKIKDKEQVGSIKERYDHRLMLKHLPPEFSIFLDHISSLDYFTKPDYQLLTSVFDNSIKTFGVIESDPFDWEKTGNDGSLTTTTTSTTPQLHTRLTPAAIGIANATPIPGDLLRENTDEVFPDEQLSDGENGIPVGVSPDKLPGSLGHPRPQEKDVWEEMDANKNKIKLGICKAATEEENSHGQANGLLNAPSLGSPIRVRSEITQPDRDIPLVRKLRSIHSFELEKRLTLEPKPDTDKFLETWYKIVYFSF

SEQ ID NO: 18817 - protein, 135 aa, Artificial Sequence
  Synthetic polypeptide
GCCEPRLRHWTPAWGKTMFVDLLAVGGMIDSTMWSCSCRVGIWQIFAVASPEAHSPLVPLSGWVDRFWSLLKAFILWDSCIETSNRLELWQVFEGQFVMHQSTHIGTGKWEDMMTFGPYSTCWWSLWLVSCPGEK

SEQ ID NO: 18818 - protein, 381 aa, Artificial Sequence
  Synthetic polypeptide
AEIAPLDSSLGKDHVCRFIGCGRNDRFNYVVMQLQGRNLADLRRSQSRGTFTISTTLRLGRQILESIESIHSVGFLHRDIKPPRAVAGFRGTVRYASINAHRNREMGRHDDLWSLFYMLVEFVVGQLPWRKIKDKEQVGSIKERYDHRLMLKHLPPEFSIFLDHISSLDYFTKPDYQLLTSVFDNSIKTFGVIESDPFDWEKTGNDGSLTTTTTSTTPQLHTRLTPAAIGIANATPIPGDLLRENTDEVFPDEQLSDGENGIPVGVSPDKLPGSLGHPRPQEKDVWEEMDANKNKIKLGICKAATEEENSHGQANGLLNAPSLGSPIRVRSEITQPDRDIPLVRKLRSIHSFELEKRLTLEPKPDTDKFLETWYKIVYFSF

SEQ ID NO: 18819 - protein, 84 aa, Artificial Sequence
  Synthetic polypeptide
GCCEPRLRHWTPAWGKTMFVDLLAVGGMIDSTMWSCSCRVGIWQIFAVASPEAHSPLVPLSGWVDRFWSLLKAFILWDSCIETS

SEQ ID NO: 18820 - protein, 81 aa, Artificial Sequence
  Synthetic polypeptide
AEIAPLDSSLGKDHVCRFIGCGRNDRFNYVVMQLQGRNLADLRRSQSRGTFTISTTLRLGRQILESIESIHSVGFLHRDIK

SEQ ID NO: 18821 - protein, 75 aa, Artificial Sequence
  Synthetic polypeptide
GCCEPRLRHWTPAWGKTMFVDLLAVGGMIDSTMWSCSCRVGIWQIFAVASPEAHSPLVPLSGWVDRFWSLLKAFI

SEQ ID NO: 18822 - protein, 71 aa, Artificial Sequence
  Synthetic polypeptide
AEIAPLDSSLGKDHVCRFIGCGRNDRFNYVVMQLQGRNLADLRRSQSRGTFTISTTLRLGRQILESIESIH

SEQ ID NO: 18823 - protein, 33 aa, Artificial Sequence
  Synthetic polypeptide
GVQDFSGGRTVNVEIARELELEVEPEEEIFCCT

SEQ ID NO: 18824 - protein, 106 aa, Artificial Sequence
  Synthetic polypeptide
KWSLKRKYSAVRRDGSFHYVHSTPFGNYSFICVDATVNPGPKRPYNFFGILDKKKMEELLLLAKESSRSNHTIWFGHFTTSTILSPSPGIRSIMSSAIAYLCGHLH

SEQ ID NO: 18825 - protein, 28 aa, Artificial Sequence
  Synthetic polypeptide
RGNILLYVEMALSIMSTVLPLATIRSSV

SEQ ID NO: 18826 - protein, 33 aa, Artificial Sequence
  Synthetic polypeptide
KWSLKRKYSAVRRDGSFHYVHSTPFGNYSFICV

SEQ ID NO: 18827 - protein, 15 aa, Artificial Sequence
  Synthetic polypeptide
KWSLKRKYSAVRRDG

SEQ ID NO: 18828 - protein, 11 aa, Artificial Sequence
  Synthetic polypeptide
RGNILLYVEMA

SEQ ID NO: 18829 - protein, 490 aa, Artificial Sequence
  Synthetic polypeptide
KWSLKRKYSAVRRDGSFHYVHSTPFGNYSFICVDATVNPGPKRPYNFFGILDKKKMEELLLLAKESSRSNHTIWFGHFTTSTILSPSPGIRSIMSSAIAYLCGHLHTLGGLMPVLHTRHFQGTLELEVGDWKDNRRYRIFAFDHDLFSFADLIFGKWPVVLITNPKSLLYSCGEHEPLERLLHSTHIRVLAFSLSSITSVTVKIDGVHLGQAVHVSGPIFVLKWNPRNYSSGTHNIEVIVQDSAGRSKSVHHIFSVQENNHLSFDPLASFILRTDHYIMARVLFVLIVLSQLTILIIFRYRGYPELKEPSGFINLTSFSLHVLSKINIFYYSVLLLTLYTVLGPWFFGEIIDGKFGCCFSFGIFVNGHFLQGSITFIIGILQLAFFNIPLMAYMCWSLLQRCFGHNFRSHLHQRKYLKIMPVHLLMLLLYIWQVYSCYFLYATYGTLAFLFSPLRTWLTLLTPVLIRYVWTLNSTKFGIFMVQLKSHLSS

SEQ ID NO: 18830 - protein, 455 aa, Artificial Sequence
  Synthetic polypeptide
KWSLKRKYSAVRRDGSFHYVHSTPFGNYSFICVDATVNPGPKRPYNFFGILDKKKMEELLLLAKESSRSNHTIWFGHFTTSTILSPSPGIRSIMSSAIAYLCGHLHTLGGLMPVLHTRHFQGTLELEVGDWKDNRRYRIFAFDHDLFSFADLIFGKWPVVLITNPKSLLYSCGEHEPLERLLHSTHIRVLAFSLSSITSVTVKIDGVHLGQAVHVSGPIFVLKWNPRNYSSGTHNIEVIVQDSAGRSKSVHHIFSVQENNHLSFDPLASFILRTDHYIMARVLFVLIVLSQLTILIIFRYRGYPELKGPWFFGEIIDGKFGCCFSFGIFVNGHFLQGSITFIIGILQLAFFNIPLMAYMCWSLLQRCFGHNFRSHLHQRKYLKIMPVHLLMLLLYIWQVYSCYFLYATYGTLAFLFSPLRTWLTLLTPVLIRYVWTLNSTKFGIFMVQLKSHLSS

SEQ ID NO: 18831 - protein, 43 aa, Artificial Sequence
  Synthetic polypeptide
HRRRVISAFPSEVHGFLVKSLMANLVAAFPLGYLLMDISYKAA

SEQ ID NO: 18832 - protein, 12 aa, Artificial Sequence
  Synthetic polypeptide
FLHFHLRSMVFW

SEQ ID NO: 18833 - protein, 274 aa, Artificial Sequence
  Synthetic polypeptide
ANGSLQERQVFLKALQKLKARSFHGSQRGAELQPSRPTSLSQDSPRSLHTPSLRPSDVVQVSLKFKLLDPPNMGQDICFVLLALNMSSQFKDLKVNLSAQSLLHDGSPLSPFWQDTAFITLSPKEAKTYPCKISYSQYSQYLSTDKLIRISALGEEKSSPEKILVNKIITLSYPSITINVLGAAVVNQPLSIQVIFSNPLSEQVEDCVLTVEGSGLFKKQQKVFLGVLKPQHQASIILETVPFKSGQRQIQANMRSNKFKDIKGYRNVYVDFAL

SEQ ID NO: 18834 - protein, 11 aa, Artificial Sequence
  Synthetic polypeptide
LMDPSRRGRCF

SEQ ID NO: 18835 - protein, 282 aa, Artificial Sequence
  Synthetic polypeptide
EAYNLDCYEFTKVTKDVIKEFADDGVKYLELRSTPRRENATGMTKKTYVESILEGIKQSKQENLDIDVRYLIAVDRRGGPLVAKETVKLAEEFFLSTEGTVLGLDLSGDPTVGQAKDFLEPLLEAKKAGLKLALHLSEIPNQKKETQILLDLLPDRIGHGTFLNSGEGGSLDLVDFVRQHRIPLELCLTSNVKSQTVPSYDQHHFGFWYSIAHPSVICTDDKGVFATHLSQEYQLAAETFNLTQSQVWDLSYESINYIFASDSTRSELRKKWNHLKPRVLHI

SEQ ID NO: 18836 - protein, 17 aa, Artificial Sequence
  Synthetic polypeptide
RPTTWIAMNSPRSQKMS

SEQ ID NO: 18837 - protein, 14 aa, Artificial Sequence
  Synthetic polypeptide
IHQGHKRCHKRICR

SEQ ID NO: 18838 - protein, 255 aa, Artificial Sequence
  Synthetic polypeptide
EAYNLDCYEFTKVTKDVIKEFADDGVKYLELRSTPRRENATGMTKKTYVESILEGIKQSKQENLDIDVRYLIAVDRRGGPLVAKETVKLAEEFFLSTEGTVLGLDLSGDPTIPNQKKETQILLDLLPDRIGHGTFLNSGEGGSLDLVDFVRQHRIPLELCLTSNVKSQTVPSYDQHHFGFWYSIAHPSVICTDDKGVFATHLSQEYQLAAETFNLTQSQVWDLSYESINYIFASDSTRSELRKKWNHLKPRVLHI

SEQ ID NO: 18839 - protein, 194 aa, Artificial Sequence
  Synthetic polypeptide
EAYNLDCYEFTKVTKDVIKEFADDGVKYLELRSTPRRENATGMTKKTYVESILEGIKQSKQENLDIDVRYLIAVDRRGGPLVAKETVKLAEEFFLSTEGTVLGLDLSGDPTVGQAKDFLEPLLEAKKAGLKLALHLSEIPNQKKETQILLDLLPDRIGHGTFLNSGEGGSLDLVDFVRQHRIPLGKAWSFRSSR

SEQ ID NO: 18840 - protein, 18 aa, Artificial Sequence
  Synthetic polypeptide
EAYNLDCYEFTKVTKDVI

SEQ ID NO: 18841 - protein, 9 aa, Artificial Sequence
  Synthetic polypeptide
IHQGHKRCH

SEQ ID NO: 18842 - protein, 340 aa, Artificial Sequence
  Synthetic polypeptide
SHRASCAACRTHLWKLMVEESDLLGQLKIIKDFYLLGRGELFQAFIDTAQHMLKTPPTAVTEHDVNVAFQQSAHKVLLDDDNLLPLLHLTIEYHGKEHKADATQAREGPSRETSPREAPASGWAALGLSYKVQWPLHILFTPAVLEKYNVVFKYLLSVRRVQAELQHCWALQMQRKHLKSNQTDAIKWRLRNHMAFLVDNLQYYLQVDVLESQFSQLLHQINSTRDFESIRLAHDHFLSNLLAQSFILLKPVFHCLNEILDLCHSFCSLVSQNLGPLDERGAAQLSILVKGFSRQSSLLFKILSSVRNHQINSDLAQLLLRLDYNKYYTQAGGTLGSFGM

SEQ ID NO: 18843 - protein, 23 aa, Artificial Sequence
  Synthetic polypeptide
GLPRSQAEATVLPVQPAELISGS

SEQ ID NO: 18844 - protein, 50 aa, Artificial Sequence
  Synthetic polypeptide
DAFAFCHDCKFPEASLEAKLKPPCFLCSLQNSSLEVDGRRIRFTGSAEDH

SEQ ID NO: 18845 - protein, 339 aa, Artificial Sequence
  Synthetic polypeptide
SHRASCAACRTHLWKLMVEESDLLGQLKIIKDFYLLGRGELFQAFIDTAQHMLKTPPTAVTEHDVNVAFQQSAHKVLLDDDNLLPLLHLTIEYHGKEHKDATQAREGPSRETSPREAPASGWAALGLSYKVQWPLHILFTPAVLEKYNVVFKYLLSVRRVQAELQHCWALQMQRKHLKSNQTDAIKWRLRNHMAFLVDNLQYYLQVDVLESQFSQLLHQINSTRDFESIRLAHDHFLSNLLAQSFILLKPVFHCLNEILDLCHSFCSLVSQNLGPLDERGAAQLSILVKGFSRQSSLLFKILSSVRNHQINSDLAQLLLRLDYNKYYTQAGGTLGSFGM

SEQ ID NO: 18846 - protein, 151 aa, Artificial Sequence
  Synthetic polypeptide
SHRASCAACRTHLWKLMVEESDLLGQLKIIKDFYLLGRGELFQAFIDTAQHMLKTPPTAVTEHDVNVAFQQSAHKVLLDDDNLLPLLHLTIEYHGKEHKADATQAREGPSRETSPREAPASGWAALGLSYKVQWPLHILFTPAVLEKNRQF

SEQ ID NO: 18847 - protein, 5 aa, Artificial Sequence
  Synthetic polypeptide
VKSPL

SEQ ID NO: 18848 - protein, 307 aa, Artificial Sequence
  Synthetic polypeptide
SKALFDSMHSSQASDNPFSPPRTLHSPPLQLQQRSEKPPWYSSGPSSTVSSAGPSSPTTVDGNSQFGFSDQPSLNSHVAEEHQGLGLLQETPGSGAQELSIEGEQELFEPNQSPQVPPMETSQPYEEVSQPCQEVPDISQPCQDISEALSQPCQKVPDISQQCQENHDNGNHTCQEVPHISQPCQKSSQLCQKVSEEVCQLCLENSEEVSQPCQGVSVEVGKLVHKFHVGVGSLVQETLVEVGSPAEEIPEEVIQPYQEFSVEVGRLAQETSAINLLSQGIPEIDKPSQEFPEEIDLQAQEVPEEIN

SEQ ID NO: 18849 - protein, 59 aa, Artificial Sequence
  Synthetic polypeptide
QKPSLIPCTAARPQITHFLHHVLFIHLPCNSSSALRSPLGTAVALLALCPVLVLLPLLQ

SEQ ID NO: 18850 - protein, 347 aa, Artificial Sequence
  Synthetic polypeptide
SKALFDSMHSSQASDNPFSPPRTLHSPPLQLQQRSEKPPWLETRFCHVGQAGLELLTSSDLPASASQSAGITGVSHRTQPDSSGPSSTVSSAGPSSPTTVDGNSQFGFSDQPSLNSHVAEEHQGLGLLQETPGSGAQELSIEGEQELFEPNQSPQVPPMETSQPYEEVSQPCQEVPDISQPCQDISEALSQPCQKVPDISQQCQENHDNGNHTCQEVPHISQPCQKSSQLCQKVSEEVCQLCLENSEEVSQPCQGVSVEVGKLVHKFHVGVGSLVQETLVEVGSPAEEIPEEVIQPYQEFSVEVGRLAQETSAINLLSQGIPEIDKPSQEFPEEIDLQAQEVPEEIN

SEQ ID NO: 18851 - protein, 40 aa, Artificial Sequence
  Synthetic polypeptide
QKPSLIPCTAARPQITHFLHHVLFIHLPCNSSSALRSPLG

SEQ ID NO: 18852 - protein, 36 aa, Artificial Sequence
  Synthetic polypeptide
GRARWLTPVIPALWEAEAGRSQGQEIRIILANMCRH

SEQ ID NO: 18853 - protein, 34 aa, Artificial Sequence
  Synthetic polypeptide
SQHFGRPRRADHKVRRLGSSWPTCAGTDELGRQV

SEQ ID NO: 18854 - protein, 16 aa, Artificial Sequence
  Synthetic polypeptide
DHPGQHVQALMNLEDK

SEQ ID NO: 18855 - protein, 25 aa, Artificial Sequence
  Synthetic polypeptide
DEIILDYPEELVNKGKVWTYQKCLK

SEQ ID NO: 18856 - protein, 5 aa, Artificial Sequence
  Synthetic polypeptide
IIQRS

SEQ ID NO: 18857 - protein, 142 aa, Artificial Sequence
  Synthetic polypeptide
DHPRLSRGASQQRESLDLSEVSEVESNYGATEEDLITSASKTEETLSKKREYQSSSCVSSTSSSYSSSSESRFSESIGRLDWETLVHENLPGLMEMDQDDRVWPRDSLFRYFELLEKLQYNLEERKKLQEFAVQALMNLEDK

SEQ ID NO: 18858 - protein, 27 aa, Artificial Sequence
  Synthetic polypeptide
DEIILDYPVQEELVNKGKVWTYQKCLK

SEQ ID NO: 18859 - protein, 7 aa, Artificial Sequence
  Synthetic polypeptide
IIQFKRS

SEQ ID NO: 18860 - protein, 144 aa, Artificial Sequence
  Synthetic polypeptide
DHPRLSSSRGASQQRESLDLSEVSEVESNYGATEEDLITSASKTEETLSKKREYQSSSCVSSTSSSYSSSSESRFSESIGRLDWETLVHENLPGLMEMDQDDRVWPRDSLFRYFELLEKLQYNLEERKKLQEFAVQALMNLEDK

SEQ ID NO: 18861 - protein, 50 aa, Artificial Sequence
  Synthetic polypeptide
TWEAEFAVSRDGSWATEIAGIHKYQTMAIEADLGGGSLVYLAYFHPGDPS

SEQ ID NO: 18862 - protein, 407 aa, Artificial Sequence
  Synthetic polypeptide
AEMAAGRQKLLESTNTKLWPLKLTLEVAAWFILLIFILEILLKWLSNFSVFWKSAWNVFDFVVTMLSLLPEVVVLVGVTGQSVWLQLLRICRVLRSLKLLAQFRQIQIIILVLVRALKSMTFLLMLLLIFFYIFAVTGVYVFSEYTRSPRQDLEYHVFFSDLPNSLVTVFILFTLDHWYALLQDVWKVPEVSRIFSSIYFILWLLLGSIIFRSIIVAMMVTNFQNIRKELNEEMARREVQLKADMFKRQIIQRRKNMSHEALTSSHSKIEDRGASQQRESLDLSEVSEVESNYGATEEDLITSASKTEETLSKKREYQSSSCVSSTSSSYSSSSESRFSESIGRLDWETLVHENLPGLMEMDQDDRVWPRDSLFRYFELLEKLQYNLEERKKLQEFAVQALMNLEDK

SEQ ID NO: 18863 - protein, 61 aa, Artificial Sequence
  Synthetic polypeptide
NPVSTENTRISGYGDAHLWSQFLRRLRQENRLNLGGGVCSEPRWQLGDRNCWNPQIPNYGH

SEQ ID NO: 18864 - protein, 293 aa, Artificial Sequence
  Synthetic polypeptide
AEMAAGRQKLLESTNTKLWPLKLTLEVAAWFILLIFILEILLKWLSNFSVFWKSAWNVFDFVVTMLSLLPEVVVLVGVTGQSVWLQLLRICRVLRSLKLLAQFRQIQIIILVLVRALKSMTFLLMLLLIFFYIFAVTGVYVFSEYTRSPRQDLEYHVFFSDLPNSLVTVFILFTLDHWYALLQDVWKVPEVSRIFSSIYFILWLLLGSIIFRSIIVAMMVTNFQNIRKELNEEMARREVQLKADMFKRQIIQRRKNMSHEALTSSHSKIEDRSFGLGDSCARKSARANGNGSG

SEQ ID NO: 18865 - protein, 409 aa, Artificial Sequence
  Synthetic polypeptide
AEMAAGRQKLLESTNTKLWPLKLTLEVAAWFILLIFILEILLKWLSNFSVFWKSAWNVFDFVVTMLSLLPEVVVLVGVTGQSVWLQLLRICRVLRSLKLLAQFRQIQIIILVLVRALKSMTFLLMLLLIFFYIFAVTGVYVFSEYTRSPRQDLEYHVFFSDLPNSLVTVFILFTLDHWYALLQDVWKVPEVSRIFSSIYFILWLLLGSIIFRSIIVAMMVTNFQNIRKELNEEMARREVQLKADMFKRQIIQRRKNMSHEALTSSHSKIEDSSRGASQQRESLDLSEVSEVESNYGATEEDLITSASKTEETLSKKREYQSSSCVSSTSSSYSSSSESRFSESIGRLDWETLVHENLPGLMEMDQDDRVWPRDSLFRYFELLEKLQYNLEERKKLQEFAVQALMNLEDK

SEQ ID NO: 18866 - protein, 25 aa, Artificial Sequence
  Synthetic polypeptide
DEIILDYPEELVNKGKVWTYQKCLK

SEQ ID NO: 18867 - protein, 5 aa, Artificial Sequence
  Synthetic polypeptide
IIQRS

SEQ ID NO: 18868 - protein, 142 aa, Artificial Sequence; identical to SEQ ID NO: 18857
  Synthetic polypeptide

SEQ ID NO: 18869 - protein, 96 aa, Artificial Sequence
  Synthetic polypeptide
SSLQLDDEDEEVYKRDFSAPTLEDHFNKTILPKVMQVKNFGRSGRTKYTHLVDQDTTSFDSAWGQESAQNTKFFKQKAAGVRDVFERPSAKKRKTT

SEQ ID NO: 18870 - protein, 34 aa, Artificial Sequence
  Synthetic polypeptide
SQPFGRLRQADHLRSGVRDQPGQYGILIFMMQGD

SEQ ID NO: 18871 - protein, 16 aa, Artificial Sequence
  Synthetic polypeptide
GQEFETSLANMGYSYL

SEQ ID NO: 18872 - protein, 189 aa, Artificial Sequence
  Synthetic polypeptide
WAWWLMPVIPALWEAEAGRSLEVRSSRPAWPIWDTHIYDARRLNSRRSQPLISLTEHTKSIASAYFSPLTGNRVVTTCADCNLRIFDSSCISSKIPLLTTIRHNTFTGRWLTRFQAMWDPKQEDCVIVGSMAHPRRVEIFHETGKRVHSFGGEYLVSVCSINAMHPTRYILAGGNSSGKIHVFMNEKSC

SEQ ID NO: 18873 - protein, 546 aa, Artificial Sequence
  Synthetic polypeptide
TLKHTNSLVKRDAKGQYLFDLLCHHLNLLEKDYFGIRFVDPDKQRHWLEFTKSVVKQLRSQPPFTMCFRVKFYPADPAALKEEITRYLVFLQIKRDLYHGRLLCKTSDAALLAAYILQAEIGDYDSGKHPEGYSSKFQFFPKHSEKLERKIAEIHKTELSGQTPATSELNFLRKAQTLETYGVDPHPCKDVSGNAAFLAFTPFGFVVLQGNKRVHFIKWNEVTKLKFEGKTFYLYVSQKEEKKIILTYFAPTPEACKHLWKCGIENQAFYKLEKSSQVRTVSSSNLFFKGSRFRYSGRVAKEVMESSAKIKREPPEIHRAGMVPSRSCPSITHGPRLSSVPRTRRRAVHISIMEGLESLRDSAHSTPVRSTSHGDTFLPHVRSSRTDSNERVAVIADEAYSPADSVLPTPVAEHSLELMLLSRQINGATCSIEEEKESEASTPTATEVEALGGELRALCQGHSGPEEEQVNKFVLSVLRLLLVTMGLLFVLLLLLIILTESDLDIAFFRDIRQTPEFEQFHYQYFCPLRRWFACKIRSVVSLLIDT

SEQ ID NO: 18874 - protein, 21 aa, Artificial Sequence
  Synthetic polypeptide
LVNIKTYKLTGKKRCQRPVPV

SEQ ID NO: 18875 - protein, 493 aa, Artificial Sequence
  Synthetic polypeptide
TLKHTNSLVKRDAKGQYLFDLLCHHLNLLEKDYFGIRFVDPDKQRHWLEFTKSVVKQLRSQPPFTMCFRVKFYPADPAALKEEITRYLVFLQIKRDLYHGRLLCKTSDAALLAAYILQAEIGDYDSGKHPEGYSSKFQFFPKHSEKLERKIAEIHKTELSGQTPATSELNFLRKAQTLETYGVDPHPCKDVSGNAAFLAFTPFGFVVLQGNKRVHFIKWNEVTKLKFEGKTFYLYVSQKEEKKIILTYFAPTPEACKHLWKCGIENQAFYKLEKSSQVRTVSSSNLFFKGSRFRYSGRVAKEVMESSAKIKREPPEIHRAGMVPSRSCPSITHGPRLSSVPRTRRRAVHISIMEGLESLRDSAHSTPVRSTSHGDTFLPHVRSSRTDSNERVAVIADEAYSPADSVLPTPVAEHSLELMLLSRQINGATCSIEEEKESEASTPTATEVEALGGELRALCQGHSGPEEEQSGHLKGPPLQQQQHQGWGKSVPLV

SEQ ID NO: 18876 - protein, 484 aa, Artificial Sequence
  Synthetic polypeptide
TLKHTNSLVKRDAKGQYLFDLLCHHLNLLEKDYFGIRFVDPDKQRHWLEFTKSVVKQLRSQPPFTMCFRVKFYPADPAALKEEITRYLVFLQIKRDLYHGRLLCKTSDAALLAAYILQAEIGDYDSGKHPEGYSSKFQFFPKHSEKLERKIAEIHKTELSGQTPATSELNFLRKAQTLETYGVDPHPCKDVSGNAAFLAFTPFGFVVLQGNKRVHFIKWNEVTKLKFEGKTFYLYVSQKEEKKIILTYFAPTPEACKHLWKCGIENQAFYKLEKSSQVRTVSSSNLFFKGSRFRYSGRVAKEVMESSAKIKREPPEIHRAGMVPSRSCPSITHGPRLSSVPRTRRRAVHISIMEGLESLRDSAHSTPVRSTSHGDTFLPHVRSSRTDSNERVAVIADEAYSPADSVLPTPVAEHSLELMLLSRQINGATCSIEEEKESEASTPTATEVEALGGELRALCQGHSGPEEEQAMVCLQNPLSGEPAH

SEQ ID NO: 18877 - protein, 99 aa, Artificial Sequence
  Synthetic polypeptide
TLKHTNSLVKRDAKGQYLFDLLCHHLNLLEKDYFGIRFVDPDKQRHWLEFTKSVVKQLRSQPPFTMCFRVKFYPADPAALKEEITSAVATEWTSFLQEV

SEQ ID NO: 18878 - protein, 192 aa, Artificial Sequence
  Synthetic polypeptide
TLKHTNSLVKRDAKGQYLFDLLCHHLNLLEKDYFGIRFVDPDKQRHWLEFTKSVVKQLRSQPPFTMCFRVKFYPADPAALKEEITRYLVFLQIKRDLYHGRLLCKTSDAALLAAYILQAEIGDYDSGKHPEGYSSKFQFFPKHSEKLERKIAEIHKTELRTCQEMLHFWPSLLLGLLFFKETRGSTSLNGMR

SEQ ID NO: 18879 - protein, 18 aa, Artificial Sequence
  Synthetic polypeptide
SSHSTASFKEASYFSFST

SEQ ID NO: 18880 - protein, 198 aa, Artificial Sequence
  Synthetic polypeptide
ISSATMKNSLEFLKKLKIELPYDLAIPLLALRKPPISVSQHESHQAISHLPTGQPLSPNMPPDSHINHNGNPGTSKQNPSSPLQRLIPGSNLDSEPRIQTDILKQATKDRVSDFHKLKQSRFFDENESPVDPQHGSKLADYNGDDGNVGEYEADKQAELAYNEEEDGDGGEEDVQDDEERELQMDPADYGKQHFNDVL

SEQ ID NO: 18881 - protein, 142 aa, Artificial Sequence
  Synthetic polypeptide
ISSATMKNSLEFLKKLKIELPYDLAIPLLALRKPPISVSQHESHQAISHLPTGQPLSPNMPPDSHINHNGNPGTSKQNPSSPLQRLIPGSNLDSEPRIQTDILKQATKDRVSDFHKLKQNDEERELQMDPADYGKQHFNDVL

SEQ ID NO: 18882 - protein, 29 aa, Artificial Sequence
  Synthetic polypeptide
SQHFRRPRQVDHEERQDQILQDRLWKLKK

SEQ ID NO: 18883 - protein, 35 aa, Artificial Sequence
  Synthetic polypeptide
PGTVAYTCNHSTLGGRGRWIMRNVRIRFSRTGCGS

SEQ ID NO: 18884 - protein, 20 aa, Artificial Sequence
  Synthetic polypeptide
SQHFRRPRQVDHEERQDQIL

SEQ ID NO: 18885 - protein, 28 aa, Artificial Sequence
  Synthetic polypeptide
PGTVAYTCNHSTLGGRGRWIMRNVRIRF

SEQ ID NO: 18886 - protein, 61 aa, Artificial Sequence
  Synthetic polypeptide
GWTQWLTLMPVIAALWEVKVGRSPEARSSRPAWPTWRNPVSTMHGVISHISLALTWLINML

SEQ ID NO: 18887 - protein, 40 aa, Artificial Sequence
  Synthetic polypeptide
SQHFGRSRWADHPRPGVRDQPGQHGETPSLLCMESSPTFL

SEQ ID NO: 18888 - protein, 1311 aa, Artificial Sequence
  Synthetic polypeptide
MDTVAHAHACNRSTLGGQGGQITRGQEFETSLANMAKPRLYYAWSHLPHFSSPDLVNKYAIVERLNFAYYLHNGRPSFAFGTFLVQELIKSKTPKQLIQQVGNEAYVIGLSSFHIPSIGAACVCFLELLGLDSLKLRVDMKVANIILSYKCRNEDAQYSFIRESVAEKLSKLADGEKTTTEELLVLLEEGTWNSIQQQEIKRLSSESSSQWALVVQFCRLHNMKLSISYLRECAKANDWLQFIIHSQLHNYHPAEVKSLIQYFSPVIQDHLRLAFENLPSVPTSKMDSDQVCNKCPQELQGSKQEMTDLFEILLQCSEEPDSWHWLLVEAVKQQAPILSVLASCLQGASAISCLCVWIITSVEDNVATEAMGHIQDSTEDHTWNLEDLSVIWRTLLTRQKSKTLIRGFQLFFKDSPLLLVMEMYELCMFFRNYKEAEAKLLEFQKSLETLNTAATKVHPVIPAMWLEDQVCFLLKLMLQQCKTQYELGKLLQLFVEREHLFSDGPDVKKLCILCQILKDTSIAINHTIITSYSIENLQHECRSILERLQTDGQFALARRVAELAELPVDNLVIKEITQEMQTLKHIEQWSLKQARIDFWKKCHENFKKNSISSKAASSFFSTQAHVACEHPTGWSSMEERHLLLTLAGHWLAQEDVVPLDKLEELEKQIWLCRITQHTLGRNQEETEPRFSRQISTSGELSFDSLASEFSFSKLAALNTSKYLELNSLPSKETCENRLDWKEQESLNFLIGRLLDDGCVHEASRVCRYFHFYNPDVALVLHCRALASGEASMEDLHPEIHALLQSAELLEEEAPDIPLRRVHSTSSLDSQKFVTVPSSNEVVTNLEVLTSKCLHGKNYCRQVLCLYDLAKELGCSYTDVAAQDGEAMLRKILASQQPDRCKRAQAFISTQGLKPDTVAELVAEEVTRELLTSSQGTGHKQMFNPTEESQTFLQLTTLCQDRTLVGMKLLDKISSVPHGELSCTTELLILAHHCFTLTCHMEGIIRVLQAAHMLTDNHLAPSEEYGLVVRLLTGIGRYNEMTYIFDLLHKKHYFEVLMRKKLDPSGTLKTALLDYIKRCRPGDSEKHNMIALCFSMCREIGENHEAAARIQLKLIESQPWEDSLKDGHQLKQLLLKALTLMLDAAESYAKDSCVRQAQHCQRLTKLITLQIHFLNTGQNTMLINLGRHKLMDCILALPRFYQASIVAEAYDFVPDWAEILYQQVILKGDFNYLEEFKQQRLLKSSIFEEISKKYKQHQPTDMVMENLKKLLTYCEDVYLYYKLAYEHKFYEIVNVLLKDPQTGCCLKDMLAG

SEQ ID NO: 18889 - protein, 1198 aa, Artificial Sequence
  Synthetic polypeptide
MDTVAHAHACNRSTLGGQGGQITRGQEFETSLANMAKPRLYYAWSHLPHFSSPDLVNKYAIVERLNFAYYLHNGRPSFAFGTFLVQELIKSKTPKQLIQQVGNEAYVIGLSSFHIPSIGAACVCFLELLGLDSLKLRVDMKVANIILSYKCRNEDAQYSFIRESVAEKLSKLADGEKTTTEELLVLLEEGTWNSIQQQEIKRLSSESSSQWALVVQFCRLHNMKLSISYLRECAKANDWLQFIIHSQLHNYHPAEVKSLIQYFSPVIQDHLRLAFENLPSVPTSKMDSDQVCNKCPQELQGSKQEMTDLFEILLQCSEEPDSWHWLLVEAVKQQAPILSVLASCLQGASAISCLCVWIITSVEDNVATEAMGHIQDSTEDHTWNLEDLSVIWRTLLTRQKSKTLIRGFQLFFKDSPLLLVMEMYELCMFFRNYKEAEAKLLEFQKSLETLNTAATKVHPVIPAMWLEDQVCFLLKLMLQQCKTQYELGKLLQLFVEREHLFSDGPDVKKLCILCQILKDTSIAINHTIITSYSIENLQHECRSILERLQTDGQFALARRVAELAELPVDNLVIKEITQEMQTLKHIEQWSLKQARIDFWKKCHENFKKNSISSKAASSFFSTQAHVACEHPTGWSSMEERHLLLTLAGHWLAQEDVVPLDKLEELEKQIWLCRITQHTLGRNQEETEPRFSRQISTSGELSFDSLASEFSFSKLAALNTSKYLELNSLPSKETCENRLDWKEQESLNFLIGRLLDDGCVHEASRVCRYFHFYNPDVALVLHCRALASGEASMEDLHPEIHALLQSAELLEEEAPDIPLRRVHSRHKQMFNPTEESQTFLQLTTLCQDRTLVGMKLLDKISSVPHGELSCTTELLILAHHCFTLTCHMEGIIRVLQAAHMLTDNHLAPSEEYGLVVRLLTGIGRYNEMTYIFDLLHKKHYFEVLMRKKLDPSGTLKTALLDYIKRCRPGDSEKHNMIALCFSMCREIGENHEAAARIQLKLIESQPWEDSLKDGHQLKQLLLKALTLMLDAAESYAKDSCVRQAQHCQRLTKLITLQIHFLNTGQNTMLINLGRHKLMDCILALPRFYQASIVAEAYDFVPDWAEILYQQVILKGDFNYLEEFKQQRLLKSSIFEEISKKYKQHQPTDMVMENLKKLLTYCEDVYLYYKLAYEHKFYEIVNVLLKDPQTGCCLKDMLAG

SEQ ID NO: 18890 - protein, 1133 aa, Artificial Sequence
  Synthetic polypeptide
MDTVAHAHACNRSTLGGQGGQITRGQEFETSLANMAKPRLYYAWSHLPHFSSPDLVNKYAIVERLNFAYYLHNGRPSFAFGTFLVQELIKSKTPKQLIQQVGNEAYVIGLSSFHIPSIGAACVCFLELLGLDSLKLRVDMKVANIILSYKCRNEDAQYSFIRESVAEKLSKLADGEKTTTEELLVLLEEGTWNSIQQQEIKRLSSESSSQWALVVQFCRLHNMKLSISYLRECAKANDWLQFIIHSQLHNYHPAEVKSLIQYFSPVIQDHLRLAFENLPSVPTSKMDSDQVCNKCPQELQGSKQEMTDLFEILLQCSEEPDSWHWLLVEAVKQQAPILSVLASCLQGASAISCLCVWIITSVEDNVATEAMGHIQDSTEDHTWNLEDLSVIWRTLLTRQKSKTLIRGFQLFFKDSPLLLVMEMYELCMFFRNYKEAEAKLLEFQKSLETLNTAATKVHPVIPAMWLEDQVCFLLKLMLQQCKTQYELGKLLQLFVEREHLFSDGPDVKKLCILCQILKDTSIAINHTIITSYSIENLQHECRSILERLQTDGQFALARRVAELAELPVDNLVIKEITQEMQTLKHIEQWSLKQARIDFWKKCHENFKKNSISSKAASSFFSTQAHVACEHPTGWSSMEERHLLLTLAGHWLAQEDVVPLDKLEELEKQIWLCRITQHTLGRNQEETEPRFSRQISTSGELSFDSLASEFSFSKLAALNTSKYLELNSLPSKETCENRLDWKEQESLNFLIGRLLDDGCVHEASRVCRYFHFYNPDVALVLHCRALASGEASMEDLHPEIHALLQSAELLEEEAPDIPLRRVHSTSSLDSQKFVTVPSSNEVVTNLEVLTSKCLHGKNYCRQVLCLYDLAKELGCSYTDVAAQDGEAMLRKILASQQPDRCKRAQAFISTQGLKPDTVAELVAEEVTRELLTSSQGTGHKQMFNPTEESQTFLQLTTLCQDRTLVGMKLLDKISSVPHGELSCTTELLILAHHCFTLTCHMEGIIRVLQAAHMLTDNHLAPSEEYGLVVRLLTGIGRYNEMTYIFDLLHKKHYFEVLMRKKLDPSGTLKTALLDYIKRCRPGDSEKHNMIALCFSMCREIGENHEAAARIQLKLIESQPWDINNISLLTWSWKT

SEQ ID NO: 18891 - protein, 947 aa, Artificial Sequence
  Synthetic polypeptide
MDTVAHAHACNRSTLGGQGGQITRGQEFETSLANMAKPRLYYAWSHLPHFSSPDLVNKYAIVERLNFAYYLHNGRPSFAFGTFLVQELIKSKTPKQLIQQVGNEAYVIGLSSFHIPSIGAACVCFLELLGLDSLKLRVDMKVANIILSYKCRNEDAQYSFIRESVAEKLSKLADGEKTTTEELLVLLEEGTWNSIQQQEIKRLSSESSSQWALVVQFCRLHNMKLSISYLRECAKANDWLQFIIHSQLHNYHPAEVKSLIQYFSPVIQDHLRLAFENLPSVPTSKMDSDQVCNKCPQELQGSKQEMTDLFEILLQCSEEPDSWHWLLVEAVKQQAPILSVLASCLQGASAISCLCVWIITSVEDNVATEAMGHIQDSTEDHTWNLEDLSVIWRTLLTRQKSKTLIRGFQLFFKDSPLLLVMEMYELCMFFRNYKEAEAKLLEFQKSLETLNTAATKVHPVIPAMWLEDQVCFLLKLMLQQCKTQYELGKLLQLFVEREHLFSDGPDVKKLCILCQILKDTSIAINHTIITSYSIENLQHECRSILERLQTDGQFALARRVAELAELPVDNLVIKEITQEMQTLKHIEQWSLKQARIDFWKKCHENFKKNSISSKAASSFFSTQAHVACEHPTGWSSMEERHLLLTLAGHWLAQEDVVPLDKLEELEKQIWLCRITQHTLGRNQEETEPRFSRQISTSGELSFDSLASEFSFSKLAALNTSKYLELNSLPSKETCENRLDWKEQESLNFLIGRLLDDGCVHEASRVCRYFHFYNPDVALVLHCRALASGEASMEDLHPEIHALLQSAELLEEEAPDIPLRRVHSTSSLDSQKFVTVPSSNEVVTNLEVLTSKCLHGKNYCRQVLCLYDLAKELGCSYTDVAAQDGEAMLRKILASQQPDRCKRAQAFISTQGLKPDTVAELVAEEVTRELLTSSQGTGALPPGDSQPL

SEQ ID NO: 18892 - protein, 97 aa, Artificial Sequence
  Synthetic polypeptide
MDTVAHAHACNRSTLGGQGGQITRGQEFETSLANMAKPRLYYAWSHLPHFSSPDLVNKYAIVERLNFAYYLHNGRPSFAFGTFLVQELIKSKTPKQL

SEQ ID NO: 18893 - protein, 113 aa, Artificial Sequence
  Synthetic polypeptide
TIARTKNQTPHILTHRQNQVVLLDTLEQEISKFKECHSMLDINALFAEAKHYHAKLVNIRKEMLMLHEKTSKLKKRALKLQQKRQKEELEREQQREKEFEREKQLTARPAKRM

SEQ ID NO: 18894 - protein, 222 aa, Artificial Sequence
  Synthetic polypeptide
TQTNLQEKNNPIKKWAKDMNRHFSKEDIYAAKKHMKKCSSSLAIREMQIKTTMRYHLTPVRMAIIKKSGNNRCWRGCGEIGTLLHCWWDCKLVQPLWKSVWRFLRDLELEIPFDPAIPLLGIYPNDYKSCCYKDTCTCMFIAALFTIAKTWNQPKCPTMIDWIKKIWHIYTMEYYAAIKNDEFLSFVGTWMKLEIIILSKLSQEQKTKHRIFSLIDRTKLYC

SEQ ID NO: 18895 - protein, 104 aa, Artificial Sequence
  Synthetic polypeptide
TIARTKNQTPHILTHRQNQVVLLDTLEQEISKFKECHSMLDINALFAEAKHYHAKLVNIRKEMLMLHEKTSKLKKRALKLQQKRQKEELEREQQREKEFEREKQ

SEQ ID NO: 18896 - protein, 62 aa, Artificial Sequence
  Synthetic polypeptide
VAPGFLTHRNYPMSVDHVIMLTVALDGKPYLAEISVLSPFAGIPVGMDFVRGQICALAHLVR

SEQ ID NO: 18897 - protein, 12 aa, Artificial Sequence
  Synthetic polypeptide
PTETTQCLWITL

SEQ ID NO: 18898 - protein, 2841 aa, Artificial Sequence
  Synthetic polypeptide
LQSCHRSQVRGSQLSGSWIPDPQKLPNVCGSRYNAYCCPGWKTLPGGNQCIVPICRHSCGDGFCSRPNMCTCPSGQIAPSCGSRSIQHCNIRCMNGGSCSDDHCLCQKGYIGTHCGQPVCESGCLNGGRCVAPNRCACTYGFTGPQCERDYRTGPCFTVISNQMCQGQLSGIVCTKTLCCATVGRAWGHPCEMCPAQPHPCRRGFIPNIRTGACQDVDECQAIPGLCQGGNCINTVGSFECKCPAGHKLNEVSQKCEDIDECSTIPGICEGGECTNTVSSYFCKCPPGFYTSPDGTRCIDVRPGYCYTALTNGRCSNQLPQSITKMQCCCDAGRCWSPGVTVAPEMCPIRATEDFNKLCSVPMVIPGRPEYPPPPLGPIPPVLPVPPGFPPGPQIPVPRPPVEYLYPSREPPRVLPVNVTDYCQLVRYLCQNGRCIPTPGSCRCECNKGFQLDLRGECIDVDECEKNPCAGGECINNQGSYTCQCRAGYQSTLTRTECRDIDECLQNGRICNNGRCINTDGSFHCVCNAGFHVTRDGKNCEDMDECSIRNMCLNGMCINEDGSFKCICKPGFQLASDGRYCKDINECETPGICMNGRCVNTDGSYRCECFPGLAVGLDGRVCVDTHMRSTCYGGYKRGQCIKPLFGAVTKSECCCASTEYAFGEPCQPCPAQNSAEYQALCSSGPGMTSAGSDINECALDPDICPNGICENLRGTYKCICNSGYEVDSTGKNCVDINECVLNSLLCDNGQCRNTPGSFVCTCPKGFIYKPDLKTCEDIDECESSPCINGVCKNSPGSFICECSSESTLDPTKTICIETIKGTCWQTVIDGRCEININGATLKSQCCSSLGAAWGSPCTLCQVDPICGKGYSRIKGTQCEDIDECEVFPGVCKNGLCVNTRGSFKCQCPSGMTLDATGRICLDIRLETCFLRYEDEECTLPIAGRHRMDACCCSVGAAWGTEECEECPMRNTPEYEELCPRGPGFATKEITNGKPFFKDINECKMIPSLCTHGKCRNTIGSFKCRCDSGFALDSEERNCTDIDECRISPDLCGRGQCVNTPGDFECKCDEGYESGFMMMKNCMDIDECQRDPLLCRGGVCHNTEGSYRCECPPGHQLSPNISACIDINECELSAHLCPNGRCVNLIGKYQCACNPGYHSTPDRLFCVDIDECSIMNGGCETFCTNSEGSYECSCQPGFALMPDQRSCTDIDECEDNPNICDGGQCTNIPGEYRCLCYDGFMASEDMKTCVDVNECDLNPNICLSGTCENTKGSFICHCDMGYSGKKGKTGCTDINECEIGAHNCGKHAVCTNTAGSFKCSCSPGWIGDGIKCTDLDECSNGTHMCSQHADCKNTMGSYRCLCKEGYTGDGFTCTDLDECSENLNLCGNGQCLNAPGGYRCECDMGFVPSADGKACEDIDECSLPNICVFGTCHNLPGLFRCECEIGYELDRSGGNCTDVNECLDPTTCISGNCVNTPGSYICDCPPDFELNPTRVGCVDTRSGNCYLDIRPRGDNGDTACSNEIGVGVSKASCCCSLGKAWGTPCEMCPAVNTSEYKILCPGGEGFRPNPITVILEDIDECQELPGLCQGGKCINTFGSFQCRCPTGYYLNEDTRVCDDVNECETPGICGPGTCYNTVGNYTCICPPDYMQVNGGNNCMDMRRSLCYRNYYADNQTCDGELLFNMTKKMCCCSYNIGRAWNKPCEQCPIPSTDEFATLCGSQRPGFVIDIYTGLPVDIDECREIPGVCENGVCINMVGSFRCECPVGFFYNDKLLVCEDIDECQNGPVCQRNAECINTAGSYRCDCKPGYRFTSTGQCNDRNECQEIPNICSHGQCIDTVGSFYCLCHTGFKTNDDQTMCLDINECERDACGNGTCRNTIGSFNCRCNHGFILSHNNDCIDVDECASGNGNLCRNGQCINTVGSFQCQCNEGYEVAPDGRTCVDINECLLEPRKCAPGTCQNLDGSYRCICPPGYSLQNEKCEDIDECVEEPEICALGTCSNTEGSFKCLCPEGFSLSSSGRRCQDLRMSYCYAKFEGGKCSSPKSRNHSKQECCCALKGEGWGDPCELCPTEPDEAFRQICPYGSGIIVGPDDSAVDMDECKEPDVCKHGQCINTDGSYRCECPFGYILAGNECVDTDECSVGNPCGNGTCKNVIGGFECTCEEGFEPGPMMTCEDINECAQNPLLCAFRCVNTYGSYECKCPVGYVLREDRRMCKDEDECEEGKHDCTEKQMECKNLIGTYMCICGPGYQRRPDGEGCVDENECQTKPGICENGRCLNTRGSYTCECNDGFTASPNQDECLDNREGYCFTEVLQNMCQIGSSNRNPVTKSECCCDGGRGWGPHCEICPFQGTVAFKKLCPHGRGFMTNGADIDECKVIHDVCRNGECVNDRGSYHCICKTGYTPDITGTSCVDLNECNQAPKPCNFICKNTEGSYQCSCPKGYILQEDGRSCKDLDECATKQHNCQFLCVNTIGGFTCKCPPGFTQHHTSCIDNNECTSDINLCGSKGICQNTPGSFTCECQRGFSLDQTGSSCEDVDECEGNHRCQHGCQNIIGGYRCSCPQGYLQHYQWNQCVDENECLSAHICGGASCHNTLGSYKCMCPAGFQYEQFSGGCQDINECGSAQAPCSYGCSNTEGGYLCGCPPGYFRIGQGHCVSGMGMGRGNPEPPVSGEMDDNSLSPEACYECKINGYPKRGRKRRSTNETDASNIEDQSETEANVSLASWDVEKTAIFAFNISHVSNKVRILELLPALTTLTNHNRYLIESGNEDGFFKINQKEGISYLHFTKKKPVAGTYSLQISSTPLYKKKELNQLEDKYDKDYLSGELGDNLKMKIQVLLH

SEQ ID NO: 18899 - protein, 272 aa, Artificial Sequence
  Synthetic polypeptide
LQSCHRSQVRGSQLSGSWIPDPQKLPNVCGSRYNAYCCPGWKTLPGGNQCIVPICRHSCGDGFCSRPNMCTCPSGQIAPSCGSRSIQHCNIRCMNGGSCSDDHCLCQKGYIGTHCGQPVCESGCLNGGRCVAPNRCACTYGFTGPQCERDYRTGPCFTVISNQMCQGQLSGIVCTKTLCCATTSMNVKLEHTTVANMLYVPIQQEASNVAAVPGGLEMALSALIWTNVPMEPICAASMQTARIPWDLTAVCARKDTQVMASLVQTLMSALRT

SEQ ID NO: 18900 - protein, 21 aa, Artificial Sequence
  Synthetic polypeptide
SYCKVKKLSLRKITHPRGHKD

SEQ ID NO: 18901 - protein, 9 aa, Artificial Sequence
  Synthetic polypeptide
QGSHRVTAR

SEQ ID NO: 18902 - protein, 25 aa, Artificial Sequence
  Synthetic polypeptide
KEAIELLQGEEAKSQKDNSPKRTQG

SEQ ID NO: 18903 - protein, 1133 aa, Artificial Sequence
  Synthetic polypeptide
SWTRKQTFGANWRHLYKTKTDTSEKPKNQLWPESSTSDVVRDDILLLKNEIQVLQQQNQELKETEGKLRNTNQDLCNQMRQMVQDFDHDKQEAVDRCERTYQQHHEAMKTQIRESLLAKHALEKQQLFEAYERTHLQLRSELDKLNKEVTAVQECYLEVCREKDNLELTLRKTTEKEQQTQEKIKEKLIQQLEKEWQSKLDQTIKAMKKKTLDCGSQTDQVTTSDVISKKEMAIMIEEQKCTIQQNLEQEKDIAIKGAMKKLEIELELKHCENITKQVEIAVQNAHQRWLGELPELAEYQALVKAEQKKWEEQHEVSVNKRISFAVSEAKEKWKSELENMRKNILPGKELEEKIHSLQKELELKNEEVPVVIRAELAKARSEWNKEKQEEIHRIQEQNEQDYRQFLDDHRNKINEVLAAAKEDFMKQKTELLLQKETELQTCLDQSRREWTMQEAKRIQLEIYQYEEDILTVLGVLLSDTQKEHISDSEDKQLLEIMSTCSSKWMSVQYFEKLKGCIQKAFQDTLPLLVENADPEWKKRNMAELSKDSASQGTGQGDPGPAAGHHAQPLALQATEAEADKKKVLEIKDLCCGHCFQELEKAKQECQDLKGKLEKCCRHLQHLERKHKAVVEKIGEENNKVVEELIEENNDMKNKLEELQTLCKTPPRSLSAGAIENACLPCSGGALEELRGQYIKAVKKIKCDMLRYIQESKERAAEMVKAEVLRERQETARKMRKYYLICLQQILQDDGKEGAEKKIMNAASKLATMAKLLETPISSKSQSKTTQSALPLTSEMLIAVKKSKRNDVNQKIPCCIESKSNSVNTITRTLCEQAPKRRAACNLQRLLENSEHQSIKHVGSKETHLEFQFGDGSCKHLNSLPRNVSPEFVPCEGEGGFGLHKKKDLLSDNGSESLPHSAAYPFLGTLGNKPSPRCTPGPSESGCMHITFRDSNERLGLKVYKCNPLMESENAASEKSQGLDVQEPPVKDGGDLSDCLGWPSSSATLSFDSREASFVHGRPQGTLEIPSESVKSKQFSPSGYLSDTEESNMICQTMKCQRYQTPYLSEETTYLEPGKISVNCGHPSRHKADRLKSDFKKLSSTLPSSVCQQPSRKLIVPLSSQQDSGFDSPFVNLD

SEQ ID NO: 18904 - protein, 78 aa, Artificial Sequence
  Synthetic polypeptide
QLNATQNHGFDLGPENRHLGQIGDICIRLKQIPQKNQRINYGLSLLLLMLSEMIFCCLKMKFKFYNNKIRNLKKLKEN

SEQ ID NO: 18905 - protein, 1077 aa, Artificial Sequence
  Synthetic polypeptide
SWTRKQTFGANWRHLYKTKTDTSEKPKNQLWPESSTSDVVRDDILLLKNEIQVLQQQNQELKETEGKLRNTNQDLCNQMRQMVQDFDHDKQEAVDRCERTYQQHHEAMKTQIRESLLAKHALEKQQLFEAYERTHLQLRSELDKLNKEVTAVQECYLEVCREKDNLELTLRKTTEKEQQTQEKIKEKLIQQLEKEWQSKLDQTIKAMKKKTLDCGSQTDQVTTSDVISKKEMAIMIEEQKCTIQQNLEQEKDIAIKGAMKKLEIELELKHCENITKQVEIAVQNAHQRWLGELPELAEYQALVKAEQKKWEEQHEVSVNKRISFAVSEAKEKWKSELENMRKNILPGKELEEKIHSLQKELELKNEEVPVVIRAELAKARSEWNKEKQEEIHRIQEQNEQDYRQFLDDHRNKINEVLAAAKEDFMKQKTELLLQKETELQTCLDQSRREWTMQEAKRIQLEIYQYEEDILTVLGVLLSDTQKEHISDSEDKQLLEIMSTCSSKWMSVQYFEKLKGCIQKAFQDTLPLLVENADPEWKKRNMAELSKDSASQGTGQGDPGPAAGHHAQPLALQATEAEAEENNKVVEELIEENNDMKNKLEELQTLCKTPPRSLSAGAIENACLPCSGGALEELRGQYIKAVKKIKCDMLRYIQESKERAAEMVKAEVLRERQETARKMRKYYLICLQQILQDDGKEGAEKKIMNAASKLATMAKLLETPISSKSQSKTTQSALPLTSEMLIAVKKSKRNDVNQKIPCCIESKSNSVNTITRTLCEQAPKRRAACNLQRLLENSEHQSIKHVGSKETHLEFQFGDGSCKHLNSLPRNVSPEFVPCEGEGGFGLHKKKDLLSDNGSESLPHSAAYPFLGTLGNKPSPRCTPGPSESGCMHITFRDSNERLGLKVYKCNPLMESENAASEKSQGLDVQEPPVKDGGDLSDCLGWPSSSATLSFDSREASFVHGRPQGTLEIPSESVKSKQFSPSGYLSDTEESNMICQTMKCQRYQTPYLSEETTYLEPGKISVNCGHPSRHKADRLKSDFKKLSSTLPSSVCQQPSRKLIVPLSSQQDSGFDSPFVNLD

SEQ ID NO: 18906 - protein, 791 aa, Artificial Sequence
  Synthetic polypeptide
SWTRKQTFGANWRHLYKTKTDTSEKPKNQLWPESSTSDVVRDDILLLKNEIQVLQQQNQELKETEGKLRNTNQDLCNQMRQMVQDFDHDKQEAVDRCERTYQQHHEAMKTQIRESLLAKHALEKQQLFEAYERTHLQLRSELDKLNKEVTAVQECYLEVCREKDNLELTLRKTTEKEQQTQEKIKEKLIQQLEKEWQSKLDQTIKAMKKKTLDCGSQTDQVTTSDVISKKEMAIMIEEQKCTIQQNLEQEKDIAIKGAMKKLEIELELKHCENITKQVEIAVQNAHQRWLGELPELAEYQALVKAEQKKWEEQHEVSVNKRISFAVSEAKEKWKSELENMRKNILPGKELEEKIHSLQKELELKNEEVPVVIRAELAKARSEWNKEKQEEIHRIQEQNEQDYRQFLDDHRNKINEVLAAAKEDFMKQKTELLLQKETELQTCLDQSRREWTMQEAKRIQLEIYQYEEDILTVLGVLLSDTQKEHISDSEDKQLLEIMSTCSSKWMSVQYFEKLKGCIQKAFQDTLPLLVENADPEWKKRNMAELSKDSASQGTGQGDPGPAAGHHAQPLALQATEAEADKKKVLEIKDLCCGHCFQELEKAKQECQDLKGKLEKCCRHLQHLERKHKAVVEKIGEENNKVVEELIEENNDMKNKLEELQTLCKTPPRSLSAGAIENACLPCSGGALEELRGQYIKAVKKIKCDMLRYIQESKERAAEMVKAEVLRERQETARKMRKYYLICLQQILQDDGKEGAEKKIMNAASKLATMAKLLETPISSKSQSKTTQSGMSK

SEQ ID NO: 18907 - protein, 1392 aa, Artificial Sequence
  Synthetic polypeptide
LFHSPQMIKKSRTTEMALESLKQQLVDLHHSESLQRAREQHESIVMGLTKKYEEQVLSLQKNLDATVTALKEQEDICSRLKDHVKQLERNQEAIKLEKTEIINKLTRSLEESQKQCAHLLQSGSVQEVAQLQFQLQQAQKAHAMSANMNKALQEELTELKDEISLYESAAKLGIHPSDSEGELNIELTESYVDLGIKKVNWKKSKVTSIVQEEDPNEELSKDEFILKLKAEVQRLLGSNSMKRHLVSQLQNDLKDCHKKIEDLHQVKKDEKSIEVETKTDTSEKPKNQLWPESSTSDVVRDDILLLKNEIQVLQQQNQELKETEGKLRNTNQDLCNQMRQMVQDFDHDKQEAVDRCERTYQQHHEAMKTQIRESLLAKHALEKQQLFEAYERTHLQLRSELDKLNKEVTAVQECYLEVCREKDNLELTLRKTTEKEQQTQEKIKEKLIQQLEKEWQSKLDQTIKAMKKKTLDCGSQTDQVTTSDVISKKEMAIMIEEQKCTIQQNLEQEKDIAIKGAMKKLEIELELKHCENITKQVEIAVQNAHQRWLGELPELAEYQALVKAEQKKWEEQHEVSVNKRISFAVSEAKEKWKSELENMRKNILPGKELEEKIHSLQKELELKNEEVPVVIRAELAKARSEWNKEKQEEIHRIQEQNEQDYRQFLDDHRNKINEVLAAAKEDFMKQKTELLLQKETELQTCLDQSRREWTMQEAKRIQLEIYQYEEDILTVLGVLLSDTQKEHISDSEDKQLLEIMSTCSSKWMSVQYFEKLKGCIQKAFQDTLPLLVENADPEWKKRNMAELSKDSASQGTGQGDPGPAAGHHAQPLALQATEAEADKKKVLEIKDLCCGHCFQELEKAKQECQDLKGKLEKCCRHLQHLERKHKAVVEKIGEENNKVVEELIEENNDMKNKLEELQTLCKTPPRSLSAGAIENACLPCSGGALEELRGQYIKAVKKIKCDMLRYIQESKERAAEMVKAEVLRERQETARKMRKYYLICLQQILQDDGKEGAEKKIMNAASKLATMAKLLETPISSKSQSKTTQSALPLTSEMLIAVKKSKRNDVNQKIPCCIESKSNSVNTITRTLCEQAPKRRAACNLQRLLENSEHQSIKHVGSKETHLEFQFGDGSCKHLNSLPRNVSPEFVPCEGEGGFGLHKKKDLLSDNGSESLPHSAAYPFLGTLGNKPSPRCTPGPSESGCMHITFRDSNERLGLKVYKCNPLMESENAASEKSQGLDVQEPPVKDGGDLSDCLGWPSSSATLSFDSREASFVHGRPQGTLEIPSESVKSKQFSPSGYLSDTEESNMICQTMKCQRYQTPYLSEETTYLEPGKISVNCGHPSRHKADRLKSDFKKLSSTLPSSVCQQPSRKLIVPLSSQQDSGFDSPFVNLD

SEQ ID NO: 18908 - protein, 6 aa, Artificial Sequence
  Synthetic polypeptide
SFTPLR

SEQ ID NO: 18909 - protein, 13 aa, Artificial Sequence
  Synthetic polypeptide
LSLPSDDQEVQNN

SEQ ID NO: 18910 - protein, 1336 aa, Artificial Sequence
  Synthetic polypeptide
LFHSPQMIKKSRTTEMALESLKQQLVDLHHSESLQRAREQHESIVMGLTKKYEEQVLSLQKNLDATVTALKEQEDICSRLKDHVKQLERNQEAIKLEKTEIINKLTRSLEESQKQCAHLLQSGSVQEVAQLQFQLQQAQKAHAMSANMNKALQEELTELKDEISLYESAAKLGIHPSDSEGELNIELTESYVDLGIKKVNWKKSKVTSIVQEEDPNEELSKDEFILKLKAEVQRLLGSNSMKRHLVSQLQNDLKDCHKKIEDLHQVKKDEKSIEVETKTDTSEKPKNQLWPESSTSDVVRDDILLLKNEIQVLQQQNQELKETEGKLRNTNQDLCNQMRQMVQDFDHDKQEAVDRCERTYQQHHEAMKTQIRESLLAKHALEKQQLFEAYERTHLQLRSELDKLNKEVTAVQECYLEVCREKDNLELTLRKTTEKEQQTQEKIKEKLIQQLEKEWQSKLDQTIKAMKKKTLDCGSQTDQVTTSDVISKKEMAIMIEEQKCTIQQNLEQEKDIAIKGAMKKLEIELELKHCENITKQVEIAVQNAHQRWLGELPELAEYQALVKAEQKKWEEQHEVSVNKRISFAVSEAKEKWKSELENMRKNILPGKELEEKIHSLQKELELKNEEVPVVIRAELAKARSEWNKEKQEEIHRIQEQNEQDYRQFLDDHRNKINEVLAAAKEDFMKQKTELLLQKETELQTCLDQSRREWTMQEAKRIQLEIYQYEEDILTVLGVLLSDTQKEHISDSEDKQLLEIMSTCSSKWMSVQYFEKLKGCIQKAFQDTLPLLVENADPEWKKRNMAELSKDSASQGTGQGDPGPAAGHHAQPLALQATEAEAEENNKVVEELIEENNDMKNKLEELQTLCKTPPRSLSAGAIENACLPCSGGALEELRGQYIKAVKKIKCDMLRYIQESKERAAEMVKAEVLRERQETARKMRKYYLICLQQILQDDGKEGAEKKIMNAASKLATMAKLLETPISSKSQSKTTQSALPLTSEMLIAVKKSKRNDVNQKIPCCIESKSNSVNTITRTLCEQAPKRRAACNLQRLLENSEHQSIKHVGSKETHLEFQFGDGSCKHLNSLPRNVSPEFVPCEGEGGFGLHKKKDLLSDNGSESLPHSAAYPFLGTLGNKPSPRCTPGPSESGCMHITFRDSNERLGLKVYKCNPLMESENAASEKSQGLDVQEPPVKDGGDLSDCLGWPSSSATLSFDSREASFVHGRPQGTLEIPSESVKSKQFSPSGYLSDTEESNMICQTMKCQRYQTPYLSEETTYLEPGKISVNCGHPSRHKADRLKSDFKKLSSTLPSSVCQQPSRKLIVPLSSQQDSGFDSPFVNLD

SEQ ID NO: 18911 - protein, 1050 aa, Artificial Sequence
  Synthetic polypeptide
LFHSPQMIKKSRTTEMALESLKQQLVDLHHSESLQRAREQHESIVMGLTKKYEEQVLSLQKNLDATVTALKEQEDICSRLKDHVKQLERNQEAIKLEKTEIINKLTRSLEESQKQCAHLLQSGSVQEVAQLQFQLQQAQKAHAMSANMNKALQEELTELKDEISLYESAAKLGIHPSDSEGELNIELTESYVDLGIKKVNWKKSKVTSIVQEEDPNEELSKDEFILKLKAEVQRLLGSNSMKRHLVSQLQNDLKDCHKKIEDLHQVKKDEKSIEVETKTDTSEKPKNQLWPESSTSDVVRDDILLLKNEIQVLQQQNQELKETEGKLRNTNQDLCNQMRQMVQDFDHDKQEAVDRCERTYQQHHEAMKTQIRESLLAKHALEKQQLFEAYERTHLQLRSELDKLNKEVTAVQECYLEVCREKDNLELTLRKTTEKEQQTQEKIKEKLIQQLEKEWQSKLDQTIKAMKKKTLDCGSQTDQVTTSDVISKKEMAIMIEEQKCTIQQNLEQEKDIAIKGAMKKLEIELELKHCENITKQVEIAVQNAHQRWLGELPELAEYQALVKAEQKKWEEQHEVSVNKRISFAVSEAKEKWKSELENMRKNILPGKELEEKIHSLQKELELKNEEVPVVIRAELAKARSEWNKEKQEEIHRIQEQNEQDYRQFLDDHRNKINEVLAAAKEDFMKQKTELLLQKETELQTCLDQSRREWTMQEAKRIQLEIYQYEEDILTVLGVLLSDTQKEHISDSEDKQLLEIMSTCSSKWMSVQYFEKLKGCIQKAFQDTLPLLVENADPEWKKRNMAELSKDSASQGTGQGDPGPAAGHHAQPLALQATEAEADKKKVLEIKDLCCGHCFQELEKAKQECQDLKGKLEKCCRHLQHLERKHKAVVEKIGEENNKVVEELIEENNDMKNKLEELQTLCKTPPRSLSAGAIENACLPCSGGALEELRGQYIKAVKKIKCDMLRYIQESKERAAEMVKAEVLRERQETARKMRKYYLICLQQILQDDGKEGAEKKIMNAASKLATMAKLLETPISSKSQSKTTQSGMSK

SEQ ID NO: 18912 - protein, 266 aa, Artificial Sequence
  Synthetic polypeptide
LFHSPQMIKKSRTTEMALESLKQQLVDLHHSESLQRAREQHESIVMGLTKKYEEQVLSLQKNLDATVTALKEQEDICSRLKDHVKQLERNQEAIKLEKTEIINKLTRSLEESQKQCAHLLQSGSVQEVAQLQFQLQQAQKAHAMSANMNKALQEELTELKDEISLYESAAKLGIHPSDSEGELNIELTESYVDLGIKKVNWKKSKVTSIVQEEDPNEELSKDEFILKLKAEVQRLLGSNSMKRHLVSQLQNDLKDCHKKIEDLHQV

SEQ ID NO: 18913 - protein, 18 aa, Artificial Sequence
  Synthetic polypeptide
HQLCVAIKHLKYGYCDRD

SEQ ID NO: 18914 - protein, 270 aa, Artificial Sequence
  Synthetic polypeptide
SMAIVTETDDGEDDLKKGTQLLEIYALEIQMYTAQKNNKKLKALYEQSLHIKSAIPHPLIMGVIRECGGKMHLREGEFEKAHTDFFEAFKNYDESGSPRRTTCLKYLVLANMLMKSGINPFDSQEAKPYKNDPEILAMTNLVSAYQNNDITEFEKILKTNHSNIMDDPFIREHIEELLRNIRTQVLIKLIKPYTRIHIPFISKELNIDVADVESLLVQCILDNTIHGRIDQVNQLLELDHQKRGGARYTALDKWTNQLNSLNQAVVSKLA

SEQ ID NO: 18915 - protein, 9 aa, Artificial Sequence
  Synthetic polypeptide
QRLMMEKMI

SEQ ID NO: 18916 - protein, 90 aa, Artificial Sequence
  Synthetic polypeptide
SMAIVTETDDGEDDLKKGTQLLEIYALEIQMYTAQKNNKKLKALYEQSLHIKSAIPHPLIMGVIRECGGKMHLREGEFEKAHTDFFEAFK

SEQ ID NO: 18917 - protein, 74 aa, Artificial Sequence
  Synthetic polypeptide
SMAIVTETDDGEDDLKKGTQLLEIYALEIQMYTAQKNNKKLKALYEQSLHIKSAIPHPLIMGVIRECGGKMHLR

SEQ ID NO: 18918 - protein, 25 aa, Artificial Sequence
  Synthetic polypeptide
QGSPIPVTASWPVQKWATQQEGLQY

SEQ ID NO: 18919 - protein, 390 aa, Artificial Sequence
  Synthetic polypeptide
RVPQSLLLLHGLFRSGPHSRRDFSTSANNIQIDKTKPLWHNYFLCGLKGIQEHFGLSNLTGMNCLVDGNIPPSSGLSSSSALVCCAGLVTLTVLGRNLSKVELAEICAKSERYIGTEGGGMDQSISFLAEEGTAKLIEFSPLRATDVKLPSGAVFVIANSCVEMNKAATSHFNIRVMECRLAAKLLAKYKSLQWDKVLRLEEVQAKLGISLEEMLLVTEDALHPEPYNPEEICRCLGISLEELRTQILSPNTQDVLIFKLYQRAKHVYSEAARVLQFKKICEEAPENMVQLLGELMNQSHMSCRDMYECSCPELDQLVDICRKFGAQGSRLTGAGWGGCTVSMVPADKLPSFLANVHKAYYQRSDGSLAPEKQSLFATKPGGGALVLLEA

SEQ ID NO: 18920 - protein, 58 aa, Artificial Sequence
  Synthetic polypeptide
GFPNPCYCFMACSEVGHTAGGTSVLVLITSRLIKPSLCGTTISYVDLKEFRNTLVLVT

SEQ ID NO: 18921 - protein, 87 aa, Artificial Sequence
  Synthetic polypeptide
RVPQSLLLLHGLFRSGPHSRRDFSTSANNIQIDKTKPLWHNYFLCGLKGIQEHFGLSNLTGMNCLVDGNIPPSSGLSSSSALVCCAG

SEQ ID NO: 18922 - protein, 36 aa, Artificial Sequence
  Synthetic polypeptide
RVPQSLLLLHGLFRSGPHSRRDFSTSANNIQIDKTK

SEQ ID NO: 18923 - protein, 36 aa, Artificial Sequence
  Synthetic polypeptide
GFPNPCYCFMACSEVGHTAGGTSVLVLITSRLIKPS

SEQ ID NO: 18924 - protein, 165 aa, Artificial Sequence
  Synthetic polypeptide
RVPQSLLLLHGLFRSGPHSRRDFSTSANNIQIDKTKPLWHNYFLCGLKGIQEHFGLSNLTGMNCLVDGNIPPSSGLSSSSALVCCAGLVTLTVLGRNLSKAKLIEFSPLRATDVKLPSGAVFVIANSCVEMNKAATSHFNIRVMECRLAAKVQAKLGISLEEMLL

SEQ ID NO: 18925 - protein, 137 aa, Artificial Sequence
  Synthetic polypeptide
TVLIFKLYQRAKHVYSEAARVLQFKKICEEAPENMVQLLGELMNQSHMSCRDMYECSCPELDQLVDICRKFGAQGSRLTGAGWGGCTVSMVPADKLPSFLANVHKAYYQRSDGSLAPEKQSLFATKPGGGALVLLEA

SEQ ID NO: 18926 - protein, 78 aa, Artificial Sequence
  Synthetic polypeptide
WSSSPLQSSADVQNCIQAWEPPFKKGIHRLKCIWKNKQCSSSNSISGQSMCTARLRECSSLRRYVKKHLKTWSSCWES

SEQ ID NO: 18927 - protein, 30 aa, Artificial Sequence
  Synthetic polypeptide
SVFGRINSAHLQTLSAGKACVQRGCASAPV

SEQ ID NO: 18928 - protein, 83 aa, Artificial Sequence
  Synthetic polypeptide
TVLIFKLYQRAKHVYSEAARVLQFKKICEEAPENMVQLLGELMNQSHMSCRDMYECSCPELDQLVDICRCFGNTSQLMHLKII

SEQ ID NO: 18929 - protein, 141 aa, Artificial Sequence
  Synthetic polypeptide
TVLIFKLYQRAKHVYSEAARVLQFKKICEEAPENMVQLLGELMNQSHMSCRDMYECSCPELDQLVDICRKFGAQGSRLTGAGWGGCTVSMVPADKLPSFLANVHKAYYQRSDGSLAPEKQSLFATKPGGALEIPASSCILR

SEQ ID NO: 18930 - protein, 50 aa, Artificial Sequence
  Synthetic polypeptide
QHRKKLGIPRDSEVLDKKVKDMTAQISWKSGQWQLELWQSKGWKVNSILQ

SEQ ID NO: 18931 - protein, 22 aa, Artificial Sequence
  Synthetic polypeptide
QHRYHGNQDSGSWNCGNQRGGK

SEQ ID NO: 18932 - protein, 107 aa, Artificial Sequence
  Synthetic polypeptide
ESERHDSTDIMEIRTVAVGIVAIKGVESEFYLAMNKEGKLYAKKECNEDCNFKELILENHYNTYASAKWTHNGGEMFVALNQKGIPVRGKKTKKEQKTAHFLPMAIT

SEQ ID NO: 18933 - protein, 93 aa, Artificial Sequence
  Synthetic polypeptide
ESERHDSTDIMEIRTVAVGIVAIKGVESEFYLAMNKEGKLYAKKECNEDCNFKELILENHYNTYASAKWTHNGGEMFVALNQKGIPVRGKKTK

SEQ ID NO: 18934 - protein, 271 aa, Artificial Sequence
  Synthetic polypeptide
GAPPPGSHPVWEIYPDCLAQAIYATFHEAFPESSYLFNDEFKEDLGNNIFLWCSGLKPQKGFWIHWKLKELSTTTIHGSKKAPAKSVKERIADSQEHISTSIDFNIIKILNNPRAYTLPISKEESRLSRLATKSHYSSTGPEFNRVLFNFGGQSPLILYYLKMHELAGISKAPKKTKIKLTKIFQEPLPAPTYRDVIKEAKRQFARNQKDFRILQAKATKKPHEVKQDFEKFLHKLRSEAEIERECVASLSSSSSSSPSSTDNYNFEEEEY

SEQ ID NO: 18935 - protein, 60 aa, Artificial Sequence
  Synthetic polypeptide
EVRSPSAWQLPRLRSEEPLRLAVTPSGKYILIVWHKPYMQRSMKHFQNRVTSLMMNLKKI

SEQ ID NO: 18936 - protein, 17 aa, Artificial Sequence
  Synthetic polypeptide
EVRSPSAWQSPRLGNIS

SEQ ID NO: 18937 - protein, 101 aa, Artificial Sequence
  Synthetic polypeptide
GAPPPGSHPVWEIYPDCLAQAIYATFHEAFPESSYLFNDEFKEDLGNNIFLWCSGLKPQKGFWIHWKLKELSTTTIHGSKKAPAKSVKERIADSQEHISTS

SEQ ID NO: 18938 - protein, 584 aa, Artificial Sequence
  Synthetic polypeptide
GRARWLTPVIPALQEAEVGGSRGPEMETILASMLLGATAVEDKLQEGVIETVTSLSLANIKIWVLTGDKQETAINIGYACNMLTDDMNDVFVIAGNNAVEVREELRKAKQNLFGQNRNFSNGHVVCEKKQQLELDSIVEETITGDYALIINGHSLAHALESDVKNDLLELACMCKTVICCRVTPLQKAQVVELVKKYRNAVTLAIGDGANDVSMIKSAHIGVGISGQEGLQAVLASDYSFAQFRYLQRLLLVHGRWSYFRMCKFLCYFFYKNFAFTLVHFWFGFFCGFSAQTVYDQWFITLFNIVYTSLPVLAMGIFDQDVSDQNSVDCPQLYKPGQLNLLFNKRKFFICVLHGIYTSLVLFFIPYGAFYNVAGEDGQHIADYQSFAVTMATSLVIVVSVQIALDTSYWTFINHVFIWGSIAIYFSILFTMHSNGIFGIFPNQFPFVGNARHSLTQKCIWLVILLTTVASVMPVVAFRFLKVDLYPTLSDQIRRWQKAQKKARPPSSRRPRTRRSSSRRSGYAFAHQEGYGELITSGKNMRAKNPPPTSGLEKTHYNSTSWIENLCKKTTDTVSSFSQDKTVKL

SEQ ID NO: 18939 - protein, 25 aa, Artificial Sequence
  Synthetic polypeptide
SQHFRRPRWADHEVRRWRPSWLACY

SEQ ID NO: 18940 - protein, 10 aa, Artificial Sequence
  Synthetic polypeptide
HATRCHCCRR

SEQ ID NO: 18941 - protein, 109 aa, Artificial Sequence
  Synthetic polypeptide
GRARWLTPVIPALQEAEVGGSRGPEMETILASMLLGATAVEDKLQEGVIETVTSLSLANIKIWVLTGDKQETAINIGYACNMLTDDMNDVFVIAGNNAVEVREELRLMP

SEQ ID NO: 18942 - protein, 568 aa, Artificial Sequence
  Synthetic polypeptide
GRARWLTPVIPALQEAELLGATAVEDKLQEGVIETVTSLSLANIKIWVLTGDKQETAINIGYACNMLTDDMNDVFVIAGNNAVEVREELRKAKQNLFGQNRNFSNGHVVCEKKQQLELDSIVEETITGDYALIINGHSLAHALESDVKNDLLELACMCKTVICCRVTPLQKAQVVELVKKYRNAVTLAIGDGANDVSMIKSAHIGVGISGQEGLQAVLASDYSFAQFRYLQRLLLVHGRWSYFRMCKFLCYFFYKNFAFTLVHFWFGFFCGFSAQTVYDQWFITLFNIVYTSLPVLAMGIFDQDVSDQNSVDCPQLYKPGQLNLLFNKRKFFICVLHGIYTSLVLFFIPYGAFYNVAGEDGQHIADYQSFAVTMATSLVIVVSVQIALDTSYWTFINHVFIWGSIAIYFSILFTMHSNGIFGIFPNQFPFVGNARHSLTQKCIWLVILLTTVASVMPVVAFRFLKVDLYPTLSDQIRRWQKAQKKARPPSSRRPRTRRSSSRRSGYAFAHQEGYGELITSGKNMRAKNPPPTSGLEKTHYNSTSWIENLCKKTTDTVSSFSQDKTVKL

SEQ ID NO: 18943 - protein, 9 aa, Artificial Sequence
  Synthetic polypeptide
SQHFRRPSY

SEQ ID NO: 18944 - protein, 25 aa, Artificial Sequence
  Synthetic polypeptide
PGAVAHTCNPSTSGGRATRCHCCRR

SEQ ID NO: 18945 - protein, 93 aa, Artificial Sequence
  Synthetic polypeptide
GRARWLTPVIPALQEAELLGATAVEDKLQEGVIETVTSLSLANIKIWVLTGDKQETAINIGYACNMLTDDMNDVFVIAGNNAVEVREELRLMP

SEQ ID NO: 18946 - protein, 764 aa, Artificial Sequence
  Synthetic polypeptide
EEKEPVDFSVKSQADREFQFFDHHLMESIKMGDPKVHEFLRLLALCHTVMSEENSAGELIYQVQSPDEGALVTAARNFGFIFKSRTPETITIEELGTLVTYQLLAFLDFNNTRKRMSVIVRNPEGQIKLYSKGADTILFEKLHPSNEVLLSLTSDHLSEFAGEGLRTLAIAYRDLDDKYFKEWHKMLEDANAATEERDERIAGLYEEIERDLMLLGATAVEDKLQEGVIETVTSLSLANIKIWVLTGDKQETAINIGYACNMLTDDMNDVFVIAGNNAVEVREELRKAKQNLFGQNRNFSNGHVVCEKKQQLELDSIVEETITGDYALIINGHSLAHALESDVKNDLLELACMCKTVICCRVTPLQKAQVVELVKKYRNAVTLAIGDGANDVSMIKSAHIGVGISGQEGLQAVLASDYSFAQFRYLQRLLLVHGRWSYFRMCKFLCYFFYKNFAFTLVHFWFGFFCGFSAQTVYDQWFITLFNIVYTSLPVLAMGIFDQDVSDQNSVDCPQLYKPGQLNLLFNKRKFFICVLHGIYTSLVLFFIPYGAFYNVAGEDGQHIADYQSFAVTMATSLVIVVSVQIALDTSYWTFINHVFIWGSIAIYFSILFTMHSNGIFGIFPNQFPFVGNARHSLTQKCIWLVILLTTVASVMPVVAFRFLKVDLYPTLSDQIRRWQKAQKKARPPSSRRPRTRRSSSRRSGYAFAHQEGYGELITSGKNMRAKNPPPTSGLEKTHYNSTSWIENLCKKTTDTVSSFSQDKTVKL

SEQ ID NO: 18947 - protein, 29 aa, Artificial Sequence
  Synthetic polypeptide
SQHFERKKSLWISQSNLKRIENFSSLTTI

SEQ ID NO: 18948 - protein, 28 aa, Artificial Sequence
  Synthetic polypeptide
PSVVAHTYSHSTLRGKRACGFLSQISSG

SEQ ID NO: 18949 - protein, 289 aa, Artificial Sequence
  Synthetic polypeptide
EEKEPVDFSVKSQADREFQFFDHHLMESIKMGDPKVHEFLRLLALCHTVMSEENSAGELIYQVQSPDEGALVTAARNFGFIFKSRTPETITIEELGTLVTYQLLAFLDFNNTRKRMSVIVRNPEGQIKLYSKGADTILFEKLHPSNEVLLSLTSDHLSEFAGEGLRTLAIAYRDLDDKYFKEWHKMLEDANAATEERDERIAGLYEEIERDLMLLGATAVEDKLQEGVIETVTSLSLANIKIWVLTGDKQETAINIGYACNMLTDDMNDVFVIAGNNAVEVREELRLMP

SEQ ID NO: 18950 - protein, 416 aa, Artificial Sequence
  Synthetic polypeptide
GRARWLTPVIPALWEAEAGRSRGEEIETILANTMSLVDLGKKLLEAARAGQDDEVRILMANGAPFTTDWLGTSPLHLAAQYGHYSTTEVLLRAGVSRDARTKVDRTPLHMAASEGHASIVEVLLKHGADVNAKDMLKMTALHWATEHNHQEVVELLIKYGADVHTQSKFCKTAFDISIDNGNEDLAEILQIAMQNQINTNPESPDTVTIHAATPQFIIGPGGVVNLTDETGVSAVQFGNSSTSVLATLAALAEASAPLSNSSETPVVATEEVVTAESVDGAIQQVVSSGGQQVITIVTDGIQLGNLHSIPTSGIGQPIIVTMPDGQQVLTVPATDIAEETVISEEPPAKRQCIEIIENRVESAEIEEREALQKQLDEANREAQKYRQQLLKKEQEAEAYRQKLEAMTRLQTNKEAV

SEQ ID NO: 18951 - protein, 27 aa, Artificial Sequence
  Synthetic polypeptide
SQHYGRPRRADHEVRRSRPSWLTRCPW

SEQ ID NO: 18952 - protein, 20 aa, Artificial Sequence
  Synthetic polypeptide
HDVPGRFGKEAFRSGTSRSR

SEQ ID NO: 18953 - protein, 428 aa, Artificial Sequence
  Synthetic polypeptide
GRARWLTPVIPALWEAEAGRSRGEEIETILANTMSLVDLGKKLLEAARAGQDDEVRILMANGAPFTTDWLGTSPLHLAAQYGHYSTTEVLLRAGVSRDARTKVDRTPLHMAASEGHASIVEVLLKHGADVNAKDMLKMTALHWATEHNHQEVVELLIKYGADVHTQSKFCKTAFDISIDNGNEDLAEILQIAMQNQINTNPESPDTVTIHAATPQFIIGPGGVVNLTGLVSSENSSKATDETGVSAVQFGNSSTSVLATLAALAEASAPLSNSSETPVVATEEVVTAESVDGAIQQVVSSGGQQVITIVTDGIQLGNLHSIPTSGIGQPIIVTMPDGQQVLTVPATDIAEETVISEEPPAKRQCIEIIENRVESAEIEEREALQKQLDEANREAQKYRQQLLKKEQEAEAYRQKLEAMTRLQTNKEAV

SEQ ID NO: 18954 - protein, 393 aa, Artificial Sequence
  Synthetic polypeptide
GRARWLTPVIPALWEAEAGRSRGEEIETILANTMSLVDLGKKLLEAARAGQDDEVRILMANGAPFTTDWLGTSPLHLAAQYGHYSTTEVLLRAGVSRDARTKVDRTPLHMAASEGHASIVEVLLKHGADVNAKDMLKMTALHWATEHNHQEVVELLIKYGADVHTQSKFCKTAFDISIDNGNEDLAEILQIAMQNQINTNPESPDTVTIHAATPQFIIGPGGVVNLTGLVSSENSSKATDETGVSAVQFGNSSTSVLATLAALAEASAPLSNSSETPVVATEEVVTAESVDGAIQQVVSSGGQQVITIVTDGIQLGNLHSIPTSGIGQPIIVTMPDGQQVLTVPATDIAEETVISEEPPAKRQCIEIIENRVESAEIEVRSLLPGVLCRSHPK

SEQ ID NO: 18955 - protein, 381 aa, Artificial Sequence
  Synthetic polypeptide
GRARWLTPVIPALWEAEAGRSRGEEIETILANTMSLVDLGKKLLEAARAGQDDEVRILMANGAPFTTDWLGTSPLHLAAQYGHYSTTEVLLRAGVSRDARTKVDRTPLHMAASEGHASIVEVLLKHGADVNAKDMLKMTALHWATEHNHQEVVELLIKYGADVHTQSKFCKTAFDISIDNGNEDLAEILQIAMQNQINTNPESPDTVTIHAATPQFIIGPGGVVNLTDETGVSAVQFGNSSTSVLATLAALAEASAPLSNSSETPVVATEEVVTAESVDGAIQQVVSSGGQQVITIVTDGIQLGNLHSIPTSGIGQPIIVTMPDGQQVLTVPATDIAEETVISEEPPAKRQCIEIIENRVESAEIEVRSLLPGVLCRSHPK

SEQ ID NO: 18956 - protein, 380 aa, Artificial Sequence
  Synthetic polypeptide
GRARWLTPVIPALWEAEAGRSRGEEIETILANTMSLVDLGKKLLEAARAGQDDEVRILMANGAPFTTDWLGTSPLHLAAQYGHYSTTEVLLRAGVSRDARTKVDRTPLHMAASEGHASIVEVLLKHGADVNAKDMLKMTALHWATEHNHQEVVELLIKYGADVHTQSKFCKTAFDISIDNGNEDLAEILQIAMQNQINTNPESPDTVTIHAATPQFIIGPGGVVNLTDETGVSAVQFGNSSTSVLATLAALAEASAPLSNSSETPVATEEVVTAESVDGAIQQVVSSGGQQVITIVTDGIQLGNLHSIPTSGIGQPIIVTMPDGQQVLTVPATDIAEETVISEEPPAKRQCIEIIENRVESAEIEVRSLLPGVLCRSHPK

SEQ ID NO: 18957 - protein, 122 aa, Artificial Sequence
  Synthetic polypeptide
GRARWLTPVIPALWEAEAGRSRGEEIETILANTMSLVDLGKKLLEAARAGQDDEVRILMANGAPFTTDWLGTSPLHLAAQYGHYSTTEVLLRAGVSRDARTKVDRTPLHMAASEGHASIVEV

SEQ ID NO: 18958 - protein, 41 aa, Artificial Sequence
  Synthetic polypeptide
GRARWLTPVIPALWEAEAGRSRDVPGRFGKEAFRSGTSRSR

SEQ ID NO: 18959 - protein, 396 aa, Artificial Sequence
  Synthetic polypeptide
SQHYGRPRRADHEMSLVDLGKKLLEAARAGQDDEVRILMANGAPFTTDWLGTSPLHLAAQYGHYSTTEVLLRAGVSRDARTKVDRTPLHMAASEGHASIVEVLLKHGADVNAKDMLKMTALHWATEHNHQEVVELLIKYGADVHTQSKFCKTAFDISIDNGNEDLAEILQIAMQNQINTNPESPDTVTIHAATPQFIIGPGGVVNLTDETGVSAVQFGNSSTSVLATLAALAEASAPLSNSSETPVVATEEVVTAESVDGAIQQVVSSGGQQVITIVTDGIQLGNLHSIPTSGIGQPIIVTMPDGQQVLTVPATDIAEETVISEEPPAKRQCIEIIENRVESAEIEEREALQKQLDEANREAQKYRQQLLKKEQEAEAYRQKLEAMTRLQTNKEAV

SEQ ID NO: 18960 - protein, 25 aa, Artificial Sequence
  Synthetic polypeptide
PGAVAHACNPSTMGGRGGQITRCPW

SEQ ID NO: 18961 - protein, 408 aa, Artificial Sequence
  Synthetic polypeptide
SQHYGRPRRADHEMSLVDLGKKLLEAARAGQDDEVRILMANGAPFTTDWLGTSPLHLAAQYGHYSTTEVLLRAGVSRDARTKVDRTPLHMAASEGHASIVEVLLKHGADVNAKDMLKMTALHWATEHNHQEVVELLIKYGADVHTQSKFCKTAFDISIDNGNEDLAEILQIAMQNQINTNPESPDTVTIHAATPQFIIGPGGVVNLTGLVSSENSSKATDETGVSAVQFGNSSTSVLATLAALAEASAPLSNSSETPVVATEEVVTAESVDGAIQQVVSSGGQQVITIVTDGIQLGNLHSIPTSGIGQPIIVTMPDGQQVLTVPATDIAEETVISEEPPAKRQCIEIIENRVESAEIEEREALQKQLDEANREAQKYRQQLLKKEQEAEAYRQKLEAMTRLQTNKEAV

SEQ ID NO: 18962 - protein, 373 aa, Artificial Sequence
  Synthetic polypeptide
SQHYGRPRRADHEMSLVDLGKKLLEAARAGQDDEVRILMANGAPFTTDWLGTSPLHLAAQYGHYSTTEVLLRAGVSRDARTKVDRTPLHMAASEGHASIVEVLLKHGADVNAKDMLKMTALHWATEHNHQEVVELLIKYGADVHTQSKFCKTAFDISIDNGNEDLAEILQIAMQNQINTNPESPDTVTIHAATPQFIIGPGGVVNLTGLVSSENSSKATDETGVSAVQFGNSSTSVLATLAALAEASAPLSNSSETPVVATEEVVTAESVDGAIQQVVSSGGQQVITIVTDGIQLGNLHSIPTSGIGQPIIVTMPDGQQVLTVPATDIAEETVISEEPPAKRQCIEIIENRVESAEIEVRSLLPGVLCRSHPK

SEQ ID NO: 18963 - protein, 361 aa, Artificial Sequence
  Synthetic polypeptide
SQHYGRPRRADHEMSLVDLGKKLLEAARAGQDDEVRILMANGAPFTTDWLGTSPLHLAAQYGHYSTTEVLLRAGVSRDARTKVDRTPLHMAASEGHASIVEVLLKHGADVNAKDMLKMTALHWATEHNHQEVVELLIKYGADVHTQSKFCKTAFDISIDNGNEDLAEILQIAMQNQINTNPESPDTVTIHAATPQFIIGPGGVVNLTDETGVSAVQFGNSSTSVLATLAALAEASAPLSNSSETPVVATEEVVTAESVDGAIQQVVSSGGQQVITIVTDGIQLGNLHSIPTSGIGQPIIVTMPDGQQVLTVPATDIAEETVISEEPPAKRQCIEIIENRVESAEIEVRSLLPGVLCRSHPK

SEQ ID NO: 18964 - protein, 360 aa, Artificial Sequence
  Synthetic polypeptide
SQHYGRPRRADHEMSLVDLGKKLLEAARAGQDDEVRILMANGAPFTTDWLGTSPLHLAAQYGHYSTTEVLLRAGVSRDARTKVDRTPLHMAASEGHASIVEVLLKHGADVNAKDMLKMTALHWATEHNHQEVVELLIKYGADVHTQSKFCKTAFDISIDNGNEDLAEILQIAMQNQINTNPESPDTVTIHAATPQFIIGPGGVVNLTDETGVSAVQFGNSSTSVLATLAALAEASAPLSNSSETPVATEEVVTAESVDGAIQQVVSSGGQQVITIVTDGIQLGNLHSIPTSGIGQPIIVTMPDGQQVLTVPATDIAEETVISEEPPAKRQCIEIIENRVESAEIEVRSLLPGVLCRSHPK

SEQ ID NO: 18965 - protein, 102 aa, Artificial Sequence
  Synthetic polypeptide
SQHYGRPRRADHEMSLVDLGKKLLEAARAGQDDEVRILMANGAPFTTDWLGTSPLHLAAQYGHYSTTEVLLRAGVSRDARTKVDRTPLHMAASEGHASIVEV

SEQ ID NO: 18966 - protein, 1009 aa, Artificial Sequence
  Synthetic polypeptide
SSRYEEAEVRKKLEEKDRQEEAQRLQQKRQETGREDGGTLAKGSLENVLDSKDKTQKSNGEKNEKCETKEKGAITAKELYTMMTDKNISLIIMDARRMQDYQDSCILHSLSVPEEAISPGVTASWIEAHLPDDSKDTWKKRGNVEYVVLLDWFSSAKDLQIGTTLRSLKDALFKWESKTVLRNEPLVLEGGYENWLLCYPQYTTNAKVTPPPRRQNEEVSISLDFTYPSLEESIPSKPAAQTPPASIEVDENIELISGQNERMGPLNISTPVEPVAASKSDVSPIIQPVPSIKNVPQIDRTKKPAVKLPEEHRIKSESTNHEQQSPQSGKVIPDRSTKPVVFSPTLMLTDEEKARIHAETALLMEKNKQEKELRERQQEEQKEKLRKEEQEQKAKKKQEAEENEITEKQQKAKEEMEKKESEQAKKEDKETSAKRGKEITGVKRQSKSEHETSDAKKSVEDRGKRCPTPEIQKKSTGDVPHTSVTGDSGSGKPFKIKGQPESGILRTGTFREDTDDTERNKAQREPLTRARSEEMGRIVPGLPSGWAKFLDPITGTFRYYHSPTNTVHMYPPEMAPSSAPPSTPPTHKAKPQIPAERDREPSKLKRSYSSPDITQAIQEEEKRKPTVTPTVNRENKPTCYPKAEISRLSASQIRNLNPVFGGSGPALTGLRNLGNTCYMNSILQCLCNAPHLADYFNRNCYQDDINRSNLLGHKGEVAEEFGIIMKALWTGQYRYISPKDFKITIGKINDQFAGYSQQDSQELLLFLMDGLHEDLNKADNRKRYKEENNDHLDDFKAAEHAWQKHKQLNESIIVALFQGQFKSTVQCLTCHKKSRTFEAFMYLSLPLASTSKCTLQDCLRLFSKEEKLTDNNRFYCSHCRARRDSLKKIEIWKLPPVLLVHLKRFSYDGRWKQKLQTSVDFPLENLDLSQYVIGPKNNLKKYNLFSVSNHYGGLDGGHYTAYCKNAARQRWFKFDDHEVSDISVSSVKSSAAYILFYTSLGPRVTDVAT

SEQ ID NO: 18967 - protein, 83 aa, Artificial Sequence
  Synthetic polypeptide
YRAVDMKKLKSGKNLRKKTGRRKHSGYNKKGRKQEERMVAHWLKALWRMFWIPKTKPKRAMVKRMKNVRPKRKEQSQQRNYTQ

SEQ ID NO: 18968 - protein, 980 aa, Artificial Sequence
  Synthetic polypeptide
SSRYEEAEVRKKLEEKDRQEEAQRLQQKRQETGREDGGTLAKGSLENVLDSKDKTQKSNGEKNEKCETKEKGAITAKELYTMMTDKNISLIIMDARRMQDYQDSCILHSLSVPEEAISPGVTASWIEAHLPDDSKDTWKKRGNVEYVVLLDWFSSAKDLQIGTTLRSLKDALFKWESKTVLRNEPLVLEGGYENWLLCYPQYTTNAKVTPPPRRQNEEVSISLDFTYPSLEESIPSKPAAQTPPASIEVDENIELISGQNERMGPLNISTPVEPVAASKSDVSPIIQPVPSIKNVPQIDRTKKPAVKLPEEHRIKSESTNHEQQSPQSGKVIPDRSTKPVVFSPTLMLTDEEKARIHAETALLMEKNKQEKELRERQQEEQKEKLRKEEQEQKAKKKQEAEENEITEKQQKAKEEMEKKESEQAKKEDKETSAKRGKEITGVKRQSKSEHETSDAKKSVEDRGKRCPTPEIQKKSTGDVPHTSVTGDSGSGKAQREPLTRARSEEMGRIVPGLPSGWAKFLDPITGTFRYYHSPTNTVHMYPPEMAPSSAPPSTPPTHKAKPQIPAERDREPSKLKRSYSSPDITQAIQEEEKRKPTVTPTVNRENKPTCYPKAEISRLSASQIRNLNPVFGGSGPALTGLRNLGNTCYMNSILQCLCNAPHLADYFNRNCYQDDINRSNLLGHKGEVAEEFGIIMKALWTGQYRYISPKDFKITIGKINDQFAGYSQQDSQELLLFLMDGLHEDLNKADNRKRYKEENNDHLDDFKAAEHAWQKHKQLNESIIVALFQGQFKSTVQCLTCHKKSRTFEAFMYLSLPLASTSKCTLQDCLRLFSKEEKLTDNNRFYCSHCRARRDSLKKIEIWKLPPVLLVHLKRFSYDGRWKQKLQTSVDFPLENLDLSQYVIGPKNNLKKYNLFSVSNHYGGLDGGHYTAYCKNAARQRWFKFDDHEVSDISVSSVKSSAAYILFYTSLGPRVTDVAT

SEQ ID NO: 18969 - protein, 371 aa, Artificial Sequence
  Synthetic polypeptide
SSRYEEAEVRKKLEEKDRQEEAQRLQQKRQETGREDGGTLAKGSLENVLDSKDKTQKSNGEKNEKCETKEKGAITAKELYTMMTDKNISLIIMDARRMQDYQDSCILHSLSVPEEAISPGVTASWIEAHLPDDSKDTWKKRGNVEYVVLLDWFSSAKDLQIGTTLRSLKDALFKWESKTVLRNEPLVLEGGYENWLLCYPQYTTNAKVTPPPRRQNEEVSISLDFTYPSLEESIPSKPAAQTPPASIEVDENIELISGQNERMGPLNISTPVEPVAASKSDVSPIIQPVPSIKNVPQIDRTKKPAVKLPEEHRIKSESTNHEQQSPQSGKVIPDRSTKPVVFSPTLMLTDEEKARIHAETALLMEKNKQEK

SEQ ID NO: 18970 - protein, 26 aa, Artificial Sequence
  Synthetic polypeptide
SSRYEEAEVRKKLEEKDRQEEAQRLQ

SEQ ID NO: 18971 - protein, 28 aa, Artificial Sequence
  Synthetic polypeptide
YRAVDMKKLKSGKNLRKKTGRRKHSGYN

SEQ ID NO: 18972 - protein, 103 aa, Artificial Sequence
  Synthetic polypeptide
SQHFGRPTRVDHFRPGVRDQPGQHDMKKLKSGKNLRKKTGRRKHSGYNKKGRKQEERMVAHWLKALWRMFWIPKTKPKRAMVKRMKNVRPKRKEQSQQRNYTQ

SEQ ID NO: 18973 - protein, 34 aa, Artificial Sequence
  Synthetic polypeptide
PGVVARPCNPSTLGGRRGWITLDQEFETSLANMI

SEQ ID NO: 18974 - protein, 48 aa, Artificial Sequence
  Synthetic polypeptide
SQHFGRPTRVDHFRPGVRDQPGQHDMKKLKSGKNLRKKTGRRKHSGYN

SEQ ID NO: 18975 - protein, 98 aa, Artificial Sequence
  Synthetic polypeptide
SQLLVRLRQETPLNLEAEVAVSQDCAIHSSLVPEILDRKHFDQEGMCIYYTKFQGPSQMPSRMSNLSATRQVFLWSLGQATCLFYCKSCHEILRCEIG

SEQ ID NO: 18976 - protein, 1873 aa, Artificial Sequence
  Synthetic polypeptide
AKIAPFTPAWSQKSWIESTLTKRECVYIIPSSKDPHRCLPGCQICQQLVRCFCGRLVKQHACFTASLAMKYSDVKLGDHFNQAIEEWSVEKHTEQSPTDAYGVINFQGGSHSYRAKYVRLSYDTKPEVILQLLLKEWQMELPKLVISVHGGMQKFELHPRIKQLLGKGLIKAAVTTGAWILTGGVNTGVAKHVGDALKEHASRSSRKICTIGIAPWGVIENRNDLVGRDVVAPYQTLLNPLSKLNVLNNLHSHFILVDDGTVGKYGAEVRLRRELEKTINQQRIHARIGQGVPVVALIFEGGPNVILTVLEYLQESPPVPVVVCEGTGRAADLLAYIHKQTEEGGNLPDAAEPDIISTIKKTFNFGQNEALHLFQTLMECMKRKELITVFHIGSDEHQDIDVAILTALLKGTNASAFDQLILTLAWDRVDIAKNHVFVYGQQWLVGSLEQAMLDALVMDRVAFVKLLIENGVSMHKFLTIPRLEELYNTKQGPTNPMLFHLVRDVKQGNLPPGYKITLIDIGLVIEYLMGGTYRCTYTRKRFRLIYNSLGGNNRRSGRNTSSSTPQLRKSHESFGNRADKKEKMRHNHFIKTAQPYRPKIDTVMEEGKKKRTKDEIVDIDDPETKRFPYPLNELLIWACLMKRQVMARFLWQHGEESMAKALVACKIYRSMAYEAKQSDLVDDTSEELKQYSNDFGQLAVELLEQSFRQDETMAMKLLTYELKNWSNSTCLKLAVSSRLRPFVAHTCTQMLLSDMWMGRLNMRKNSWYKVILSILVPPAILLLEYKTKAEMSHIPQSQDAHQMTMDDSENNFQNITEEIPMEVFKEVRILDSNEGKNEMEIQMKSKKLPITRKFYAFYHAPIVKFWFNTLAYLGFLMLYTFVVLVQMEQLPSVQEWIVIAYIFTYAIEKVREIFMSEAGKVNQKIKVWFSDYFNISDTIAIISFFIGFGLRFGAKWNFANAYDNHVFVAGRLIYCLNIIFWYVRLLDFLAVNQQAGPYVMMIGKMVANMFYIVVIMALVLLSFGVPRKAILYPHEAPSWTLAKDIVFHPYWMIFGEVYAYEIDVCANDSVIPQICGPGTWLTPFLQAVYLFVQYIIMVNLLIAFFNNVYLQVKAISNIVWKYQRYHFIMAYHEKPVLPPPLIILSHIVSLFCCICKRRKKDKTSDGPKLFLTEEDQKKLHDFEEQCVEMYFNEKDDKFHSGSEERIRVTFERVEQMCIQIKEVGDRVNYIKRSLQSLDSQIGHLQDLSALTVDTLKTLTAQKASEASKVHNEITRELSISKHLAQNLIDDGPVRPSVWKKHGVVNTLSSSLPQGDLESNNPFHCNILMKDDKDPQCNIFGQDLPAVPQRKEFNFPEAGSSSGALFPSAVSPPELRQRLHGVELLKIFNKNQKLGSSSTSIPHLSSPPTKFFVSTPSQPSCKSHLETGTKDQETVCSKATEGDNTEFGAFVGHRDSMDLQRFKETSNKIKILSNNNTSENTLKRVSSLAGFTDCHRTSIPVHSKQEKISRRPSTEDTHEVDSKAALIPDWLQDRPSNREMPSEEGTLNGLTSPFKPAMDTNYYYSAVERNNLMRLSQSIPFTPVPPRGEPVTVYRLEESSPNILNNSMSSWSQLGLCAKIEFLSKEEMGGGLRRAVKVQCTWSEHDILKSGHLYIIKSFLPEVVNTWSSIYKEDTVLHLCLREIQQQRAAQKLTFAFNQMKPKSIPYSPRFLEVFLLYCHSAGQWFAVEECMTGEFRKYNNNNGDEIIPTNTLEEIMLAFSHWTYEYTRGELLVLDLQGVGENLTDPSVIKAEEKRSCDMVFGPANLGEDAIKNFRAKHHCNSCCRKLKLPDLKRNDYTPDKIIFPQDEPSDLNLQPGNSTKESESTNSVRLML

SEQ ID NO: 18977 - protein, 41 aa, Artificial Sequence
  Synthetic polypeptide
WAPVIPATREAEAGDSVELGGGGCSEPRLRHSLQPGPRNPG

SEQ ID NO: 18978 - protein, 1874 aa, Artificial Sequence
  Synthetic polypeptide
AKIAPFTPAWSQKSWIESTLTKRECVYIIPSSKDPHRCLPGCQICQQLVRCFCGRLVKQHACFTASLAMKYSDVKLGDHFNQAIEEWSVEKHTEQSPTDAYGVINFQGGSHSYRAKYVRLSYDTKPEVILQLLLKEWQMELPKLVISVHGGMQKFELHPRIKQLLGKGLIKAAVTTGAWILTGGVNTGVAKHVGDALKEHASRSSRKICTIGIAPWGVIENRNDLVGRDVVAPYQTLLNPLSKLNVLNNLHSHFILVDDGTVGKYGAEVRLRRELEKTINQQRIHARIGQGVPVVALIFEGGPNVILTVLEYLQESPPVPVVVCEGTGRAADLLAYIHKQTEEGGNLPDAAEPDIISTIKKTFNFGQNEALHLFQTLMECMKRKELITVFHIGSDEHQDIDVAILTALLKGTNASAFDQLILTLAWDRVDIAKNHVFVYGQQWLVGSLEQAMLDALVMDRVAFVKLLIENGVSMHKFLTIPRLEELYNTKQGPTNPMLFHLVRDVKQGNLPPGYKITLIDIGLVIEYLMGGTYRCTYTRKRFRLIYNSLGGNNRRSGRNTSSSTPQLRKSHESFGNRADKKEKMRHNHFIKTAQPYRPKIDTVMEEGKKKRTKDEIVDIDDPETKRFPYPLNELLIWACLMKRQVMARFLWQHGEESMAKALVACKIYRSMAYEAKQSDLVDDTSEELKQYSNDFGQLAVELLEQSFRQDETMAMKLLTYELKNWSNSTCLKLAVSSRLRPFVAHTCTQMLLSDMWMGRLNMRKNSWYKVILSILVPPAILLLEYKTKAEMSHIPQSQDAHQMTMDDSENNFQNITEEIPMEVFKEVRILDSNEGKNEMEIQMKSKKLPITRKFYAFYHAPIVKFWFNTLAYLGFLMLYTFVVLVQMEQLPSVQEWIVIAYIFTYAIEKVREIFMSEAGKVNQKIKVWFSDYFNISDTIAIISFFIGFGLRFGAKWNFANAYDNHVFVAGRLIYCLNIIFWYVRLLDFLAVNQQAGPYVMMIGKMVANMFYIVVIMALVLLSFGVPRKAILYPHEAPSWTLAKDIVFHPYWMIFGEVYAYEIDVCANDSVIPQICGPGTWLTPFLQAVYLFVQYIIMVNLLIAFFNNVYLQVKAISNIVWKYQRYHFIMAYHEKPVLPPPLIILSHIVSLFCCICKRRKKDKTSDGPKLFLTEEDQKKLHDFEEQCVEMYFNEKDDKFHSGSEERIRVTFERVEQMCIQIKEVGDRVNYIKRSLQSLDSQIGHLQDLSALTVDTLKTLTAQKASEASKVHNEITRELSISKHLAQNLIDDGPVRPSVWKKHGVVNTLSSSLPQGDLESNNPFHCNILMKDDKDPQCNIFGQDLPAVPQRKEFNFPEAGSSSGALFPSAVSPPELRQRLHGVELLKIFNKNQKLGSSSTSIPHLSSPPTKFFVSTPSQPSCKSHLETGTKDQETVCSKATEGDNTEFGAFVGHRDSMDLQRFKETSNKIKILSNNNTSENTLKRVSSLAGFTDCHRTSIPVHSKQAEKISRRPSTEDTHEVDSKAALIPDWLQDRPSNREMPSEEGTLNGLTSPFKPAMDTNYYYSAVERNNLMRLSQSIPFTPVPPRGEPVTVYRLEESSPNILNNSMSSWSQLGLCAKIEFLSKEEMGGGLRRAVKVQCTWSEHDILKSGHLYIIKSFLPEVVNTWSSIYKEDTVLHLCLREIQQQRAAQKLTFAFNQMKPKSIPYSPRFLEVFLLYCHSAGQWFAVEECMTGEFRKYNNNNGDEIIPTNTLEEIMLAFSHWTYEYTRGELLVLDLQGVGENLTDPSVIKAEEKRSCDMVFGPANLGEDAIKNFRAKHHCNSCCRKLKLPDLKRNDYTPDKIIFPQDEPSDLNLQPGNSTKESESTNSVRLML

SEQ ID NO: 18979 - protein, 21 aa, Artificial Sequence
  Synthetic polypeptide
GLTAGKPSFHRRRKINPAGTE

SEQ ID NO: 18980 - protein, 326 aa, Artificial Sequence
  Synthetic polypeptide
QQGSRVSTEEEKLIQQELSSLKATVSAPTTTLKMMKECMVRLIYCEMLGYDASFGYIHAIKLAQQGNLLEKRVGYLAVSLFLHESHELLLLLVNTVVKDLQSTNLVEVCMALTVVSQIFPCEMIPAVLPLIEDKLQHSKEIVRRKAVLALYKFHLIAPNQVQHIHIKFRKALCDRDVGVMAASLHIYLRMIKENSSGYKDLTGSFVTILKQVVGGKLPVEFNYHSVPAPWLQIQLLRILGLLGKDDQRTSELMYDVLDESLRRAELNHNVTYAILFECVHTVYSIYPKSELLEKAAKCIGKFVLSPKINLKYLGSYSGSSTPDDNN

SEQ ID NO: 18981 - protein, 14 aa, Artificial Sequence
  Synthetic polypeptide
TDSREAEFPQKKKN

SEQ ID NO: 18982 - protein, 279 aa, Artificial Sequence
  Synthetic polypeptide
QQGSRVSTEEEKLIQQELSSLKATVSAPTTTLKMMKECMVRLIYCEMLGYDASFGYIHAIKLAQQGNLLEKRVGYLAVSLFLHESHELLLLLVNTVVKDLQSTNLVEVCMALTVVSQIFPCEMIPAVLPLIEDKLQHSKEIVRRKAVLALYKFHLIAPNQVQHIHIKFRKALCDRDVGVMAASLHIYLRMIKENSSGYKDLTGSFVTILKQVVGGKLPVEFNYHSVPAPWLQIQLLRILGLLGKDDQRSSVLKRSLKNCFIGLEYYNSTANKISFKQDK

SEQ ID NO: 18983 - protein, 1095 aa, Artificial Sequence
  Synthetic polypeptide
QQGSRVSTEEEKLIQQELSSLKATVSAPTTTLKMMKECMVRLIYCEMLGYDASFGYIHAIKLAQQGNLLEKRVGYLAVSLFLHESHELLLLLVNTVVKDLQSTNLVEVCMALTVVSQIFPCEMIPAVLPLIEDKLQHSKEIVRRKAVLALYKFHLIAPNQVQHIHIKFRKALCDRDVGVMAASLHIYLRMIKENSSGYKDLTGSFVTILKQVVGGKLPVEFNYHSVPAPWLQIQLLRILGLLGKDDQRTSELMYDVLDESLRRAELNHNVTYAILFECVHTVYSIYPKSELLEKAAKCIGKFVLSPKINLKYLGLKALTYVIQQDPTLALQHQMTIIECLDHPDPIIKRETLELLYRITNAQNITVIVQKMLEYLHQSKEEYVIVNLVGKIAELAEKYAPDNAWFIQTMNAVFSVGGDVMHPDIPNNFLRLLAEGFDDETEDQQLRLYAVQSYLTLLDMENVFYPQRFLQVMSWVLGEYSYLLDKETPEEVIAKLYKLLMNDSVSSETKAWLIAAVTKLTSQAHSSNTVERLIHEFTISLDTCMRQHAFELKHLHENVELMKSLLPVDRSCEDLVVDASLSFLDGFVAEGLSQGAAPYKPPHQRQEEKLSQEKVLNFEPYGLSFSSSGFTGRQSPAGISLGSDVSGNSAETGLKETNSLKLEGIKKLWGKEGYLPKKESKTGDESGALPVPQESIMENVDQAITKKDQSQVLTQSKEEKEKQLLASSLFVGLGSESTINLLGKADTVSHKFRRKSKVKEAKSGETTSTHNMTCSSFSSLSNVAYEDDYYSNTLHDTGDKELKKFSLTSELLDSESLTELPLVEKFSYCSLSTPSLFANNNMEIFHPPQSTAASVAKESSLASSFLEETTEYIHSNAMEVCNNETISVSSYKIWKDDCLLMVWSVTNKSGLELKSADLEIFPAENFKVTEQPGCCLPVMEAESTKSFQYSVQIEKPFTEGNLTGFISYHMMDTHSAQLEFSVNLSLLDFIRPLKISSDDFGKLWLSFANDVKQNVKMSESQAALPSALKTLQQKLRLHIIEIIGNEGLLACQLLPSIPCLLHCRVHADVLALWFRSSCSTLPDYLLYQCQKVMEGS

SEQ ID NO: 18984 - protein, 51 aa, Artificial Sequence
  Synthetic polypeptide
RHFRDLRGCPSLHRLELWECRMFSGDDQRTLHGLAAQSCLKSLLPVFCSQF

SEQ ID NO: 18985 - protein, 539 aa, Artificial Sequence
  Synthetic polypeptide
SSRHWESDTKGISEISEAALLFTGSSSGSAECFQGMTSVPFMGLLPRAASSLCSLCSVLNFEPYGLSFSSSGFTGRQSPAGISLGSDVSGNSAETGLKETNSLKLEGIKKLWGKEGYLPKKESKTGDESGALPVPQESIMENVDQAITKKDQSQVLTQSKEEKEKQLLASSLFVGLGSESTINLLGKADTVSHKFRRKSKVKEAKSGETTSTHNMTCSSFSSLSNVAYEDDYYSNTLHDTGDKELKKFSLTSELLDSESLTELPLVEKFSYCSLSTPSLFANNNMEIFHPPQSTAASVAKESSLASSFLEETTEYIHSNAMEVCNNETISVSSYKIWKDDCLLMVWSVTNKSGLELKSADLEIFPAENFKVTEQPGCCLPVMEAESTKSFQYSVQIEKPFTEGNLTGFISYHMMDTHSAQLEFSVNLSLLDFIRPLKISSDDFGKLWLSFANDVKQNVKMSESQAALPSALKTLQQKLRLHIIEIIGNEGLLACQLLPSIPCLLHCRVHADVLALWFRSSCSTLPDYLLYQCQKVMEGS

SEQ ID NO: 18986 - protein, 60 aa, Artificial Sequence
  Synthetic polypeptide
PAYPSWACCPELPQVSAPCVLFSILNHMDSPFLHLASLDDSLLLAFLLVQMYLGIVLRQD

SEQ ID NO: 18987 - protein, 193 aa, Artificial Sequence
  Synthetic polypeptide
TRQMRQEKGLHLSHGPQTDELQTSVVLKERKAGQATRLTELIISVAYRTTSKRTAQTISCPLVHVPCARGITGRHTAPEGEGSLGQRPLTRWYHNRTEGARGRHQPMPSPSQRAPDPSDGGPVQQHQGHLPHRTFWTTRTSGSRRVARTQRIGWTAWSSGPKRRKRSKWKKRKNGDTWSCRKSRGKGRKGRPW

SEQ ID NO: 18988 - protein, 456 aa, Artificial Sequence
  Synthetic polypeptide
PDGTTTGLRVPGAGTNPCHHHHREPQIRVMVDLCNSTKGICLTGPSGPPGPPGAGGLPGHNGLDGQPGPQGPKGEKGANGKRGKMGIPGAAGNPGERGEKGDHGELGLQGNEGPPGQKGEKGDKGDVSNDVLLAGAKGDQGPPGPPGPPGPPGPPGPPGSRRAKGPRQPSMFNGQCPGETCAIPNDDTLVGKADEKASEHHSPQAESMITSIGNPVQVLKVTETFGTWIRESANKSDDRIWVTEHFSGIMVKEFKDQPSLLNGSYTFIHLPYYFHGCGHVVYNNSLYYHKGGSNTLVRFEFGQETSQTLKLENALYFDRKYLFANSKTYFNLAVDEKGLWIIYASSVDGSSILVAQLDERTFSVVQHVNTTYPKSKAGNAFIARGILYVTDTKDMRVTFAFDLLGGKQINANFDLRTSQSVLAMLAYNMRDQHLYSWEDGHLMLYPVQFLSTTLNQ

SEQ ID NO: 18989 - protein, 20 aa, Artificial Sequence
  Synthetic polypeptide
GCPGQAPTHAITITESPRSE

SEQ ID NO: 18990 - protein, 184 aa, Artificial Sequence
  Synthetic polypeptide
PDGTTTGLRVPGAGTNPCHHHHREPQIRVMVDLCNSTKGICLTGPSGPPGPPGAGGLPGHNGLDGQPGPQGPKGEKGANGKRGKMGIPGAAGNPGERGEKGDHGELGLQGNEGPPGQKGEKGDKGDVSNDVLLAGAKGDQGPPGPPGPPGPPGPPGPPGSRRAKGPRQPSMFNGQCPGETCAIP

SEQ ID NO: 18991 - protein, 14 aa, Artificial Sequence
  Synthetic polypeptide
VNEFFHLFRKRYIR

SEQ ID NO: 18992 - protein, 1486 aa, Artificial Sequence
  Synthetic polypeptide
MSSSICSGRDTLDECGLRYLLAMRLHTCLLTSLPPLYRVQLLHQGVSTCHFAWAFHSEAEEELINMIPAIQRGDPQWSELRAMGIGWWVRNINTLRRCIEKVAKASFQRNNDALDAALFYLSMKKKAVVWGLFRSQHDEKMTTFFSHNFNEDRWRKAALKNAFSLLGKQRFEQSAAFFLLAGSLKDAIEVCLEKMEDIQLAMVIARLYESEFETSSTYISILNQKILGCQKDGSGFSCKRLHPDPFLRSLAYWVMKDYTRALDTLLEQTPKEDDEHQVIIKSCNPVAFSFYNYLRTHPLLIRRNLASPEGTLATLGLKTEKNFVDKINLIERKLFFTTANAHFKVGCPVLALEVLSKIPKVTKTSALSAKKDQPDFISHRMDDVPSHSKALSDGNGSSGIEWSNVTSSQYDWSQPIVKVDEEPLNLDWGEDHDSALDEEEDDAVGLVMKSTDAREKDKQSDQKASDPNMLLTPQEEDDPEGDTEVDVIAEQLKFRACLKILMTELRTLATGYEVDGGKLRFQLYNWLEKEIAALHEICNHESVIKEYSSKTYSKVESDLLDQEEMVDKPDIGSYERHQIERRRLQAKREHAERRKSWLQKNQDLLRVFLSYCSLHGAQGGGLASVRMELKFLLQESQQETTVKQLQSPLPLPTTLPLLSASIASTKTVIANPVLYLNNHIHDILYTIVQMKTPPHPSIEDVKVHTLHSLAASLSASIYQALCDSHSYSQTEGNQFTGMAYQGLLLSDRRRLRTESIEEHATPNSSPAQWPGVSSLINLLSSAQDEDQPKLNILLCEAVVAVYLSLLIHALATNSSSELFRLAAHPLNNRMWAAVFGGGVKLVVKPRRQSENISAPPVLSEDIDKHRRRFNMRMLVPGRPVKDATPPPVPAERPSYKEKFIPPELSMWDYFVAKPFLPLSDSGVIYDSDESIHSDEEDDAFFSDTQIQEHQDPNSYSWALLHLTMVKLALHNVKNFFPIAGLEFSELPVTSPLGIAVIKNLENWEQILQEKMDQFEGPPPNYINTYPTDLSVGAGPAILRNKAMLEPENTPFKSRDSSAFPVKRLWHFLVKQEVLQETFIRYIFTKKRKQSEVEADLGYPGGKAKVIHKESDMIMAFSVNKANCNEIVLASTHDVQELDVTSLLACQSYIWIGEEYDRESKSSDDVDYRGSTTTLYQPSATSYSASQVHPPSSLPWLGTGQTSTGASVLMKRNLHNVKRMTSHPVHQYYLTGAQDGSVRMFEWTRPQQLVCFRQAGNARVTRLYFNSQGNKCGVADGEGFLSIWQVNQTASNPKPYMSWQCHSKATSDFAFITSSSLVATSGHSNDNRNVCLWDTLISPGNSLIHGFTCHDHGATVLQYAPKQQLLISGGRKGHVCIFDIRQRQLIHTFQAHDSAIKALALDPYEEYFTTGSAEGNIKVWRLTGHGLIHSFKSEHAKQSIFRNIGAGVMQIDIIQGNRLFSCGADGTLKTRVLPNAFNIPNRILDIL

SEQ ID NO: 18993 - protein, 10 aa, Artificial Sequence
  Synthetic polypeptide
VLPFVQEEIH

SEQ ID NO: 18994 - protein, 1487 aa, Artificial Sequence
  Synthetic polypeptide
MSSSICSGRDTLDECGLRYLLAMRLHTCLLTSLPPLYRVQLLHQGVSTCHFAWAFHSEAEEELINMIPAIQRGDPQWSELRAMGIGWWVRNINTLRRCIEKVAKASFQRNNDALDAALFYLSMKKKAVVWGLFRSQHDEKMTTFFSHNFNEDRWRKAALKNAFSLLGKQRFEQSAAFFLLAGSLKDAIEVCLEKMEDIQLAMVIARLYESEFETSSTYISILNQKILGCQKDGSGFSCKRLHPDPFLRSLAYWVMKDYTRALDTLLEQTPKEDDEHQVIIKSCNPVAFSFYNYLRTHPLLIRRNLASPEGTLATLGLKTEKNFVDKINLIERKLFFTTANAHFKVGCPVLALEVLSKIPKVTKTSALSAKKDQPDFISHRMDDVPSHSKALSDGNGSSGIEWSNVTSSQYDWSQPIVKVDEEPLNLDWGEDHDSALDEEEDDAVGLVMKSTDAREKDKQSDQKASDPNMLLTPQEEDDPEGDTEVDVIAEQLKFRACLKILMTELRTLATGYEVDGGKLRFQLYNWLEKEIAALHEICNHESVIKEYSSKTYSKVESDLLDQEEMVDKPDIGSYERHQIERRRLQAKREHAERRKSWLQKNQDLLRVFLSYCSLHGAQGGGLASVRMELKFLLQESQQETTVKQLQSPLPLPTTLPLLSASIASTKTVIANPVLYLNNHIHDILYTIVQMKTPPHPSIEDVKVHTLHSLAASLSASIYQALCDSHSYSSQTEGNQFTGMAYQGLLLSDRRRLRTESIEEHATPNSSPAQWPGVSSLINLLSSAQDEDQPKLNILLCEAVVAVYLSLLIHALATNSSSELFRLAAHPLNNRMWAAVFGGGVKLVVKPRRQSENISAPPVLSEDIDKHRRRFNMRMLVPGRPVKDATPPPVPAERPSYKEKFIPPELSMWDYFVAKPFLPLSDSGVIYDSDESIHSDEEDDAFFSDTQIQEHQDPNSYSWALLHLTMVKLALHNVKNFFPIAGLEFSELPVTSPLGIAVIKNLENWEQILQEKMDQFEGPPPNYINTYPTDLSVGAGPAILRNKAMLEPENTPFKSRDSSAFPVKRLWHFLVKQEVLQETFIRYIFTKKRKQSEVEADLGYPGGKAKVIHKESDMIMAFSVNKANCNEIVLASTHDVQELDVTSLLACQSYIWIGEEYDRESKSSDDVDYRGSTTTLYQPSATSYSASQVHPPSSLPWLGTGQTSTGASVLMKRNLHNVKRMTSHPVHQYYLTGAQDGSVRMFEWTRPQQLVCFRQAGNARVTRLYFNSQGNKCGVADGEGFLSIWQVNQTASNPKPYMSWQCHSKATSDFAFITSSSLVATSGHSNDNRNVCLWDTLISPGNSLIHGFTCHDHGATVLQYAPKQQLLISGGRKGHVCIFDIRQRQLIHTFQAHDSAIKALALDPYEEYFTTGSAEGNIKVWRLTGHGLIHSFKSEHAKQSIFRNIGAGVMQIDIIQGNRLFSCGADGTLKTRVLPNAFNIPNRILDIL

SEQ ID NO: 18995 - protein, 268 aa, Artificial Sequence
  Synthetic polypeptide
GRAWCRISVIPVPWEAEVENTIRWRIRRDEEGNEIKESNARIVKWSDGSMSLHLGNEVFDVYKAPLQGDHNHLFIRQGTGLQGQAVFKTKLTFRPHSTDSATHRKMTLSLADRCSKTQKIRILPMAGRDPECQRTEMIKKEEERLRASIRRESQQRRMREKQHQRGLSASYLEPDRYDEEEEGEESISLAAIKNRYKGGIREERARIYSSDSDEGSEEDKAQRLLKAKKLTSDEEGEPSGKRKAEDDDKANKKHKKYVISDEEEEDDD

SEQ ID NO: 18996 - protein, 8 aa, Artificial Sequence
  Synthetic polypeptide
FQYLGRPR

SEQ ID NO: 18997 - protein, 28 aa, Artificial Sequence
  Synthetic polypeptide
PGMVPHICNSSTLGGRGRKYYKMEDTPR

SEQ ID NO: 18998 - protein, 25 aa, Artificial Sequence
  Synthetic polypeptide
GRARWLMTVIPALWEAEAVCQGLDT

SEQ ID NO: 18999 - protein, 1855 aa, Artificial Sequence
  Synthetic polypeptide
SQHFGRLRQFARVWIPDPEEVWKSAELLKDYKPGDKVLLLHLEEGKDLEYHLDPKTKELPHLRNPDILVGENDLTALSYLHEPAVLHNLRVRFIDSKLIYTYCGIVLVAINPYEQLPIYGEDIINAYSGQNMGDMDPHIFAVAEEAYKQMARDERNQSIIVSGESGAGKTVSAKYAMRYFATVSGSASEANVEEKVLASNPIMESIGNAKTTRNDNSSRFGKYIEIGFDKRYRIIGANMRTYLLEKSRVVFQAEEERNYHIFYQLCASAKLPEFKMLRLGNADNFNYTKQGGSPVIEGVDDAKEMAHTRQACTLLGISESHQMGIFRILAGILHLGNVGFTSRDADSCTIPPKHEPLCIFCELMGVDYEEMCHWLCHRKLATATETYIKPISKLQATNARDALAKHIYAKLFNWIVDNVNQALHSAVKQHSFIGVLDIYGFETFEINSFEQFCINYANEKLQQQFNMHVFKLEQEEYMKEQIPWTLIDFYDNQPCINLIESKLGILDLLDEECKMPKGTDDTWAQKLYNTHLNKCALFEKPRLSNKAFIIQHFADKVEYQCEGFLEKNKDTVFEEQIKVLKSSKFKMLPELFQDDEKAISPTSATSSGRTPLTRTPAKPTKGRPGQMAKEHKKTVGHQFRNSLHLLMETLNATTPHYVRCIKPNDFKFPFTFDEKRAVQQLRACGVLETIRISAAGFPSRWTYQEFFSRYRVLMKQKDVLSDRKQTCKNVLEKLILDKDKYQFGKTKIFFRAGQVAYLEKLRADKLRAACIRIQKTIRGWLLRKKYLRMRKAAITMQRYVRGYQARCYAKFLRRTKAATIIQKYWRMYVVRRRYKIRRAATIVLQSYLRGFLARNRYRKILREHKAVIIQKRVRGWLARTHYKRSMHAIIYLQCCFRRMMAKRELKKLKIEARSVERYKKLHIGMENKIMQLQRKVDEQNKDYKCLVEKLTNLEGIYNSETEKLRSDLERLQLSEEEAKVATGRVLSLQEEIAKLRKDLEQTRSEKKCIEEHADRYKQETEQLVSNLKEENTLLKQEKEALNHRIVQQAKEMTETMEKKLVEETKQLELDLNDERLRYQNLLNEFSRLEERYDDLKEEMTLMVHVPKPGHKRTDSTHSSNESEYIFSSEIAEMEDIPSRTEEPSEKKVPLDMSLFLKLQKRVTELEQEKQVMQDELDRKEEQVLRSKAKEEERPQIRGAELEYESLKRQELESENKKLKNELNELRKALSEKSAPEVTAPGAPAYRVLMEQLTSVSEELDVRKEEVLILRSQLVSQKEAIQPKDDKNTMTDSTILLEDVQKMKDKGEIAQAYIGLKETNRSSALDYHELNEDGELWLVYEGLKQANRLLESQLQSQKRSHENEAEALRGEIQSLKEENNRQQQLLAQNLQLPPEARIEASLQHEITRLTNENLDLMEQLEKQDKTVRKLKKQLKVFAKKIGELEVGQMENISPGQIIDEPIRPVNIPRKEKDFQGMLEYKKEDEQKLVKNLILELKPRGVAVNLIPGLPAYILFMCVRHADYLNDDQKVRSLLTSTINSIKKVLKKRGDDFETVSFWLSNTCRFLHCLKQYSGEEGFMKHNTSRQNEHCLTNFDLAEYRQVLSDLAIQIYQQLVRVLENILQPMIVSGMLEHETIQGVSGVKPTGLRKRTSSIADEGTYTLDSILRQLNSFHSVMCQHGMDPELIKQVVKQMFYIIGAITLNNLLLRKDMCSWSKGMQIRYNVSQLEEWLRDKNLMNSGAKETLEPLIQAAQLLQVKKKTDDDAEAICSMCNALTTAQIVKVLNLYTPVNEFEERVSVSFIRTIQMRLRDRKDSPQLLMDAKHIFPVTFPFNPSSLALETIQIPASLGLGFISRV

SEQ ID NO: 19000 - protein, 44 aa, Artificial Sequence
  Synthetic polypeptide
GSLPGFGYLIQRKSGSQQSCSKIISQEIKSSCFTSRKERIWNTI

SEQ ID NO: 19001 - protein, 1828 aa, Artificial Sequence
  Synthetic polypeptide
SQHFGRLRQFARVWIPDPEEVWKSAELLKDYKPGDKVLLLHLEEGKDLEYHLDPKTKELPHLRNPDILVGENDLTALSYLHEPAVLHNLRVRFIDSKLIYTYCGIVLVAINPYEQLPIYGEDIINAYSGQNMGDMDPHIFAVAEEAYKQMARDERNQSIIVSGESGAGKTVSAKYAMRYFATVSGSASEANVEEKVLASNPIMESIGNAKTTRNDNSSRFGKYIEIGFDKRYRIIGANMRTYLLEKSRVVFQAEEERNYHIFYQLCASAKLPEFKMLRLGNADNFNYTKQGGSPVIEGVDDAKEMAHTRQACTLLGISESHQMGIFRILAGILHLGNVGFTSRDADSCTIPPKHEPLCIFCELMGVDYEEMCHWLCHRKLATATETYIKPISKLQATNARDALAKHIYAKLFNWIVDNVNQALHSAVKQHSFIGVLDIYGFETFEINSFEQFCINYANEKLQQQFNMHVFKLEQEEYMKEQIPWTLIDFYDNQPCINLIESKLGILDLLDEECKMPKGTDDTWAQKLYNTHLNKCALFEKPRLSNKAFIIQHFADKVEYQCEGFLEKNKDTVFEEQIKVLKSSKFKMLPELFQDDEKAISPTSATSSGRTPLTRTPAKPTKGRPGQMAKEHKKTVGHQFRNSLHLLMETLNATTPHYVRCIKPNDFKFPFTFDEKRAVQQLRACGVLETIRISAAGFPSRWTYQEFFSRYRVLMKQKDVLSDRKQTCKNVLEKLILDKDKYQFGKTKIFFRAGQVAYLEKLRADKLRAACIRIQKTIRGWLLRKKYLRMRKAAITMQRYVRGYQARCYAKFLRRTKAATIIQKYWRMYVVRRRYKIRRAATIVLQSYLRGFLARNRYRKILREHKAVIIQKRVRGWLARTHYKRSMHAIIYLQCCFRRMMAKRELKKLKIEARSVERYKKLHIGMENKIMQLQRKVDEQNKDYKCLVEKLTNLEGIYNSETEKLRSDLERLQLSEEEAKVATGRVLSLQEEIAKLRKDLEQTRSEKKCIEEHADRYKQETEQLVSNLKEENTLLKQEKEALNHRIVQQAKEMTETMEKKLVEETKQLELDLNDERLRYQNLLNEFSRLEERYDDLKEEMTLMVHVPKPGHKRTDSTHSSNESEYIFSSEIAEMEDIPSRTEEPSEKKVPLDMSLFLKLQKRVTELEQEKQVMQDELDRKEEQVLRSKAKEEERPQIRGAELEYESLKRQELESENKKLKNELNELRKALSEKSAPEVTAPGAPAYRVLMEQLTSVSEELDVRKEEVLILRSQLVSQKEAIQPKDDKNTMTDSTILLEDVQKMKDKGEIAQAYIGLKETNRLLESQLQSQKRSHENEAEALRGEIQSLKEENNRQQQLLAQNLQLPPEARIEASLQHEITRLTNENLDLMEQLEKQDKTVRKLKKQLKVFAKKIGELEVGQMENISPGQIIDEPIRPVNIPRKEKDFQGMLEYKKEDEQKLVKNLILELKPRGVAVNLIPGLPAYILFMCVRHADYLNDDQKVRSLLTSTINSIKKVLKKRGDDFETVSFWLSNTCRFLHCLKQYSGEEGFMKHNTSRQNEHCLTNFDLAEYRQVLSDLAIQIYQQLVRVLENILQPMIVSGMLEHETIQGVSGVKPTGLRKRTSSIADEGTYTLDSILRQLNSFHSVMCQHGMDPELIKQVVKQMFYIIGAITLNNLLLRKDMCSWSKGMQIRYNVSQLEEWLRDKNLMNSGAKETLEPLIQAAQLLQVKKKTDDDAEAICSMCNALTTAQIVKVLNLYTPVNEFEERVSVSFIRTIQMRLRDRKDSPQLLMDAKHIFPVTFPFNPSSLALETIQIPASLGLGFISRV

SEQ ID NO: 19002 - protein, 1880 aa, Artificial Sequence
  Synthetic polypeptide
SQHFGRLRQFARVWIPDPEEVWKSAELLKDYKPGDKVLLLHLEEGKDLEYHLDPKTKELPHLRNPDILVGENDLTALSYLHEPAVLHNLRVRFIDSKLIYTYCGIVLVAINPYEQLPIYGEDIINAYSGQNMGDMDPHIFAVAEEAYKQMARDERNQSIIVSGESGAGKTVSAKYAMRYFATVSGSASEANVEEKVLASNPIMESIGNAKTTRNDNSSRFGKYIEIGFDKRYRIIGANMRTYLLEKSRVVFQAEEERNYHIFYQLCASAKLPEFKMLRLGNADNFNYTKQGGSPVIEGVDDAKEMAHTRQACTLLGISESHQMGIFRILAGILHLGNVGFTSRDADSCTIPPKHEPLCIFCELMGVDYEEMCHWLCHRKLATATETYIKPISKLQATNARDALAKHIYAKLFNWIVDNVNQALHSAVKQHSFIGVLDIYGFETFEINSFEQFCINYANEKLQQQFNMHVFKLEQEEYMKEQIPWTLIDFYDNQPCINLIESKLGILDLLDEECKMPKGTDDTWAQKLYNTHLNKCALFEKPRLSNKAFIIQHFADKVEYQCEGFLEKNKDTVFEEQIKVLKSSKFKMLPELFQDDEKAISPTSATSSGRTPLTRTPAKPTKGRPGQMAKEHKKTVGHQFRNSLHLLMETLNATTPHYVRCIKPNDFKFPFTFDEKRAVQQLRACGVLETIRISAAGFPSRWTYQEFFSRYRVLMKQKDVLSDRKQTCKNVLEKLILDKDKYQFGKTKIFFRAGQVAYLEKLRADKLRAACIRIQKTIRGWLLRKKYLRMRKAAITMQRYVRGYQARCYAKFLRRTKAATIIQKYWRMYVVRRRYKIRRAATIVLQSYLRGFLARNRYRKILREHKAVIIQKRVRGWLARTHYKRSMHAIIYLQCCFRRMMAKRELKKLKIEARSVERYKKLHIGMENKIMQLQRKVDEQNKDYKCLVEKLTNLEGIYNSETEKLRSDLERLQLSEEEAKVATGRVLSLQEEIAKLRKDLEQTRSEKKCIEEHADRYKQETEQLVSNLKEENTLLKQEKEALNHRIVQQAKEMTETMEKKLVEETKQLELDLNDERLRYQNLLNEFSRLEERYDDLKEEMTLMVHVPKPGHKRTDSTHSSNESEYIFSSEIAEMEDIPSRTEEPSEKKVPLDMSLFLKLQKRVTELEQEKQVMQDELDRKEEQVLRSKAKEEERPQIRGAELEYESLKRQELESENKKLKNELNELRKALSEKSAPEVTAPGAPAYRVLMEQLTSVSEELDVRKEEVLILRSQLVSQKEAIQPKLHENTMTDSTILLEDVQKMKDKGEIAQAYIGLKETNRSSALDYHELNEDGELWLVYEGLKQANRLLESQLQSQKRSHENEAEALRGEIQSLKEENNRQQQLLAQNLQLPPEARIEASLQHEITRLTNENLYFEELYADDPKKYQSYRISLYKRMIDLMEQLEKQDKTVRKLKKQLKVFAKKIGELEVGQMENISPGQIIDEPIRPVNIPRKEKDFQGMLEYKKEDEQKLVKNLILELKPRGVAVNLIPGLPAYILFMCVRHADYLNDDQKVRSLLTSTINSIKKVLKKRGDDFETVSFWLSNTCRFLHCLKQYSGEEGFMKHNTSRQNEHCLTNFDLAEYRQVLSDLAIQIYQQLVRVLENILQPMIVSGMLEHETIQGVSGVKPTGLRKRTSSIADEGTYTLDSILRQLNSFHSVMCQHGMDPELIKQVVKQMFYIIGAITLNNLLLRKDMCSWSKGMQIRYNVSQLEEWLRDKNLMNSGAKETLEPLIQAAQLLQVKKKTDDDAEAICSMCNALTTAQIVKVLNLYTPVNEFEERVSVSFIRTIQMRLRDRKDSPQLLMDAKHIFPVTFPFNPSSLALETIQIPASLGLGFISRV

SEQ ID NO: 19003 - protein, 1852 aa, Artificial Sequence
  Synthetic polypeptide
SQHFGRLRQFARVWIPDPEEVWKSAELLKDYKPGDKVLLLHLEEGKDLEYHLDPKTKELPHLRNPDILVGENDLTALSYLHEPAVLHNLRVRFIDSKLIYTYCGIVLVAINPYEQLPIYGEDIINAYSGQNMGDMDPHIFAVAEEAYKQMARDERNQSIIVSGESGAGKTVSAKYAMRYFATVSGSASEANVEEKVLASNPIMESIGNAKTTRNDNSSRFGKYIEIGFDKRYRIIGANMRTYLLEKSRVVFQAEEERNYHIFYQLCASAKLPEFKMLRLGNADNFNYTKQGGSPVIEGVDDAKEMAHTRQACTLLGISESHQMGIFRILAGILHLGNVGFTSRDADSCTIPPKHEPLCIFCELMGVDYEEMCHWLCHRKLATATETYIKPISKLQATNARDALAKHIYAKLFNWIVDNVNQALHSAVKQHSFIGVLDIYGFETFEINSFEQFCINYANEKLQQQFNMHVFKLEQEEYMKEQIPWTLIDFYDNQPCINLIESKLGILDLLDEECKMPKGTDDTWAQKLYNTHLNKCALFEKPRLSNKAFIIQHFADKVEYQCEGFLEKNKDTVFEEQIKVLKSSKFKMLPELFQDDEKAISPTSATSSGRTPLTRTPAKPTKGRPGQMAKEHKKTVGHQFRNSLHLLMETLNATTPHYVRCIKPNDFKFPFTFDEKRAVQQLRACGVLETIRISAAGFPSRWTYQEFFSRYRVLMKQKDVLSDRKQTCKNVLEKLILDKDKYQFGKTKIFFRAGQVAYLEKLRADKLRAACIRIQKTIRGWLLRKKYLRMRKAAITMQRYVRGYQARCYAKFLRRTKAATIIQKYWRMYVVRRRYKIRRAATIVLQSYLRGFLARNRYRKILREHKAVIIQKRVRGWLARTHYKRSMHAIIYLQCCFRRMMAKRELKKLKIEARSVERYKKLHIGMENKIMQLQRKVDEQNKDYKCLVEKLTNLEGIYNSETEKLRSDLERLQLSEEEAKVATGRVLSLQEEIAKLRKDLEQTRSEKKCIEEHADRYKQETEQLVSNLKEENTLLKQEKEALNHRIVQQAKEMTETMEKKLVEETKQLELDLNDERLRYQNLLNEFSRLEERYDDLKEEMTLMVHVPKPGHKRTDSTHSSNESEYIFSSEIAEMEDIPSRTEEPSEKKVPLDMSLFLKLQKRVTELEQEKQVMQDELDRKEEQVLRSKAKEEERPQIRGAELEYESLKRQELESENKKLKNELNELRKALSEKSAPEVTAPGAPAYRVLMEQLTSVSEELDVRKEEVLILRSQLVSQKEAIQPKNTMTDSTILLEDVQKMKDKGEIAQAYIGLKETNRSSALDYHELNEDGELWLVYEGLKQANRLLESQLQSQKRSHENEAEALRGEIQSLKEENNRQQQLLAQNLQLPPEARIEASLQHEITRLTNENLDLMEQLEKQDKTVRKLKKQLKVFAKKIGELEVGQMENISPGQIIDEPIRPVNIPRKEKDFQGMLEYKKEDEQKLVKNLILELKPRGVAVNLIPGLPAYILFMCVRHADYLNDDQKVRSLLTSTINSIKKVLKKRGDDFETVSFWLSNTCRFLHCLKQYSGEEGFMKHNTSRQNEHCLTNFDLAEYRQVLSDLAIQIYQQLVRVLENILQPMIVSGMLEHETIQGVSGVKPTGLRKRTSSIADEGTYTLDSILRQLNSFHSVMCQHGMDPELIKQVVKQMFYIIGAITLNNLLLRKDMCSWSKGMQIRYNVSQLEEWLRDKNLMNSGAKETLEPLIQAAQLLQVKKKTDDDAEAICSMCNALTTAQIVKVLNLYTPVNEFEERVSVSFIRTIQMRLRDRKDSPQLLMDAKHIFPVTFPFNPSSLALETIQIPASLGLGFISRV

SEQ ID NO: 19004 - protein, 1853 aa, Artificial Sequence
  Synthetic polypeptide
SQHFGRLRQFARVWIPDPEEVWKSAELLKDYKPGDKVLLLHLEEGKDLEYHLDPKTKELPHLRNPDILVGENDLTALSYLHEPAVLHNLRVRFIDSKLIYTYCGIVLVAINPYEQLPIYGEDIINAYSGQNMGDMDPHIFAVAEEAYKQMARDERNQSIIVSGESGAGKTVSAKYAMRYFATVSGSASEANVEEKVLASNPIMESIGNAKTTRNDNSSRFGKYIEIGFDKRYRIIGANMRTYLLEKSRVVFQAEEERNYHIFYQLCASAKLPEFKMLRLGNADNFNYTKQGGSPVIEGVDDAKEMAHTRQACTLLGISESHQMGIFRILAGILHLGNVGFTSRDADSCTIPPKHEPLCIFCELMGVDYEEMCHWLCHRKLATATETYIKPISKLQATNARDALAKHIYAKLFNWIVDNVNQALHSAVKQHSFIGVLDIYGFETFEINSFEQFCINYANEKLQQQFNMHVFKLEQEEYMKEQIPWTLIDFYDNQPCINLIESKLGILDLLDEECKMPKGTDDTWAQKLYNTHLNKCALFEKPRLSNKAFIIQHFADKVEYQCEGFLEKNKDTVFEEQIKVLKSSKFKMLPELFQDDEKAISPTSATSSGRTPLTRTPAKPTKGRPGQMAKEHKKTVGHQFRNSLHLLMETLNATTPHYVRCIKPNDFKFPFTFDEKRAVQQLRACGVLETIRISAAGFPSRWTYQEFFSRYRVLMKQKDVLSDRKQTCKNVLEKLILDKDKYQFGKTKIFFRAGQVAYLEKLRADKLRAACIRIQKTIRGWLLRKKYLRMRKAAITMQRYVRGYQARCYAKFLRRTKAATIIQKYWRMYVVRRRYKIRRAATIVLQSYLRGFLARNRYRKILREHKAVIIQKRVRGWLARTHYKRSMHAIIYLQCCFRRMMAKRELKKLKIEARSVERYKKLHIGMENKIMQLQRKVDEQNKDYKCLVEKLTNLEGIYNSETEKLRSDLERLQLSEEEAKVATGRVLSLQEEIAKLRKDLEQTRSEKKCIEEHADRYKQETEQLVSNLKEENTLLKQEKEALNHRIVQQAKEMTETMEKKLVEETKQLELDLNDERLRYQNLLNEFSRLEERYDDLKEEMTLMVHVPKPGHKRTDSTHSSNESEYIFSSEIAEMEDIPSRTEEPSEKKVPLDMSLFLKLQKRVTELEQEKQVMQDELDRKEEQVLRSKAKEEERPQIRGAELEYESLKRQELESENKKLKNELNELRKALSEKSAPEVTAPGAPAYRVLMEQLTSVSEELDVRKEEVLILRSQLVSQKEAIQPKDDKNTMTDSTILLEDVQKMKDKGEIAQAYIGLKETNRLLESQLQSQKRSHENEAEALRGEIQSLKEENNRQQQLLAQNLQLPPEARIEASLQHEITRLTNENLYFEELYADDPKKYQSYRISLYKRMIDLMEQLEKQDKTVRKLKKQLKVFAKKIGELEVGQMENISPGQIIDEPIRPVNIPRKEKDFQGMLEYKKEDEQKLVKNLILELKPRGVAVNLIPGLPAYILFMCVRHADYLNDDQKVRSLLTSTINSIKKVLKKRGDDFETVSFWLSNTCRFLHCLKQYSGEEGFMKHNTSRQNEHCLTNFDLAEYRQVLSDLAIQIYQQLVRVLENILQPMIVSGMLEHETIQGVSGVKPTGLRKRTSSIADEGTYTLDSILRQLNSFHSVMCQHGMDPELIKQVVKQMFYIIGAITLNNLLLRKDMCSWSKGMQIRYNVSQLEEWLRDKNLMNSGAKETLEPLIQAAQLLQVKKKTDDDAEAICSMCNALTTAQIVKVLNLYTPVNEFEERVSVSFIRTIQMRLRDRKDSPQLLMDAKHIFPVTFPFNPSSLALETIQIPASLGLGFISRV

SEQ ID NO: 19005 - protein, 47 aa, Artificial Sequence
  Synthetic polypeptide
SQHFGRLRQFARVWIPDPEEVWKSAELLKDYKPGDKVLLLHLEEGKV

SEQ ID NO: 19006 - protein, 40 aa, Artificial Sequence
  Synthetic polypeptide
GSLPGFGYLIQRKSGSQQSCSKIISQEIKSSCFTSRKERY

SEQ ID NO: 19007 - protein, 35 aa, Artificial Sequence
  Synthetic polypeptide
SPLIHGFLSMVSVTHGQPGHKIEDYTETFKCVAKT

SEQ ID NO: 19008 - protein, 27 aa, Artificial Sequence
  Synthetic polypeptide
VVAPYPRFPFHGFSYSWSTRSQNRGLH

SEQ ID NO: 19009 - protein, 1077 aa, Artificial Sequence
  Synthetic polypeptide
DQPDQHDTLDEYFEYDAEEFLVSLALLITEGRTPECSVKGRTESFHCPPAQSCYPVTTKHECSDKLAQCRQARRTRSEVTLLWKNNLPIMVEMMLLPDCCYSDDGPTTEGIDLNDPAIKQDALLLERWILEPVPRQNGDRFIEEKTLLLAVRSFVFFSQLSAWLSVSHGAIPRNILYRISAADVDLQWNFSQTPIEHVFPVPNVSHNVALKVSVQSLPRQSNYPVLTCSIHTNIGLYEKRIQQHKLKTHQHHNPNEAEQCGTNSSQRLCSKQTWTMAPESVLHAKSGPSPEYTAAVKNIKLYPGTGSKSDHGTSQANILGFSGIGDIKSQETSVRTLKSFSMVDSSISNRQSFWQSAGETNPLIGSLIQERQEIIARIAQHLIHCDPSTSHVSGRPFNTQESSSLHSKLFRVSQENENVGKGKEAFSMTFGSPEFSSPEDTNEGKIRLKPETPRSETCISNDFYSHMPVGETNPLIGSLLQERQDVIARIAQHLEHIDPTASHIPRQSFNMHDSSSVASKVFRSSYEDKNLLKKNKDESSVSISHTKCSLLGDISDGKNLVPNKCFTSFKNNSKEKCSLKHQTRNQCQNNPSEIIQSTYQETQNKSSSLSTSSILSQHKENNLDLTSRFKEQEMSNGIDKQYSNCTTIDKQICTNKYKEKIINENYNPKFFGNLQSDDSKKNDSKIKVTVLEMSEYLNKYESMSSNKDSKRPKTCEQNTQLNSIENYLNKDNEGFKCKKSDQLKNEQDKQEDPTNEKSQNYSQRRSIKDCLSTCEQPKNTEVLRTTLKHSNVWRKHNFHSLDGTSTRAFHPQTGLPLLSSPVPQRKTQSGCFDLDSSLLHLKSFSSRSPRPCLNIEDDPDIHEKPFLSSSAPPITSLSLLGNFEESVLNYRFDPLGIVDGFTAEVGASGAFCPTHLTLPVEVSFYSVSDDNAPSPYMGVITLESLGKRGYRVPPSGTIQVTLFNPNKTVVKMFVVIYDLRDMPANHQTFLRQRTFSVPVKQEVKRSVNKENIRHTEERLLRYLIHLRFQSSKSGKIYLHRDVRLLFSRKSMEVDSGAAYELKSYTESPTNPQFSPRC

SEQ ID NO: 19010 - protein, 29 aa, Artificial Sequence
  Synthetic polypeptide
EFETSLTNMILWMNILNMMQRSSWSLWPC

SEQ ID NO: 19011 - protein, 964 aa, Artificial Sequence
  Synthetic polypeptide
DQPDQHDTLDEYFEYDAEEFLVSLALLITEGRTPECSVKGRTESFHCPPAQSCYPVTTKHECSDKLAQCRQARRTRSEVTLLWKNNLPIMVEMMLLPDCCYSDDGPTTEGIDLNDPAIKQDALLLERWILEPVPRQNGDRFIEEKTLLLAVRSFVFFSQLSAWLSVSHGAIPRNILYRISAADVDLQWNFSQTPIEHVFPVPNVSHNVALKVSVQSLPRQSNYPVLTCSIHTNIGLYEKRIQQHKLKTHQHHNPNEAEQCGTNSSQRLCSKQTWTMAPESVLHAKSGPSPEYTAAVKNIKLYPGTGSKSDHGTSQANILGFSGIGDIKSQETSVRTLKSFSMVDSSISNRQSFWQSAGETNPLIGSLIQERQEIIARIAQHLIHCDPSTSHVSGRPFNTQESSSLHSKLFRVSQENENVGKGKEAFSMTFGSPEFSSPEDTNEGKIRLKPETPRSETCISNDFYSHMPVGETNPLIGSLLQERQDVIARIAQHLEHIDPTASHIPRQSFNMHDSSSVASKVFRSSYEDKNLLKKNKDESSVSISHTKCSLLGDISDGKNLVPNKCFTSFKNNSKEKCSLKHQTRNQCQNNPSEIIQSTYQETQNKSSSLSTSSILSQHKENNLDLTSRFKEQEMSNGIDKQYSNCTTIDKQICTNKYKEKIINENYNPKFFGNLQSDDSKKNDSKIKVTVLEMSEYLNKYESMSSNKDSKRPKTCEQNTQLNSIENYLNKDNEGFKCKKSDQLKNEQDKQEDPTNEKSQNYSQRRSIKDCLSTCEQPKNTEVLRTTLKHSNVWRKHNFHSLDGTSTRAFHPQTGLPLLSSPVPQRKTQSGCFDLDSSLLHLKSFSSRSPRPCLNIEDDPDIHEKPFLSSSAPPITSLSLLGNFEESVLNYRFDPLGIVDGFTAEVGASGAFCPTHLTLPVEVSFYSVSDDNAPSPYMGVITLESLGKRGYRVPPSGTIQVVCVL

SEQ ID NO: 19012 - protein, 143 aa, Artificial Sequence
  Synthetic polypeptide
DQPDQHDTLDEYFEYDAEEFLVSLALLITEGRTPECSVKGRTESFHCPPAQSCYPVTTKHECSDKLAQCRQARRTRSEVTLLWKNNLPIMVEMMLLPDCCYSDDGPTTEGIDLNDPAIKQDALLLERWILEPVPRQNGDRFIE

SEQ ID NO: 19013 - protein, 127 aa, Artificial Sequence
  Synthetic polypeptide
DQPDQHDTLDEYFEYDAEEFLVSLALLITEGRTPECSVKGRTESFHCPPAQSCYPVTTKHECSDKLAQCRQARRTRSEVTLLWKNNLPIMVEMMLLPDCCYSDDGPTTEGIDLNDPAIKQDALLLER

SEQ ID NO: 19014 - protein, 119 aa, Artificial Sequence
  Synthetic polypeptide
DQPDQHDTLDEYFEYDAEEFLVSLALLITEGRTPECSVKGRTESFHCPPAQSCYPVTTKHECSDKLAQCRQARRTRSEVTLLWKNNLPIMVEMMLLPDCCYSDDGPTTEGIDLNDPAIK

SEQ ID NO: 19015 - protein, 96 aa, Artificial Sequence
  Synthetic polypeptide
DQPDQHDTLDEYFEYDAEEFLVSLALLITEGRTPECSVKGRTESFHCPPAQSCYPVTTKHECSDKLAQCRQARRTRSEVTLLWKNNLPIMVEMMLL

SEQ ID NO: 19016 - protein, 90 aa, Artificial Sequence
  Synthetic polypeptide
DQPDQHDTLDEYFEYDAEEFLVSLALLITEGRTPECSVKGRTESFHCPPAQSCYPVTTKHECSDKLAQCRQARRTRSEVTLLWKNNLPIM

SEQ ID NO: 19017 - protein, 1198 aa, Artificial Sequence
  Synthetic polypeptide
GLPRHAKLAGGGLYGIDSMPDLRRKKTLPIVRDVAMTLAARKSGLSLAMVIRTSLNNEELKMHVFKKTLQALIYPMSSTIPHNFEVWTATTPTYCYECEGLLWGIARQGMKCLECGVKCHEKCQDLLNADCLQRAAEKSSKHGAEDKTQTIITAMKERMKIREKNRPEVFEVIQEMFQISKEDFVQFTKAAKQSVLDGTSKWSAKITITVVSAQGLQAKDKTGSSDPYVTVQVGKNKRRTKTIFGNLNPVWDEKFYFECHNSTDRIKVRVWDEDDDIKSRVKQHFKKESDDFLGQTIVEVRTLSGEMDVWYNLEKRTDKSAVSGAIRLKINVEIKGEEKVAPYHIQYTCLHENLFHYLTEVKSNGGVKIPEVKGDEAWKVFFDDASQEIVDEFAMRYGIESIYQAMTHFSCLSSKYMCPGVPAVMSTLLANINAFYAHTTVSTNIQVSASDRFAATNFGREKFIKLLDQLHNSLRIDLSKYRENFPASNTERLQDLKSTVDLLTSITFFRMKVLELQSPPKASMVVKDCVRACLDSTYKYIFDNCHELYSQLTDPSKKQDIPREDQGPTTKNLDFWPQLITLMVTIIDEDKTAYTPVLNQFPQELNMGKISAEIMWTLFALDMKYALEEHENQRLCKSTDYMNLHFKVKWFYNEYVRELPAFKDAVPEYSLWFEPFVMQWLDENEDVSMEFLHGALGRDKKDGFQQTSEHALFSCSVVDVFAQLNQSFEIIKKLECPNPEALSHLMRRFAKTINKVLLQYAAIVSSDFSSHCDKENVPCILMNNIQQLRVQLEKMFESMGGKELDSEASTILKELQVKLSGVLDELSVTYGESFQVIIEECIKQMSFELNQMRANGNTTSNKNSAAMDAEIVLRSLMDFLDKTLSLSAKICEKTVLKRVLKELWKLVLNKIEKQIVLPPLTDQTGPQMIFIAAKDLGQLSKLKEHMIREDARGLTPRQCAIMEVVLATIKQYFHAGGNGLKKNFLEKSPDLQSLRYALSLYTQTTDALIKKFIDTQTSQSRSSKDAVGQISVHVDITATPGTGDHKVTVKVIAINDLNWQTTAMFRPFVEVCILGPNLGDKKRKQGTKTKSNTWSPKYNETFQFILGKENRPGAYELHLSVKDYCFAREDRIIGMTVIQLQNIAEKGSYGAWYPLLKNISMDETGLTILRILSQRTSDDVAKEFVRLKSETRSTEESA

SEQ ID NO: 19018 - protein, 52 aa, Artificial Sequence
  Synthetic polypeptide
ETPFFPFGFYQDFTFPEVSPDMQNWLEVDFMVLTACRIFAEKKLCLLSEMWP

SEQ ID NO: 19019 - protein, 100 aa, Artificial Sequence
  Synthetic polypeptide
MVWLCHLNLISNCNPHVSRRDLVGGDWIMGGSFPQAVLLLGSSHEIRGFKSVWQFPLSLALCLLLPCKRRLSSPLASTRILHFLRSPQTCKTGWRWTLWY

SEQ ID NO: 19020 - protein, 1196 aa, Artificial Sequence
  Synthetic polypeptide
GLPRHAKLAGGGLYGIDSMPDLRRKKTLPIVRDVTLAARKSGLSLAMVIRTSLNNEELKMHVFKKTLQALIYPMSSTIPHNFEVWTATTPTYCYECEGLLWGIARQGMKCLECGVKCHEKCQDLLNADCLQRAAEKSSKHGAEDKTQTIITAMKERMKIREKNRPEVFEVIQEMFQISKEDFVQFTKAAKQSVLDGTSKWSAKITITVVSAQGLQAKDKTGSSDPYVTVQVGKNKRRTKTIFGNLNPVWDEKFYFECHNSTDRIKVRVWDEDDDIKSRVKQHFKKESDDFLGQTIVEVRTLSGEMDVWYNLEKRTDKSAVSGAIRLKINVEIKGEEKVAPYHIQYTCLHENLFHYLTEVKSNGGVKIPEVKGDEAWKVFFDDASQEIVDEFAMRYGIESIYQAMTHFSCLSSKYMCPGVPAVMSTLLANINAFYAHTTVSTNIQVSASDRFAATNFGREKFIKLLDQLHNSLRIDLSKYRENFPASNTERLQDLKSTVDLLTSITFFRMKVLELQSPPKASMVVKDCVRACLDSTYKYIFDNCHELYSQLTDPSKKQDIPREDQGPTTKNLDFWPQLITLMVTIIDEDKTAYTPVLNQFPQELNMGKISAEIMWTLFALDMKYALEEHENQRLCKSTDYMNLHFKVKWFYNEYVRELPAFKDAVPEYSLWFEPFVMQWLDENEDVSMEFLHGALGRDKKDGFQQTSEHALFSCSVVDVFAQLNQSFEIIKKLECPNPEALSHLMRRFAKTINKVLLQYAAIVSSDFSSHCDKENVPCILMNNIQQLRVQLEKMFESMGGKELDSEASTILKELQVKLSGVLDELSVTYGESFQVIIEECIKQMSFELNQMRANGNTTSNKNSAAMDAEIVLRSLMDFLDKTLSLSAKICEKTVLKRVLKELWKLVLNKIEKQIVLPPLTDQTGPQMIFIAAKDLGQLSKLKEHMIREDARGLTPRQCAIMEVVLATIKQYFHAGGNGLKKNFLEKSPDLQSLRYALSLYTQTTDALIKKFIDTQTSQSRSSKDAVGQISVHVDITATPGTGDHKVTVKVIAINDLNWQTTAMFRPFVEVCILGPNLGDKKRKQGTKTKSNTWSPKYNETFQFILGKENRPGAYELHLSVKDYCFAREDRIIGMTVIQLQNIAEKGSYGAWYPLLKNISMDETGLTILRILSQRTSDDVAKEFVRLKSETRSTEESA

SEQ ID NO: 19021 - protein, 50 aa, Artificial Sequence
  Synthetic polypeptide
ETPFFPFGFYQDFTFPEVSPDMQNWLEVDFMVLTACRIFAEKKLCLLSEM

SEQ ID NO: 19022 - protein, 1198 aa, Artificial Sequence
  Synthetic polypeptide
GLPRHAKLAGGGLYGIDSMPDLRRKKTLPIVRDVLLTLAARKSGLSLAMVIRTSLNNEELKMHVFKKTLQALIYPMSSTIPHNFEVWTATTPTYCYECEGLLWGIARQGMKCLECGVKCHEKCQDLLNADCLQRAAEKSSKHGAEDKTQTIITAMKERMKIREKNRPEVFEVIQEMFQISKEDFVQFTKAAKQSVLDGTSKWSAKITITVVSAQGLQAKDKTGSSDPYVTVQVGKNKRRTKTIFGNLNPVWDEKFYFECHNSTDRIKVRVWDEDDDIKSRVKQHFKKESDDFLGQTIVEVRTLSGEMDVWYNLEKRTDKSAVSGAIRLKINVEIKGEEKVAPYHIQYTCLHENLFHYLTEVKSNGGVKIPEVKGDEAWKVFFDDASQEIVDEFAMRYGIESIYQAMTHFSCLSSKYMCPGVPAVMSTLLANINAFYAHTTVSTNIQVSASDRFAATNFGREKFIKLLDQLHNSLRIDLSKYRENFPASNTERLQDLKSTVDLLTSITFFRMKVLELQSPPKASMVVKDCVRACLDSTYKYIFDNCHELYSQLTDPSKKQDIPREDQGPTTKNLDFWPQLITLMVTIIDEDKTAYTPVLNQFPQELNMGKISAEIMWTLFALDMKYALEEHENQRLCKSTDYMNLHFKVKWFYNEYVRELPAFKDAVPEYSLWFEPFVMQWLDENEDVSMEFLHGALGRDKKDGFQQTSEHALFSCSVVDVFAQLNQSFEIIKKLECPNPEALSHLMRRFAKTINKVLLQYAAIVSSDFSSHCDKENVPCILMNNIQQLRVQLEKMFESMGGKELDSEASTILKELQVKLSGVLDELSVTYGESFQVIIEECIKQMSFELNQMRANGNTTSNKNSAAMDAEIVLRSLMDFLDKTLSLSAKICEKTVLKRVLKELWKLVLNKIEKQIVLPPLTDQTGPQMIFIAAKDLGQLSKLKEHMIREDARGLTPRQCAIMEVVLATIKQYFHAGGNGLKKNFLEKSPDLQSLRYALSLYTQTTDALIKKFIDTQTSQSRSSKDAVGQISVHVDITATPGTGDHKVTVKVIAINDLNWQTTAMFRPFVEVCILGPNLGDKKRKQGTKTKSNTWSPKYNETFQFILGKENRPGAYELHLSVKDYCFAREDRIIGMTVIQLQNIAEKGSYGAWYPLLKNISMDETGLTILRILSQRTSDDVAKEFVRLKSETRSTEESA

SEQ ID NO: 19023 - protein, 52 aa, Artificial Sequence
  Synthetic polypeptide
ETPFFPFGFYQDFTFPEVSPDMQNWLEVDFMVLTACRIFAEKKLCLLSEMCF

SEQ ID NO: 19024 - protein, 219 aa, Artificial Sequence
  Synthetic polypeptide
ATPPRESPRTKLQALTVLSGSPWPPDFPSGSCRSLDLSGMCRSSKDAVGQISVHVDITATPGTGDHKVTVKVIAINDLNWQTTAMFRPFVEVCILGPNLGDKKRKQGTKTKSNTWSPKYNETFQFILGKENRPGAYELHLSVKDYCFAREDRIIGMTVIQLQNIAEKGSYGAWYPLLKNISMDETGLTILRILSQRTSDDVAKEFVRLKSETRSTEESA

SEQ ID NO: 19025 - protein, 54 aa, Artificial Sequence
  Synthetic polypeptide
LCSLAPRGLQTSPRAPAALWTSLGCVVPPKMPWVRYLFMWTSLPPQEREIIKSL

SEQ ID NO: 19026 - protein, 69 aa, Artificial Sequence
  Synthetic polypeptide
ISLSHTPTGKPQDKAPGPNCALWLPVASRLPLGLLPLSGPLWDVSFLQRCRGSDICSCGHHCHPRNGRS

SEQ ID NO: 19027 - protein, 67 aa, Artificial Sequence
  Synthetic polypeptide
ATPPRESPRTKLQALTVLSGSPWPPDFPSGSCRSLDLSGMCKSFLQRCRGSDICSCGHHCHPRNGRS

SEQ ID NO: 19028 - protein, 205 aa, Artificial Sequence
  Synthetic polypeptide
LCSLAPRGLQTSPRAPAALWTSLGCVSRSSKDAVGQISVHVDITATPGTGDHKVTVKVIAINDLNWQTTAMFRPFVEVCILGPNLGDKKRKQGTKTKSNTWSPKYNETFQFILGKENRPGAYELHLSVKDYCFAREDRIIGMTVIQLQNIAEKGSYGAWYPLLKNISMDETGLTILRILSQRTSDDVAKEFVRLKSETRSTEESA

SEQ ID NO: 19029 - protein, 47 aa, Artificial Sequence
  Synthetic polypeptide
RAGLWRHHTDPGLNPDKSSWRKYLSALVYHSFTNIKLLFSADKFCSR

SEQ ID NO: 19030 - protein, 503 aa, Artificial Sequence
  Synthetic polypeptide
ILINLLGENIYLLLFTIALRILNCFLVQTSFVPDEYWQSLEVSHHMVFNYGYLTWEWTERLRSYTYPLIFASIYKILHLLGKDSVQLLIWIPRLAQALLSAVADVRLYSLMKQLENQEVARWVFFCQLCSWFTWYCCTRTLTNTMETVLTIIALFYYPLEGSKSMNSVKYSSLVALAFIIRPTAVILWTPLLFRHFCQEPRKLDLILHHFLPVGFVTLSLSLMIDRIFFGQWTLVQFNFLKFNVLQNWGTFYGSHPWHWYFSQGFPVILGTHLPFFIHGCYLAPKRYRILLVTVLWTLLVYSMLSHKEFRFIYPVLPFCMVFCGYSLTHLKTWKKPALSFLFLSNLFLALYTGLVHQRGTLDVMSHIQKVCYNNPNKSSASIFIMMPCHSTPYYSHVHCPLPMRFLQCPPDLTGKSHYLDEADVFYLNPLNWLHREFHDDASLPTHLITFSILEEEISAFLISSNYKRTAVFFHTHLPEGRIGSHIYVYERKLKGKFNMKMKF

SEQ ID NO: 19031 - protein, 204 aa, Artificial Sequence
  Synthetic polypeptide
ILINLLGENIYLLLFTIALRILNCFLVQTSFVPDEYWQSLEVSHHMVFKERLRSYTYPLIFASIYKILHLLGKDSVQLLIWIPRLAQALLSAVADVRLYSLMKQLENQEVARWVFFCQLCSWFTWYCCTRTLTNTMETVLTIIALFYYPLEGSKSMNSVKYSSLVALAFIIRPTAVILWTPLLFRHFCQEPRKLDLILHHFLPV

SEQ ID NO: 19032 - protein, 5 aa, Artificial Sequence
  Synthetic polypeptide
NALLL

SEQ ID NO: 19033 - protein, 23 aa, Artificial Sequence
  Synthetic polypeptide
ATPRFLIHRNYEMLCYFEFVSDD

SEQ ID NO: 19034 - protein, 296 aa, Artificial Sequence
  Synthetic polypeptide
STGTMKCFVTLSLSLMIDRIFFGQWTLVQFNFLKFNVLQNWGTFYGSHPWHWYFSQGFPVILGTHLPFFIHGCYLAPKRYRILLVTVLWTLLVYSMLSHKEFRFIYPVLPFCMVFCGYSLTHLKTWKKPALSFLFLSNLFLALYTGLVHQRGTLDVMSHIQKVCYNNPNKSSASIFIMMPCHSTPYYSHVHCPLPMRFLQCPPDLTGKSHYLDEADVFYLNPLNWLHREFHDDASLPTHLITFSILEEEISAFLISSNYKRTAVFFHTHLPEGRIGSHIYVYERKLKGKFNMKMKF

SEQ ID NO: 19035 - protein, 39 aa, Artificial Sequence
  Synthetic polypeptide
AKILINPPENMEETSSKFPVFIKFVPRPLYWFSSSTRYS

SEQ ID NO: 19036 - protein, 209 aa, Artificial Sequence
  Synthetic polypeptide
LPFTFCHEWKQPEALTSGCFLYNLQDHEPRYSLTHLKTWKKPALSFLFLSNLFLALYTGLVHQRGTLDVMSHIQKVCYNNPNKSSASIFIMMPCHSTPYYSHVHCPLPMRFLQCPPDLTGKSHYLDEADVFYLNPLNWLHREFHDDASLPTHLITFSILEEEISAFLISSNYKRTAVFFHTHLPEGRIGSHIYVYERKLKGKFNMKMKF

SEQ ID NO: 19037 - protein, 63 aa, Artificial Sequence
  Synthetic polypeptide
EFPRVLAVQKSLAPSTFLLLLSHHVISAQTDSPSPSAMSGSSLKPSPVDASCTTCRTMSQDTH

SEQ ID NO: 19038 - protein, 45 aa, Artificial Sequence
  Synthetic polypeptide
AKILINPPENMEETSSKFPVFIKFVPRPLYWFSSSTSHVHCPLPM

SEQ ID NO: 19039 - protein, 72 aa, Artificial Sequence
  Synthetic polypeptide
LPFTFCHEWKQPEALTSGCFLYNLQDHEPRYSLTHLKTWKKPALSFLFLSNLFLALYTGLVHQRAMFTAHFP

SEQ ID NO: 19040 - protein, 826 aa, Artificial Sequence
  Synthetic polypeptide
GRPWWLTPVIPALWEAEAGGSPETRDDFLGQVDVPLYPLPTENPRLERPYTFKDFVLHPRSHKSRVKGYLRLKMTYLPKTSGSEDDNAEQAEELEPGWVVLDQPDAACHLQQQQEPSPLPPGWEERQDILGRTYYVNHESRRTQWKRPTPQDNLTDAENGNIQLQAQRAFTTRRQISEETESVDNRESSENWEIIREDEATMYSNQAFPSPPPSSNLDVPTHLAEELNARLTIFGNSAVSQPASSSNHSSRRGSLQAYTFEEQPTLPVLLPTSSGLPPGWEEKQDERGRSYYVDHNSRTTTWTKPTVQATVETSQLTSSQSSAGPQSQASTSDSGQQVTQPSEIEQGFLPKGWEVRHAPNGRPFFIDHNTKTTTWEDPRLKIPAHLRGKTSLDTSNDLGPLPPGWEERTHTDGRIFYINHNIKRTQWEDPRLENVAITGPAVPYSRDYKRKYEFFRRKLKKQNDIPNKFEMKLRRATVLEDSYRRIMGVKRADFLKARLWIEFDGEKGLDYGGVAREWFFLISKEMFNPYYGLFEYSATDNYTLQINPNSGLCNEDHLSYFKFIGRVAGMAVYHGKLLDGFFIRPFYKMMLHKPITLHDMESVDSEYYNSLRWILENDPTELDLRFIIDEELFGQTHQHELKNGGSEIVVTNKNKKEYIYLVIQWRFVNRIQKQMAAFKEGFFELIPQDLIKIFDENELELLMCGLGDVDVNDWREHTKYKNGYSANHQVIQWFWKAVLMMDSEKRIRLLQFVTGTSRVPMNGFAELYGSNGPQSFTVEQWGTPEKLPRAHTCFNRLDLPPYESFEELWDKLQMAIENTQGFDGVD

SEQ ID NO: 19041 - protein, 19 aa, Artificial Sequence
  Synthetic polypeptide
SQHFGRLRQADHLRQEMIS

SEQ ID NO: 19042 - protein, 810 aa, Artificial Sequence
  Synthetic polypeptide
GRPWWLTPVIPALWEAEAGGSPETRDDFLGQVDVPLYPLPTENPRLERPYTFKDFVLHPRSHKSRVKGYLRLKMTYLPKTSGSEDDNAEQAEELEQQQEPSPLPPGWEERQDILGRTYYVNHESRRTQWKRPTPQDNLTDAENGNIQLQAQRAFTTRRQISEETESVDNRESSENWEIIREDEATMYSNQAFPSPPPSSNLDVPTHLAEELNARLTIFGNSAVSQPASSSNHSSRRGSLQAYTFEEQPTLPVLLPTSSGLPPGWEEKQDERGRSYYVDHNSRTTTWTKPTVQATVETSQLTSSQSSAGPQSQASTSDSGQQVTQPSEIEQGFLPKGWEVRHAPNGRPFFIDHNTKTTTWEDPRLKIPAHLRGKTSLDTSNDLGPLPPGWEERTHTDGRIFYINHNIKRTQWEDPRLENVAITGPAVPYSRDYKRKYEFFRRKLKKQNDIPNKFEMKLRRATVLEDSYRRIMGVKRADFLKARLWIEFDGEKGLDYGGVAREWFFLISKEMFNPYYGLFEYSATDNYTLQINPNSGLCNEDHLSYFKFIGRVAGMAVYHGKLLDGFFIRPFYKMMLHKPITLHDMESVDSEYYNSLRWILENDPTELDLRFIIDEELFGQTHQHELKNGGSEIVVTNKNKKEYIYLVIQWRFVNRIQKQMAAFKEGFFELIPQDLIKIFDENELELLMCGLGDVDVNDWREHTKYKNGYSANHQVIQWFWKAVLMMDSEKRIRLLQFVTGTSRVPMNGFAELYGSNGPQSFTVEQWGTPEKLPRAHTCFNRLDLPPYESFEELWDKLQMAIENTQGFDGVD

SEQ ID NO: 19043 - protein, 891 aa, Artificial Sequence
  Synthetic polypeptide
KVRKQQENSRIVRVRVIAGIGLAKKDILGASDPYVRVTLYDPMNGVLTSVQTKTIKKSLNPKWNEEILFRVHPQQHRLLFEVFDENRLTRDDFLGQVDVPLYPLPTENPRLERPYTFKDFVLHPRSHKSRVKGYLRLKMTYLPKTSGSEDDNAEQAEELEPGWVVLDQPDAACHLQQQQEPSPLPPGWEERQDILGRTYYVNHESRRTQWKRPTPQDNLTDAENGNIQLQAQRAFTTRRQISEETESVDNRESSENWEIIREDEATMYSNQAFPSPPPSSNLDVPTHLAEELNARLTIFGNSAVSQPASSSNHSSRRGSLQAYTFEEQPTLPVLLPTSSGLPPGWEEKQDERGRSYYVDHNSRTTTWTKPTVQATVETSQLTSSQSSAGPQSQASTSDSGQQVTQPSEIEQGFLPKGWEVRHAPNGRPFFIDHNTKTTTWEDPRLKIPAHLRGKTSLDTSNDLGPLPPGWEERTHTDGRIFYINHNIKRTQWEDPRLENVAITGPAVPYSRDYKRKYEFFRRKLKKQNDIPNKFEMKLRRATVLEDSYRRIMGVKRADFLKARLWIEFDGEKGLDYGGVAREWFFLISKEMFNPYYGLFEYSATDNYTLQINPNSGLCNEDHLSYFKFIGRVAGMAVYHGKLLDGFFIRPFYKMMLHKPITLHDMESVDSEYYNSLRWILENDPTELDLRFIIDEELFGQTHQHELKNGGSEIVVTNKNKKEYIYLVIQWRFVNRIQKQMAAFKEGFFELIPQDLIKIFDENELELLMCGLGDVDVNDWREHTKYKNGYSANHQVIQWFWKAVLMMDSEKRIRLLQFVTGTSRVPMNGFAELYGSNGPQSFTVEQWGTPEKLPRAHTCFNRLDLPPYESFEELWDKLQMAIENTQGFDGVD

SEQ ID NO: 19044 - protein, 298 aa, Artificial Sequence
  Synthetic polypeptide
FTELEKTTLKFIWNQKRARIAKSILSQKNKAGGITLPDFKLYYKATVTKTAWYWYQNRDIDQWNRTEPSEIMPHIYNYLIFDKPEKNKQWGKDSLFNKWCWENWLAICRKLKLDPFLTPYTKINSRWIKDLNVRPKTIKTLEENLGITIQDIGVGKDFMSKTPKAMATKAKIDKWDLIKLKSFCTAKETTIRVNRQPTTWEKIFATYSSDKGLISRIYNELKQIYKKKTNNPIKKWAKDMNRHFSKEDIYAAKKHMKKCSSSLAIREMQIKTTMRYHLTPVRMAIIKKSGNNRKIHEL

SEQ ID NO: 19045 - protein, 42 aa, Artificial Sequence
  Synthetic polypeptide
DIISHQLEWQSLKSQETTGKFTNCESKSYSRNRPCQEGYIGS

SEQ ID NO: 19046 - protein, 32 aa, Artificial Sequence
  Synthetic polypeptide
KVRKQQENSRIVRVRVIAGIGLAKKDILGARV

SEQ ID NO: 19047 - protein, 898 aa, Artificial Sequence
  Synthetic polypeptide
GLPSHASCIACGMENSRIVRVRVIAGIGLAKKDILGASDPYVRVTLYDPMNGVLTSVQTKTIKKSLNPKWNEEILFRVHPQQHRLLFEVFDENRLTRDDFLGQVDVPLYPLPTENPRLERPYTFKDFVLHPRSHKSRVKGYLRLKMTYLPKTSGSEDDNAEQAEELEPGWVVLDQPDAACHLQQQQEPSPLPPGWEERQDILGRTYYVNHESRRTQWKRPTPQDNLTDAENGNIQLQAQRAFTTRRQISEETESVDNRESSENWEIIREDEATMYSNQAFPSPPPSSNLDVPTHLAEELNARLTIFGNSAVSQPASSSNHSSRRGSLQAYTFEEQPTLPVLLPTSSGLPPGWEEKQDERGRSYYVDHNSRTTTWTKPTVQATVETSQLTSSQSSAGPQSQASTSDSGQQVTQPSEIEQGFLPKGWEVRHAPNGRPFFIDHNTKTTTWEDPRLKIPAHLRGKTSLDTSNDLGPLPPGWEERTHTDGRIFYINHNIKRTQWEDPRLENVAITGPAVPYSRDYKRKYEFFRRKLKKQNDIPNKFEMKLRRATVLEDSYRRIMGVKRADFLKARLWIEFDGEKGLDYGGVAREWFFLISKEMFNPYYGLFEYSATDNYTLQINPNSGLCNEDHLSYFKFIGRVAGMAVYHGKLLDGFFIRPFYKMMLHKPITLHDMESVDSEYYNSLRWILENDPTELDLRFIIDEELFGQTHQHELKNGGSEIVVTNKNKKEYIYLVIQWRFVNRIQKQMAAFKEGFFELIPQDLIKIFDENELELLMCGLGDVDVNDWREHTKYKNGYSANHQVIQWFWKAVLMMDSEKRIRLLQFVTGTSRVPMNGFAELYGSNGPQSFTVEQWGTPEKLPRAHTCFNRLDLPPYESFEELWDKLQMAIENTQGFDGVD

SEQ ID NO: 19048 - protein, 9 aa, Artificial Sequence
  Synthetic polypeptide
PVEWKIHEL

SEQ ID NO: 19049 - protein, 33 aa, Artificial Sequence
  Synthetic polypeptide
PCFLYSLWNGKFTNCESKSYSRNRPCQEGYIGS

SEQ ID NO: 19050 - protein, 39 aa, Artificial Sequence
  Synthetic polypeptide
GLPSHASCIACGMENSRIVRVRVIAGIGLAKKDILGARV

SEQ ID NO: 19051 - protein, 684 aa, Artificial Sequence
  Synthetic polypeptide
CIGKNWAQEPDNWIGIDDLQLTSWMALGIDERGGTTSWGTSGQPSPSYDSSRGFTDSPHYSDHLNDSRLGAHEGLSPTPFMNSNLMGKTSERGSFSLYSRDTGLPGCQSSLLRQDLGLGSPAQLSSSGKPGTAYYSFSATSSRRRPLHDSAALDPLQAKKVRKVPPGLPSSVYAPSPNSDDFNRESPSYPSPKPPTSMFASTFFMQDGTHNSSDLWSSSNGMSQPGFGGILGTSTSHMSQSSSYGNLHSHDRLSYPPHSVSPTDINTSLPPMSSFHRGSTSSSPYVAASHTPPINGSDSILGTRGNAAGSSQTGDALGKALASIYSPDHTSSSFPSNPSTPVGSPSPLTGTSQWPRPGGQAPSSPSYENSLHSLKNRVEQQLHEHLQDAMSFLKDVCEQSRMEDRLDRLDDAIHVLRNHAVGPSTSLPAGHSDIHSLLGPSHNAPIGSLNSNYGGSSLVASSRSASMVGTHREDSVSLNGNHSVLSSTVTTSSTDLNHKTQENYRGGLQSQSGTVVTTEIKTENKEKDENLHEPPSSDDMKSDDESSQKDIKVSSRGRTSSTNEDEDLNPEQKIEREKERRMANNARERLRVRDINEAFKELGRMCQLHLKSEKPQTKLLILHQAVAVILSLEQQVRERNLNPKAACLKRREEEKVSAVSAEPPTTLPGTHPGLSETTNPMGHM

SEQ ID NO: 19052 - protein, 6 aa, Artificial Sequence
  Synthetic polypeptide
LDGLRY

SEQ ID NO: 19053 - protein, 660 aa, Artificial Sequence
  Synthetic polypeptide
CIGKNWAQEPDNWIGIDDLQLTSWMALGIDERGGTTSWGTSGQPSPSYDSSRGFTDSPHYSDHLNDSRLGAHEGLSPTPFMNSNLMGKTSERGSFSLYSRDTGLPGCQSSLLRQDLGLGSPAQLSSSGKPGTAYYSFSATSSRRRPLHDSAALDPLQAKKVRKVPPGLPSSVYAPSPNSDDFNRESPSYPSPKPPTSMFASTFFMQDGTHNSSDLWSSSNGMSQPGFGGILGTSTSHMSQSSSYGNLHSHDRLSYPPHSVSPTDINTSLPPMSSFHRGSTSSSPYVAASHTPPINGSDSILGTRGNAAGSSQTGDALGKALASIYSPDHTSSSFPSNPSTPVGSPSPLTGTSQWPRPGGQAPSSPSYENSLHSLQSRMEDRLDRLDDAIHVLRNHAVGPSTSLPAGHSDIHSLLGPSHNAPIGSLNSNYGGSSLVASSRSASMVGTHREDSVSLNGNHSVLSSTVTTSSTDLNHKTQENYRGGLQSQSGTVVTTEIKTENKEKDENLHEPPSSDDMKSDDESSQKDIKVSSRGRTSSTNEDEDLNPEQKIEREKERRMANNARERLRVRDINEAFKELGRMCQLHLKSEKPQTKLLILHQAVAVILSLEQQVRERNLNPKAACLKRREEEKVSAVSAEPPTTLPGTHPGLSETTNPMGHM

SEQ ID NO: 19054 - protein, 135 aa, Artificial Sequence
  Synthetic polypeptide
CIGKNWAQEPDNWIGIDDLQLTSWMALGIDERGGTTSWGTSGQPSPSYDSSRGFTDSPHYSDHLNDSRLGAHEGLSPTPFMNSNLMGKTSERGSFSLYSRDTGLPGCQSSLLRQDLGLGSPAQLSSSGKPGTAYY

SEQ ID NO: 19055 - protein, 570 aa, Artificial Sequence
  Synthetic polypeptide
KCVALLPSFSLLLPCEDVLASPLPSTMTASFLRLPSHASCTACRTANVCRLRLTVPPESPVPEQCEKKIERKEQLLDLSNGEPTRKLPQGVVYGVVRRSDQNQQKEMVVYGWSTSQLKEEMNYIKDVRATLEKVRKRMYGDYDEMRQKIRQLTQELSVSHAQQEYLENHIQTQSSALDRFNAMNSALASDSIGLQKTLVDVTLENSNIKDQIRNLQQTYEASMDKLREKQRQLEVAQVENQLLKMKVESSQEANAEVMREMTKKLYSQYEEKLQEEQRKHSAEKEALLEETNSFLKAIEEANKKMQAAEISLEEKDQRIGELDRLIERMEKERHQLQLQLLEHETEMSGELTDSDKERYQQLEEASASLRERIRHLDDMVHCQQKKVKQMVEEIESLKKKLQQKQLLILQLLEKISFLEGENNELQSRLDYLTETQAKTEVETREIGVGCDLLPRLPFRQNDSSSHCQKSGSPISSEERRRRDKQHLDDITAARLLPLHHMPTQLLSIEESLALQKQQKQNYEEMQAKLAAQKLAERLNIKMRSYNPEGESSGRYREVRDEDDDWSSDEF

SEQ ID NO: 19056 - protein, 20 aa, Artificial Sequence
  Synthetic polypeptide
GFPVMLPVQPAELQMFADYG

SEQ ID NO: 19057 - protein, 41 aa, Artificial Sequence
  Synthetic polypeptide
RCACFTFAFHHDCKFSEASQSCFLYSLQNCKCLQTTADRTS

SEQ ID NO: 19058 - protein, 417 aa, Artificial Sequence
  Synthetic polypeptide
KCVALLPSFSLLLPCEDVLASPLPSTMTASFLRLPSHASCTACRTANVCRLRLTVPPESPVPEQCEKKIERKEQLLDLSNGEPTRKLPQGVVYGVVRRSDQNQQKEMVVYGWSTSQLKEEMNYIKDKTLVDVTLENSNIKDQIRNLQQTYEASMDKLREKQRQLEVAQVENQLLKMKVESSQEANAEVMREMTKKLYSQYEEKLQEEQRKHSAEKEALLEETNSFLKAIEEANKKMQAAEISLEEKDQRIGELDRLIERMEKERHQLQLQLLEHETEMSGELTDSDKERYQQLEEASASLRERIRHLDDMVHCQQKKVKQMVEEIESLKKKLQQKQLLILQLLEKISFLEGENNELQSRLDYLTETQAKTEVETREIGVGCDLLPSQTGRTREIVMPSRNYTPYTRVLELTMKKTLT

SEQ ID NO: 19059 - protein, 455 aa, Artificial Sequence
  Synthetic polypeptide
KCVALLPSFSLLLPCEDVLASPLPSTMTASFLRLPSHASCTACRTANVCRLRLTVPPESPVPEQCEKKIERKEQLLDLSNGEPTRKLPQGVVYGVVRRSDQNQQKEMVVYGWSTSQLKEEMNYIKDVSHAQQEYLENHIQTQSSALDRFNAMNSALASDSIGLQKTLVDVTLENSNIKDQIRNLQQTYEASMDKLREKQRQLEVAQVENQLLKMKVESSQEANAEVMREMTKKLYSQYEEKLQEEQRKHSAEKEALLEETNSFLKAIEEANKKMQAAEISLEEKDQRIGELDRLIERMEKERHQLQLQLLEHETEMSGELTDSDKERYQQLEEASASLRERIRHLDDMVHCQQKKVKQMVEEIESLKKKLQQKQLLILQLLEKISFLEGENNELQSRLDYLTETQAKTEVETREIGVGCDLLPSQTGRTREIVMPSRNYTPYTRVLELTMKKTLT

SEQ ID NO: 19060 - protein, 458 aa, Artificial Sequence
  Synthetic polypeptide
KCVALLPSFSLLLPCEDVLASPLPSTMTASFLRLPSHASCTACRTANVCRLRLTVPPESPVPEQCEKKIERKEQLLDLSNGEPTRKLPQGVVYGVVRRSDQNQQKEMVVYGWSTSQLKEEMNYIKDVRATLEKVRKRMYGDYDEMRQKIRQLTQELSVSHAQQEYLENHIQTQSSALDRFNAMNSALASDSIGLQKTLVDVTLENSNIKDQIRNLQQTYEASMDKLREKQRQLEVAQVENQLLKMKVESSQEANAEVMREMTKKLYSQYEEKLQEEQRKHSAEKEALLEETNSFLKAIEEANKKMQAAEISLEEKDQRIGELDRLIERMEKERHQLQLQLLEHETEMSGELTDSDKERYQQLEEASASLRERIRHLDDMVHCQQKKVKQMVEENNELQSRLDYLTETQAKTEVETREIGVGCDLLPSQTGRTREIVMPSRNYTPYTRVLELTMKKTLT

SEQ ID NO: 19061 - protein, 486 aa, Artificial Sequence
  Synthetic polypeptide
KCVALLPSFSLLLPCEDVLASPLPSTMTASFLRLPSHASCTACRTANVCRLRLTVPPESPVPEQCEKKIERKEQLLDLSNGEPTRKLPQGVVYGVVRRSDQNQQKEMVVYGWSTSQLKEEMNYIKDVRATLEKVRKRMYGDYDEMRQKIRQLTQELSVSHAQQEYLENHIQTQSSALDRFNAMNSALASDSIGLQKTLVDVTLENSNIKDQIRNLQQTYEASMDKLREKQRQLEVAQVENQLLKMKVESSQEANAEVMREMTKKLYSQYEEKLQEEQRKHSAEKEALLEETNSFLKAIEEANKKMQAAEISLEEKDQRIGELDRLIERMEKERHQLQLQLLEHETEMSGELTDSDKERYQQLEEASASLRERIRHLDDMVHCQQKKVKQMVEEIESLKKKLQQKQLLILQLLEKISFLEGENNELQSRLDYLTETQAKTEVETREIGVGCDLLPSQTGRTREIVMPSRNYTPYTRVLELTMKKTLT

SEQ ID NO: 19062 - protein, 435 aa, Artificial Sequence
  Synthetic polypeptide
KCVALLPSFSLLLPCEDVLASPLPSTMTASFLRLPSHASCTACRTANVCRLRLTVPPESPVPEQCEKKIERKEQLLDLSNGEPTRKLPQGVVYGVVRRSDQNQQKEMVVYGWSTSQLKEEMNYIKDVSHAQQEYLENHIQTQSSALDRFNAMNSALASDSIGLQKTLVDVTLENSNIKDQIRNLQQTYEASMDKLREKQRQLEVAQVENQLLKMKVESSQEANAEVMREMTKKLYSQYEEKLQEEQRKHSAEKEALLEETNSFLKAIEEANKKMQAAEISLEEKDQRIGELDRLIERMEKERHQLQLQLLEHETEMSGELTDSDKERYQQLEEASASLRERIRHLDDMVHCQQKKVKQMVEENNELQSRLDYLTETQAKTEVETREIGVGCDLLPRQSRKFEKVLNEFVQLLPLPHHLLWAFGNVCWRRHFGLLQ

SEQ ID NO: 19063 - protein, 785 aa, Artificial Sequence
  Synthetic polypeptide
KCVALLPSFSLLLPCEDVLASPLPSTMTASFLRLPSHASCTACRTANVCRLRLTVPPESPVPEQCEKKIERKEQLLDLSNGEPTRKLPQGVVYGVVRRSDQNQQKEMVVYGWSTSQLKEEMNYIKDVRATLEKVRKRMYGDYDEMRQKIRQLTQELSVSHAQQEYLENHIQTQSSALDRFNAMNSALASDSIGLQKTLVDVTLENSNIKDQIRNLQQTYEASMDKLREKQRQLEVAQVENQLLKMKVESSQEANAEVMREMTKKLYSQYEEKLQEEQRKHSAEKEALLEETNSFLKAIEEANKKMQAAEISLEEKDQRIGELDRLIERMEKERHQLQLQLLEHETEMSGELTDSDKERYQQLEEASASLRERIRHLDDMVHCQQKKVKQMVEEIESLKKKLQQKQLLILQLLEKISFLEGENNELQSRLDYLTETQAKTEVETREIGVGCDLLPRKFICKLPDKGKKIFDSFAKLKAAIAECEEVRRKSELFNPVSLDCKLRQKAIAEVDVGTDKAQNSDPILDTSSLVPGCSSVDNIKSSQTSQNQGLGRPTLEGDEETSEVEYTVNKGPASSNRDRVPPSSEASEHHPRHRVSSQAEDTSSSFDNLFIDRLQRITIADQGEQQSEENASTKNLTGLSSGTEKKPHYMEVLEMRAKNPVPQLRKFKTNVLPFRQNDSSSHCQKSGSPISSEERRRRDKQHLDDITAARLLPLHHMPTQLLSIEESLALQKQQKQNYEEMQAKLAAQKLAERLNIKMRSYNPEGESSGRYREVRDEDDDWSSDEF

SEQ ID NO: 19064 - protein, 465 aa, Artificial Sequence
  Synthetic polypeptide
KCVALLPSFSLLLPCEDVLASPLPSTMTASFLRLPSHASCTACRTANVCRLRLTVPPESPVPEQCEKKIERKEQLLDLSNGEPTRKLPQGVVYGVVRRSDQNQQKEMVVYGWSTSQLKEEMNYIKDVRATLEKVRKRMYGDYDEMRQKIRQLTQELSVSHAQQEYLENHIQTQSSALDRFNAMNSALASDSIGLQKTLVDVTLENSNIKDQIRNLQQTYEASMDKLREKQRQLEVAQVENQLLKMKVESSQEANAEVMREMTKKLYSQYEEKLQEEQRKHSAEKEALLEETNSFLKAIEEANKKMQAAEISLEEKDQRIGELDRLIERMEKERHQLQLQLLEHETEMSGELTDSDKERYQQLEEASASLRERIRHLDDMVHCQQKKVKQMVEEIESLKKKLQQKQLLILQLLEKISFLEGENNELQSRLDYLTETQAKTEVETREIGVGCDLLPRRCKQSSQRKN

SEQ ID NO: 19065 - protein, 434 aa, Artificial Sequence
  Synthetic polypeptide
KCVALLPSFSLLLPCEDVLASPLPSTMTASFLRLPSHASCTACRTANVCRLRLTVPPESPVPEQCEKKIERKEQLLDLSNGEPTRKLPQGVVYGVVRRSDQNQQKEMVVYGWSTSQLKEEMNYIKDVRATLEKVRKRMYGDYDEMRQKIRQLTQELSVSHAQQEYLENHIQTQSSALDRFNAMNSALASDSIGLQKTLVDVTLENSNIKDQIRNLQQTYEASMDKLREKQRQLEVAQVENQLLKMKVESSQEANAEVMREMTKKLYSQYEEKLQEEQRKHSAEKEALLEETNSFLKAIEEANKKMQAAEISLEEKDQRIGELDRLIERMEKERHQLQLQLLEHETEMSGELTDSDKERYQQLEEASASLRERIRHLDDMVHCQQKKVKQMVEEIESLKKKLQQKQLLILQLLEKISFLEGEGRKGLKGRLKMSC

SEQ ID NO: 19066 - protein, 399 aa, Artificial Sequence
  Synthetic polypeptide
KCVALLPSFSLLLPCEDVLASPLPSTMTASFLRLPSHASCTACRTANVCRLRLTVPPESPVPEQCEKKIERKEQLLDLSNGEPTRKLPQGVVYGVVRRSDQNQQKEMVVYGWSTSQLKEEMNYIKDVRATLEKVRKRMYGDYDEMRQKIRQLTQELSVSHAQQEYLENHIQTQSSALDRFNAMNSALASDSIGLQKTLVDVTLENSNIKDQIRNLQQTYEASMDKLREKQRQLEVAQVENQLLKMKVESSQEANAEVMREMTKKLYSQYEEKLQEEQRKHSAEKEALLEETNSFLKAIEEANKKMQAAEISLEEKDQRIGELDRLIERMEKERHQLQLQLLEHETEMSGELTDSDKERYQQLEEASASLRERIRHLDDMVHCQQKKVKQMVEEVTFSTK

SEQ ID NO: 19067 - protein, 427 aa, Artificial Sequence
  Synthetic polypeptide
KCVALLPSFSLLLPCEDVLASPLPSTMTASFLRLPSHASCTACRTANVCRLRLTVPPESPVPEQCEKKIERKEQLLDLSNGEPTRKLPQGVVYGVVRRSDQNQQKEMVVYGWSTSQLKEEMNYIKDVRATLEKVRKRMYGDYDEMRQKIRQLTQELSVSHAQQEYLENHIQTQSSALDRFNAMNSALASDSIGLQKTLVDVTLENSNIKDQIRNLQQTYEASMDKLREKQRQLEVAQVENQLLKMKVESSQEANAEVMREMTKKLYSQYEEKLQEEQRKHSAEKEALLEETNSFLKAIEEANKKMQAAEISLEEKDQRIGELDRLIERMEKERHQLQLQLLEHETEMSGELTDSDKERYQQLEEASASLRERIRHLDDMVHCQQKKVKQMVEEIESLKKKLQQKQLLILQLLEKISFLEGEVTFSTK

SEQ ID NO: 19068 - protein, 410 aa, Artificial Sequence
  Synthetic polypeptide
KCVALLPSFSLLLPCEDVLASPLPSTMTASFLRLPSHASCTACRTANVCRLRLTVPPESPVPEQCEKKIERKEQLLDLSNGEPTRKLPQGVVYGVVRRSDQNQQKEMVVYGWSTSQLKEEMNYIKDVRATLEKVRKRMYGDYDEMRQKIRQLTQELSVSHAQQEYLENHIQTQSSALDRFNAMNSALASDSIGLQKTLVDVTLENSNIKDQIRNLQQTYEASMDKLREKQRQLEVAQVENQLLKMKVESSQEANAEVMREMTKKLYSQYEEKLQEEQRKHSAEKEALLEETNSFLKAIEEANKKMQAAEISLEEKDQRIGELDRLIERMEKERHQLQLQLLEHETEMSGELTDSDKERYQQLEEASASLRERIRHLDDMVHCQQKKVKQMVEEIMSHELFSRFSLRLFGR

SEQ ID NO: 19069 - protein, 167 aa, Artificial Sequence
  Synthetic polypeptide
KCVALLPSFSLLLPCEDVLASPLPSTMTASFLRLPSHASCTACRTANVCRLRLTVPPESPVPEQCEKKIERKEQLLDLSNGEPTRKLPQGVVYGVVRRSDQNQQKEMVVYGWSTSQLKEEMNYIKDVRATLEKVRKRMYGDYDEMRQKIRQLTQELSVSHAQQEYLE

SEQ ID NO: 19070 - protein, 8 aa, Artificial Sequence
  Synthetic polypeptide
VQQCFRSL

SEQ ID NO: 19071 - protein, 36 aa, Artificial Sequence
  Synthetic polypeptide
GHGIEGRRSGFESSSALDLYKQRVAELREWESVPCL

SEQ ID NO: 19072 - protein, 27 aa, Artificial Sequence
  Synthetic polypeptide
DLPRRAFGWDLEGLLPKNKDTSRRTCC

SEQ ID NO: 19073 - protein, 600 aa, Artificial Sequence
  Synthetic polypeptide
VSEEVAERLRGRVELCRHMRLRMKILFRICPEELLVGTLKDYSLRIRIPQEEHAANGPELLRKKRTTSAEKNTCQLYIQTDHLFFKYYGTREAVIAQISSHVKAIDTIYQTTDFSGIRNISFMVKRIRINTTADEKDPTNPFRFPNIGVEKFLELNSEQNHDDYCLAYVFTDRDFDDGVLGLAWVGAPSGSSGGICEKSKLYSDGKKKSLNTGIITVQNYGSHVPPKVSHITFAHEVGHNFGSPHDSGTECTPGESKNLGQKENGNYIMYARATSGDKLNNNKFSLCSIRNISQVLEKKRNNCFVESGQPICGNGMVEQGEECDCGYSDQCKDECCFDANQPEGRKCKLKPGKQCSPSQGPCCTAQCAFKSKSEKCRDDSDCAREGICNGFTALCPASDPKPNFTDCNRHTQVCINGQCAGSICEKYGLEECTCASSDGKDDKELCHVCCMKKMDPSTCASTGSVQWSRHFSGRTITLQPGSPCNDFRGYCDVFMRCRLVDADGPLARLKKAIFSPELYENIAEWIVAHWWAVLLMGIALIMLMAGFIKICSVHTPSSNPKLPPPKPLPGTLKRRRPPQPIQQPQRQRPRESYQMGHMRR

SEQ ID NO: 19074 - protein, 17 aa, Artificial Sequence
  Synthetic polypeptide
WQTGSTVFVGNGPGVSY

SEQ ID NO: 19075 - protein, 17 aa, Artificial Sequence
  Synthetic polypeptide
GRQGQLYLLVTDQGFLT

SEQ ID NO: 19076 - protein, 9 aa, Artificial Sequence
  Synthetic polypeptide
ADRVNCICW

SEQ ID NO: 19077 - protein, 168 aa, Artificial Sequence
  Synthetic polypeptide
GRQGQLYLLVTDQGFLTEEKVVWESLHNVDGDGNFCDSEFHLRPPSDPETVYKGQQDQIDQDYLMALSLQQEQQSQEINWEQIPEGISDLELAKKLQEEEDRRASQYYQEQEQAAAAAAAASTQAQQGQPAQASPSSGRQSGNSERKRKEPREKDKEKEKEKNSCVIL

SEQ ID NO: 19078 - protein, 167 aa, Artificial Sequence
  Synthetic polypeptide
GRQGQLYLLVTDQGFLTEEKVVWESLHNVDGDGNFCDSEFHLRPPSDPETVYKGQQDQIDQDYLMALSLQQEQQSQEINWEQIPEGISDLELAKKLQEEEDRRASQYYQEQEQAAAAAAAASTQAQGQPAQASPSSGRQSGNSERKRKEPREKDKEKEKEKNSCVIL

SEQ ID NO: 19079 - protein, 60 aa, Artificial Sequence
  Synthetic polypeptide
HFGRLRRADHLRSGVRNQPGQRGETPSVSTKNTKISQAWCLVPVIPATWEAEVKNMKQMS

SEQ ID NO: 19080 - protein, 8 aa, Artificial Sequence
  Synthetic polypeptide
FQLLGRLR

SEQ ID NO: 19081 - protein, 2 aa, Artificial Sequence
  Synthetic polypeptide
AR

SEQ ID NO: 19082 - protein, 974 aa, Artificial Sequence
  Synthetic polypeptide
WQDKIGHEILASVLTAPFSSFRQGKKHEADELSGDASVEDDAFIKDCELENQEAHEQDGNDELKDSEEFGENEEENVHSKELLSAEENKRAHELIEAEGIEDIEKEDIESQEIEAQEGEDDTFLTAQDGEEEENEKDIAGSGDGTQEVSKPLPSEGSLAEADHTAHEEMEAHTTVKEAEDDNISVTIQAEDAITLDFDGDDLLETGKNVKITDSEASKPKDGQDAIAQSPEKESKDYEMNANHKDGKKEDCVKGDPVEKEARESSKKAESGDKEKDTLKKGPSSTGASGQAKSSSKESKDSKTSSKDDKGSTSSTSGSSGSSTKNIWVSGLSSNTKAADLKNLFGKYGKVLSAKVVTNARSPGAKCYGIVTMSSSTEVSRCIAHLHRTELHGQLISVEKVKGDPSKKEMKKENDEKSSSRSSGDKKNTSDRSSKTQASVKKEEKRSSEKSEKKESKDTKKIEGKDEKNDNGASGQTSESIKKSEEKKRISSKSPGHMVILDQTKGDHCRPSRRGRYEKIHGRSKEKERASLDKKRDKDYRRKEILPFEKMKEQRLREHLVRFERLRRAMELRRRREIAERERRERERIRIIREREERERLQRERERLEIERQKLERERMERERLERERIRIEQERRKEAERIAREREELRRQQQQLRYEQEKRNSLKRPRDVDHRRDDPYWSENKKLSLDTDARFGHGSDYSRQQNRFNDFDHRERGRFPESSAVQSSSFERRDRFVGQSEGKKARPTARREDPSFERYPKNFSDSRRNEPPPPRNELRESDRREVRGERDERRTVIIHDRPDITHPRHPREAGPNPSRPTSWKSEGSMSTDKRETRVERPERSGREVSGHSVRGAPPGNRSSASGYGSREGDRGVITDRGGGSQHYPEERHVVERHGRDTSGPRKEWHGPPSQGPSYHDTRRMGDGRAGAGMITQHSSNASPINRIVQISGNSMPRGSGSGFKPFKGGPPRRF

SEQ ID NO: 19083 - protein, 17 aa, Artificial Sequence
  Synthetic polypeptide
QHHFQVLGKVKNMKQMS

SEQ ID NO: 19084 - protein, 117 aa, Artificial Sequence
  Synthetic polypeptide
WQDKIGHEILASVLTAPFSSFRQGKKHEADELSGDASVEDDAFIKEIEAQEGEDDTFLTAQDGEEEENEKALQRNLKTARHHLKMTKEVQVVLVVAVEAQLKISGLVDFHLIPKLLI

SEQ ID NO: 19085 - protein, 32 aa, Artificial Sequence
  Synthetic polypeptide
WQDKIGHEILASVLTAPFSSFRQGKKHEADEL

SEQ ID NO: 19086 - protein, 183 aa, Artificial Sequence
  Synthetic polypeptide
WQDKIGHEILASVLTAPFSSFRQGKKHEADELSGDASVEDDAFIKDCELENQEAHEQDGNDELKDSEEFGENEEENVHSKELLSAEENKRAHELIEAEGIEDIEKEDIESQEIEAQEGEDDTFLTAQDGEEEENEKALQRNLKTARHHLKMTKEVQVVLVVAVEAQLKISGLVDFHLIPKLLI

SEQ ID NO: 19087 - protein, 393 aa, Artificial Sequence
  Synthetic polypeptide
WQDKIGHEILASVLTAPFSSFRQGKKHEADELSGDASVEDDAFIKDCELENQEAHEQDGNDELKDSEEFGENEEENVHSKELLSAEENKRAHELIEAEGIEDIEKEDIESQEIEAQEGEDDTFLTAQDGEEEENEKEGSLAEADHTAHEEMEAHTTVKEAEDDNISVTIQAEDAITLDFDGDDLLETGKNVKITDSEASKPKDGQDAIAQSPEKESKDYEMNANHKDGKKEDCVKGDPVEKEARESSKKAESGDKEKDTLKKGPSSTGASGQAKSSSKESKDSKTSSKDDKGSTSSTSGSSGSSTKNIWVSGLSSNTKAADLKNLFGKYGKVLSAKVVTNARSPGAKCYGIVTMSSSTEVSRCIAHLHRTELHGQLISVEKVKGDPSKKEMKK

SEQ ID NO: 19088 - protein, 169 aa, Artificial Sequence
  Synthetic polypeptide
WQDKIGHEILASVLTAPFSSFRQGKKHEADELSGDASVEDDAFIKDCELENQEAHEQDGNDELKDSEEFGENEEENVHSKELLSAEENKRAHELIEAEGIEDIEKEDIESQEIEAQEGEDDTFLTAQDGEEEENEKDSEASKPKDGQDAIAQSPEKESKDYEMNANHKD

SEQ ID NO: 19089 - protein, 132 aa, Artificial Sequence
  Synthetic polypeptide
WQDKIGHEILASVLTAPFSSFRQGKKHEADELSGDASVEDDAFIKDGEEEENEKDIAGSGDGTQEVSKPLPSEGSLAEADHTAHEEMEAHTTVKEAEDDNISVTIQAEDAITLDFDGDDLLETGKNVKITDS

SEQ ID NO: 19090 - protein, 101 aa, Artificial Sequence
  Synthetic polypeptide
WQDKIGHEILASVLTAPFSSFRQGKKHEADELSGDASVEDDAFIKEIEAQEGEDDTFLTAQDGEEEENEKEGSLAEADHTAHEEMEAHTTVKEAEDDNISV

SEQ ID NO: 19091 - protein, 15 aa, Artificial Sequence
  Synthetic polypeptide
NSLSKKKEVLMKMLW

SEQ ID NO: 19092 - protein, 24 aa, Artificial Sequence
  Synthetic polypeptide
AEITPLHSSLGNKSETPSQKKKKY

SEQ ID NO: 19093 - protein, 736 aa, Artificial Sequence
  Synthetic polypeptide
SQLLGRLRQENGLNLGSRGCCEPRSRHCTPAWATRVKLPLKKKRSIDEDVVVIEASSTPQVTANEEINVTSTDSEVEIVTVGESYRSRSTLGHSRSHWSQGSSSHASRPQEPRNRSRISTVIQPLRQNAAEVVDLTVDEDEPTVVPTTSARMESQATSASINNSNPSTSEQASDTASAVTSSQPSTVSETSATLTSNSTTGTSIGDDSRRTTSSAVTETGPPAMPRLPSCCPQHSPCGGSSQNHHALGHPHTSCFQQHGHHFQHHHHHHHTPHPAVPVSPSFSDPACPVERPPQVQAPCGANSSSGTSYHEQQALPVDLSNSGIRSHGSGSFHGASAFDPCCPVSSSRAAIFGHQAAAAAPSQPLSSIDGYGSSMVAQPQPQPPPQPSLSSCRHYMPPPYASLTRPLHHQASACPHSHGNPPPQTQPPPQVDYVIPHPVHAFHSQISSHATSHPVAPPPPTHLASTAAPIPQHLPPTHQPISHHIPATAPPAQRLHPHEVMQRMEVQRRRMMQHPTRAHERPPPHPHRMHPNYGHGHHIHVPQTMSSHPRQAPERSAWELGIEAGVTAATYTPGALHPHLAHYHAPPRLHHLQLGALPLMVPDMAGYPHIRYISSGLDGTSFRGPFRGNFEELIHLEERLGNVNRGASQGTIERCTYPHKYKKRKLHCKQDGEEGTEEDTEEKCTICLSILEEGEDVRRLPCMHLFHQVCVDQWLITNKKCPICRVDIEAQLPSES

SEQ ID NO: 19094 - protein, 753 aa, Artificial Sequence
  Synthetic polypeptide
SQLLGRLRQENGLNLGSRGCCEPRSRHCTPAWATRVKLPLKKKRSIDEDVVVIEASSTPQVTANEEINVTSTDSEVEIVTVGESYRSRSTLGHSRSHWSQGSSSHASRPQEPRNRSRISTVIQPLRQNAAEVVDLTVDEDEPTVVPTTSARMESQATSASINNSNPSTSEQASDTASAVTSSQPSTVSETSATLTSNSTTGTSIGDDSRRTTSSAVTETGPPAMPRLPSCCPQHSPCGGSSQNHHALGHPHTSCFQQHGHHFQHHHHHHHTPHPAVPVSPSFSDPACPVERPPQVQAPCGANSSSGTSYHEQQALPVDLSNSGIRSHGSGSFHGASAFDPCCPVSSSRAAIFGHQAAAAAPSQPLSSIDGYGSSMVAQPQPQPPPQPSLSSCRHYMPPPYASLTRPLHHQASACPHSHGNPPPQTQPPPQVDYVIPHPVHAFHSQISSHATSHPVAPPPPTHLASTAAPIPQHLPPTHQPISHHIPATAPPAQRLHPHEVMQRMEVQRRRMMQHPTGLFVFCVSRRAHERPPPHPHRMHPNYGHGHHIHVPQTMSSHPRQAPERSAWELGIEAGVTAATYTPGALHPHLAHYHAPPRLHHLQLGALPLMVPDMAGYPHIRYISSGLDGTSFRGPFRGNFEELIHLEERLGNVNRGASQGTIERCTYPHKYKKVTTDWFSQRKLHCKQDGEEGTEEDTEEKCTICLSILEEGEDVRRLPCMHLFHQVCVDQWLITNKKCPICRVDIEAQLPSES

SEQ ID NO: 19095 - protein, 745 aa, Artificial Sequence
  Synthetic polypeptide
SQLLGRLRQENGLNLGSRGCCEPRSRHCTPAWATRVKLPLKKKRSIDEDVVVIEASSTPQVTANEEINVTSTDSEVEIVTVGESYRSRSTLGHSRSHWSQGSSSHASRPQEPRNRSRISTVIQPLRQNAAEVVDLTVDEDEPTVVPTTSARMESQATSASINNSNPSTSEQASDTASAVTSSQPSTVSETSATLTSNSTTGTSIGDDSRRTTSSAVTETGPPAMPRLPSCCPQHSPCGGSSQNHHALGHPHTSCFQQHGHHFQHHHHHHHTPHPAVPVSPSFSDPACPVERPPQVQAPCGANSSSGTSYHEQQALPVDLSNSGIRSHGSGSFHGASAFDPCCPVSSSRAAIFGHQAAAAAPSQPLSSIDGYGSSMVAQPQPQPPPQPSLSSCRHYMPPPYASLTRPLHHQASACPHSHGNPPPQTQPPPQVDYVIPHPVHAFHSQISSHATSHPVAPPPPTHLASTAAPIPQHLPPTHQPISHHIPATAPPAQRLHPHEVMQRMEVQRRRMMQHPTGLFVFCVSRRAHERPPPHPHRMHPNYGHGHHIHVPQTMSSHPRQAPERSAWELGIEAGVTAATYTPGALHPHLAHYHAPPRLHHLQLGALPLMVPDMAGYPHIRYISSGLDGTSFRGPFRGNFEELIHLEERLGNVNRGASQGTIERCTYPHKYKKRKLHCKQDGEEGTEEDTEEKCTICLSILEEGEDVRRLPCMHLFHQVCVDQWLITNKKCPICRVDIEAQLPSES

SEQ ID NO: 19096 - protein, 744 aa, Artificial Sequence
  Synthetic polypeptide
SQLLGRLRQENGLNLGSRGCCEPRSRHCTPAWATRVKLPLKKKRSIDEDVVVIEASSTPQVTANEEINVTSTDSEVEIVTVGESYRSRSTLGHSRSHWSQGSSSHASRPQEPRNRSRISTVIQPLRQNAAEVVDLTVDEDEPTVVPTTSARMESQATSASINNSNPSTSEQASDTASAVTSSQPSTVSETSATLTSNSTTGTSIGDDSRRTTSSAVTETGPPAMPRLPSCCPQHSPCGGSSQNHHALGHPHTSCFQQHGHHFQHHHHHHHTPHPAVPVSPSFSDPACPVERPPQVQAPCGANSSSGTSYHEQQALPVDLSNSGIRSHGSGSFHGASAFDPCCPVSSSRAAIFGHQAAAAAPSQPLSSIDGYGSSMVAQPQPQPPPQPSLSSCRHYMPPPYASLTRPLHHQASACPHSHGNPPPQTQPPPQVDYVIPHPVHAFHSQISSHATSHPVAPPPPTHLASTAAPIPQHLPPTHQPISHHIPATAPPAQRLHPHEVMQRMEVQRRRMMQHPTRAHERPPPHPHRMHPNYGHGHHIHVPQTMSSHPRQAPERSAWELGIEAGVTAATYTPGALHPHLAHYHAPPRLHHLQLGALPLMVPDMAGYPHIRYISSGLDGTSFRGPFRGNFEELIHLEERLGNVNRGASQGTIERCTYPHKYKKVTTDWFSQRKLHCKQDGEEGTEEDTEEKCTICLSILEEGEDVRRLPCMHLFHQVCVDQWLITNKKCPICRVDIEAQLPSES

SEQ ID NO: 19097 - protein, 207 aa, Artificial Sequence
  Synthetic polypeptide
SQLLGRLRQENGLNLGSRGCCEPRSRHCTPAWATRVKLPLKKKRSIDEDVVVIEASSTPQVTANEEINVTSTDSEVEIVTVGESYRSRSTLGHSRSHWSQGSSSHASRPQEPRNRSRISTVIQPLRQNAAEVVDLTVDEDEPTVVPTTSARMESQATSASINNSNPSTSEQASDTASAVTSSQPSTVSETSATLTSNSTTGTSIGGM

SEQ ID NO: 19098 - protein, 342 aa, Artificial Sequence
  Synthetic polypeptide
GRVQWLTPVIPALWEAEAGGSRGQEIETILANTGPSPTPEDVSMKEENLCQAFSDALLCKIEDIDNEDWENPQLCSDYVKDIYQYLRQLEVLQSINPHFLDGRDINGRMRAILVDWLVQVHSKFRLLQETLYMCVGIMDRFLQVQPVSRKKLQLVGITALLLASKYEEMFSPNIEDFVYITDNAYTSSQIREMETLILKELKFELGRPLPLHFLRRASKAGEVDVEQHTLAKYLMELTLIDYDMVHYHPSKVAAAASCLSQKVLGQGKWNLKQQYYTGYTENEVLEVMQHMAKNVVKVNENLTKFIAIKNKYASSKLLKISMIPQLNSKAVKDLASPLIGRS

SEQ ID NO: 19099 - protein, 34 aa, Artificial Sequence
  Synthetic polypeptide
SQHFGRPRRADREVRRSRPSWLTQVLLPHLRMSP

SEQ ID NO: 19100 - protein, 7 aa, Artificial Sequence
  Synthetic polypeptide
HRSFSHT

SEQ ID NO: 19101 - protein, 295 aa, Artificial Sequence
  Synthetic polypeptide
GRVQWLTPVIPALWEAEAGGSRGQEIETILANTGPSPTPEDVSMKEENLCQAFSDALLCKIEDIDNEDWENPQLCSDYVKDIYQYLRQLEVLQSINPHFLDGRDINGRMRAILVDWLVQVHSKFRLLQETLYMCVGIMDRFLQVQPVSRKKLQLVGITALLLASKYEEMFSPNIEDFVYITDNAYTSSQIREMETLILKELKFELGRPLPLHFLRRASKAGENLKQQYYTGYTENEVLEVMQHMAKNVVKVNENLTKFIAIKNKYASSKLLKISMIPQLNSKAVKDLASPLIGRS

SEQ ID NO: 19102 - protein, 56 aa, Artificial Sequence
  Synthetic polypeptide
PSSTPLSSYGTLGKQRCLPVPLAKPQCQAQWCGRHGATVQDHRELHRGESEEEIHG

SEQ ID NO: 19103 - protein, 42 aa, Artificial Sequence
  Synthetic polypeptide
LWHVREAKVSTSTTGKATMSSTVVWTTWCYCPRSQRTPSWRI

SEQ ID NO: 19104 - protein, 15 aa, Artificial Sequence
  Synthetic polypeptide
EPKSRYSRSRFVPGT

SEQ ID NO: 19105 - protein, 30 aa, Artificial Sequence
  Synthetic polypeptide
TPNLTTVYKIKHLHENQKAGTPGADSCPGQ

SEQ ID NO: 19106 - protein, 19 aa, Artificial Sequence
  Synthetic polypeptide
STFMRTKKQVLQEQIRARD

SEQ ID NO: 19107 - protein, 24 aa, Artificial Sequence
  Synthetic polypeptide
EPKSRYSRSRFVPGTTLAMELILP

SEQ ID NO: 19108 - protein, 31 aa, Artificial Sequence
  Synthetic polypeptide
TPNLTTVYKIKHLHENQKAGTPGADSCPGQH

SEQ ID NO: 19109 - protein, 44 aa, Artificial Sequence
  Synthetic polypeptide
STFMRTKKQVLQEQIRARDNISYGTNSALKTLEMRQLSGLGDLR

SEQ ID NO: 19110 - protein, 279 aa, Artificial Sequence
  Synthetic polypeptide
STFMRTKKQVLQEQIRARDNISYGTNSALKTLEMRQLSGLGDLRGRVARCDASIARLSAEHKTTYEGLQHLNKEQQAAKLILETKIKDAEGQISQLLNRVDLSISEQSTKLKMSHRDSNHQLQLLDTKFKGTVEELSNQILSARSWLQQEQERIEKELLQKIDQLSLIVKENSGASERDMEKKLSQMSARLDKIEEGQKKTFDGQRTRQEEEKMHGRITKLELQMNQNIKEMKAEVNAGFTAVYESIGSLRQVLEAKMKLDRDQLQKQIQLMQKPETPM

SEQ ID NO: 19111 - protein, 48 aa, Artificial Sequence
  Synthetic polypeptide
STFMRTKKQVLQEQIRARDNISYGTNSALKTLEMRQLSGLGDLRGRVA

SEQ ID NO: 19112 - protein, 28 aa, Artificial Sequence
  Synthetic polypeptide
STFMRTKKQVLQEQIRARDNISYGTNSA

SEQ ID NO: 19113 - protein, 21 aa, Artificial Sequence
  Synthetic polypeptide
EPKSRYSRSRFVPGTTLAMEL

SEQ ID NO: 19114 - protein, 26 aa, Artificial Sequence
  Synthetic polypeptide
STFMRTKKQVLQEQIRARDNISYGTN

SEQ ID NO: 19115 - protein, 22 aa, Artificial Sequence
  Synthetic polypeptide
EPKSRYSRSRFVPGTTLAMELI

SEQ ID NO: 19116 - protein, 19 aa, Artificial Sequence
  Synthetic polypeptide
DQRGQHDLYQKMIVLKQIY

SEQ ID NO: 19117 - protein, 16 aa, Artificial Sequence
  Synthetic polypeptide
GQEFETNVANMTFTRR

SEQ ID NO: 19118 - protein, 17 aa, Artificial Sequence
  Synthetic polypeptide
SQLLKLVDLLSPRPMCG

SEQ ID NO: 19119 - protein, 294 aa, Artificial Sequence
  Synthetic polypeptide
VQGQCVDEVTIVNILTNRSNAQRQDIAFAYQRRTKKELASALKSALSGHLETVILGLLKTPAQYDASELKASMKGLGTDEDSLIEIICSRTNQELQEINRVYKEMYKTDLEKDIISDTSGDFRKLMVALAKGRRAEDGSVIDYELIDQDARDLYDAGVKRKGTDVPKWISIMTERSVPHLQKVFDRYKSYSPYDMLESIRKEVKGDLENAFLNLVQCIQNKPLYFADRLYDSMKGKGTRDKVLIRIMVSRSEVDMLKIRSEFKRKYGKSLYYYIQQDTKGDYQKALLYLCGGDD

SEQ ID NO: 19120 - protein, 32 aa, Artificial Sequence
  Synthetic polypeptide
GRGRGPVVPAAQASGSLESKANVWMRSPLSTF

SEQ ID NO: 19121 - protein, 185 aa, Artificial Sequence
  Synthetic polypeptide
VQGQCVDEVTIVNILTNRSNAQRQDIAFAYQRRTKKELASALKSALSGHLETVILGLLKTPAQYDASELKASMKGLGTDEDSLIEIICSRTNQELQEINRVYKEMYKTDLEKDIISDTSGDFRKLMVALAKGRRAEDGSVIDYELIDQDARDLYDAGVKRKGTDVPKWISIMTERSVPHLQKGGI

SEQ ID NO: 19122 - protein, 234 aa, Artificial Sequence
  Synthetic polypeptide
VQGQCVDEVTIVNILTNRSNAQRQDIAFAYQRRTKKELASALKSALSGHLETVILGLLKTPAQYDASELKASMKGLGTDEDSLIEIICSRTNQELQEINRVYKEMYKTDLEKDIISDTSGDFRKLMVALAKGRRAEDGSVIDYELIDQDARDLYDAGVKRKGTDVPKWISIMTERSVPHLQKVFDRYKSYSPYDMLESIRKEVKGDLENAFLNLVQCIQNKPLYFADRLYDSMK

SEQ ID NO: 19123 - protein, 211 aa, Artificial Sequence
  Synthetic polypeptide
VQGQCVDEVTIVNILTNRSNAQRQDIAFAYQRRTKKELASALKSALSGHLETVILGLLKTPAQYDASELKASMKGLGTDEDSLIEIICSRTNQELQEINRVYKEMYKTDLEKDIISDTSGDFRKLMVALAKGRRAEDGSVIDYELIDQDARDLYDAGVKRKGTDVPKWISIMTERSVPHLQKVFDRYKSYSPYDMLESIRKEVKGDLENAF

SEQ ID NO: 19124 - protein, 182 aa, Artificial Sequence
  Synthetic polypeptide
VQGQCVDEVTIVNILTNRSNAQRQDIAFAYQRRTKKELASALKSALSGHLETVILGLLKTPAQYDASELKASMKGLGTDEDSLIEIICSRTNQELQEINRVYKEMYKTDLEKDIISDTSGDFRKLMVALAKGRRAEDGSVIDYELIDQDARDLYDAGVKRKGTDVPKWISIMTERSVPHLQK

SEQ ID NO: 19125 - protein, 87 aa, Artificial Sequence
  Synthetic polypeptide
VQGQCVDEVTIVNILTNRSNAQRQDIAFAYQRRTKKELASALKSALSGHLETVILGLLKTPAQYDASELKASMKVNAWAGNRRGLSH

SEQ ID NO: 19126 - protein, 131 aa, Artificial Sequence
  Synthetic polypeptide
VQGQCVDEVTIVNILTNRSNAQRQDIAFAYQRRTKKELASALKSALSGHLETVILGLLKTPAQYDASELKASMKGLGTDEDSLIEIICSRTNQELQEINRVYKEMYKTDLEKDIISDTSGDFRKLMVALAK

SEQ ID NO: 19127 - protein, 104 aa, Artificial Sequence
  Synthetic polypeptide
VQGQCVDEVTIVNILTNRSNAQRQDIAFAYQRRTKKELASALKSALSGHLETVILGLLKTPAQYDASELKASMKGLGTDEDSLIEIICSRTNQELQEINRVYKE

SEQ ID NO: 19128 - protein, 89 aa, Artificial Sequence
  Synthetic polypeptide
VQGQCVDEVTIVNILTNRSNAQRQDIAFAYQRRTKKELASALKSALSGHLETVILGLLKTPAQYDASELKASMKGLGTDEDSLIEIICS

SEQ ID NO: 19129 - protein, 88 aa, Artificial Sequence
  Synthetic polypeptide
VQGQCVDEVTIVNILTNRSNAQRQDIAFAYQRRTKKELASALKSALSGHLETVILGLLKTPAQYDASELKASMKGLGTDEDSLIEIIC

SEQ ID NO: 19130 - protein, 74 aa, Artificial Sequence
  Synthetic polypeptide
VQGQCVDEVTIVNILTNRSNAQRQDIAFAYQRRTKKELASALKSALSGHLETVILGLLKTPAQYDASELKASMK

SEQ ID NO: 19131 - protein, 73 aa, Artificial Sequence
  Synthetic polypeptide
VQGQCVDEVTIVNILTNRSNAQRQDIAFAYQRRTKKELASALKSALSGHLETVILGLLKTPAQYDASELKASM

SEQ ID NO: 19132 - protein, 65 aa, Artificial Sequence
  Synthetic polypeptide
VQGQCVDEVTIVNILTNRSNAQRQDIAFAYQRRTKKELASALKSALSGHLETVILGLLKTPAQYD

SEQ ID NO: 19133 - protein, 36 aa, Artificial Sequence
  Synthetic polypeptide
VQGQCVDEVTIVNILTNRSNAQRQDIAFAYQRRTKK

SEQ ID NO: 19134 - protein, 20 aa, Artificial Sequence
  Synthetic polypeptide
VQGQCVDEVTIVNILTNRSN

SEQ ID NO: 19135 - protein, 808 aa, Artificial Sequence
  Synthetic polypeptide
MHKILRACIEQVKKYSEFYTLHEVTSLMGFFPFRVEMGLKLEKTLLALGSVKYVKTVFPSMPIKLQLSKDDIATIETSEQTAEAMHYDISKDPNAEKLVSRYHPQIALTSQSLFTLLNNHGPTYKEQWEIPVCIQVIPVAGSKPVKVIYINSPLPQKKMTMRERNQIFHEVPLKFMMSKNTSVPVSAVFMDKPEEFISEMDMSCEVNECRKIESLENLYLDFDDDVTELETFGVTTTKVSKSPSPASTSTVPNMTDAPTAPKAGTTTVAPSAPDISANSRSLSQILMEQLQKEKQLVTGMDGGPEECKNKDDQGFESCEKVSNSDKPLIQDSDLKTSDALQLENSQEIETSNKNDMTIDILHADGERPNVLENLDNSKEKTVGSEAAKTEDTVLCSSDTDEECLIIDTECKNNSDGKTAVVGSNLSSRPASPNSSSGQASVGNQTNTACSPEESCVLKKPIKRVYKKFDPVGEILKMQDELLKPISRKVPELPLMNLENSKQPSVSEQLSGPSDSSSWPKSGWPSAFQKPKGRLPYELQDYVEDTSEYLAPQEGNFVYKLFSLQDLLLLVRCSVQRIETRPRSKKRKKIRRQFPVYVLPKVEYQACYGVEALTESELCRLWTESLLHSNSSFYVGHIDAFTSKLFLLEEITSEELKEKLSALKISNLFNILQHILKKLSSLQEGSYLLSHAAEDSSLLIYKASDGKVTRTAYNLYKTHCGLPGVPSSLSVPWVPLDPSLLLPYHIHHGRIPCTFPPKSLDTTTQQKIGGTRMPTRSHRNPVSMETKSSCLPAQQVETEGVAPHKRKIT

SEQ ID NO: 19136 - protein, 31 aa, Artificial Sequence
  Synthetic polypeptide
DIFGCYNWWNATSIYCVEAKDAAKHTKCIKF

SEQ ID NO: 19137 - protein, 209 aa, Artificial Sequence
  Synthetic polypeptide
MHKILRACIEQVKKYSEFYTLHEVTSLMGFFPFRVEMGLKLEKTLLALGSVKYVKTVFPSMPIKLQLSKDDIATIETSEQTAEAMHYDISKDPNAEKLVSRYHPQIALTSQSLFTLLNNHGPTYKEQWEIPVCIQVIPVAGSKPVKVIYINSPLPQKKMTMRERNQIFHEVPLKFMMSKNTSVPVSAVFMDKPEEFISEMDVCNAFFFP

SEQ ID NO: 19138 - protein, 164 aa, Artificial Sequence
  Synthetic polypeptide
MHKILRACIEQVKKYSEFYTLHEVTSLMGFFPFRVEMGLKLEKTLLALGSVKYVKTVFPSMPIKLQLSKDDIATIETSEQTAEAMHYDISKDPNAEKLVSRYHPQIALTSQSLFTLLNNHGPTYKEQWEIPVCIQVIPVAGSKPVKVIYINSPLPQKKMTMRER

SEQ ID NO: 19139 - protein, 5 aa, Artificial Sequence
  Synthetic polypeptide
MHKIL

SEQ ID NO: 19140 - protein, 57 aa, Artificial Sequence
  Synthetic polypeptide
RQQNEVMDVDSFHMMQTSRYTGYHFWMGAREFCFSPMMLPWFPKHCRQKKWNRLIMK

SEQ ID NO: 19141 - protein, 719 aa, Artificial Sequence
  Synthetic polypeptide
SDGCGQFPYDANIQIHWVSFLDGRQRVLLFTDDVALVSKALQAEEMEQADYEITLSLHSLGLSLVNNESKQEVSYIGITSSGVVWEVKPKQKWKPFSQKQIILLEQSYQKHQISRDHGWIKLDNNFEVNFDKDPMEMRLPIRSPIKRDFLSGIQIEFKQSSHQRSLRARLYWLQVDNQLPGAMFPVVFHPVAPPKSIALDSEPKPFIDVSVITRFNEYSKVLQFKYFMVLIQEMALKIDQGFLGAIIALFTPTTDPEAERRRTKLIQQDIDALNAELMETSMTDMSILSFFEHFHISPVKLHLSLSLGSGGEESDKEKQEMFAVHSVNLLLKSIGATLTDVDDLIFKLAYYEIRYQFYKRDQLIWSVVRHYSEQFLKQMYVLVLGLDVLGNPFGLIRGLSEGVEALFYEPFQGAVQGPEEFAEGLVIGVRSLFGHTVGGAAGVVSRITGSVGKGLAAITMDKEYQQKRREELSRQPRDFGDSLARGGKGFLRGVVGGVTGIITKPVEGAKKEGAAGFFKGIGKGLVGAVARPTGGIVDMASSTFQGIQRAAESTEEVSSLRPPRLIHEDGIIRPYDRQESEGSDLLENHIKKLEGETYRYHCAIPGSKKTILMVTNRRVLCIKEVEILGLMCVDWQCPFEDFVFPPSVSENVLKISVKEQGLFHKKDSANQGCVRKVYLKDTATAERACNAIEDAQSTRQQQKLMKQSSVRLLRPQLPS

SEQ ID NO: 19142 - protein, 594 aa, Artificial Sequence
  Synthetic polypeptide
SDGCGQFPYDANIQIHWVSFLDGRQRVLLFTDDVALVSKALQAEEMEQADYEITLSLHSLGLSLVNNESKQEVSYIGITSSGVVWEVKPKQKWKPFSQKQIILLEQSYQKHQISRDHGWIKLDNNFEVNFDKDPMEMRLPIRSPIKRDFLSGIQIEFKQSSHQRSLRARLYWLQVDNQLPGAMFPVVFHPVAPPKSIALDSEPKPFIDVSVITRFNEYSKVLQFKYFMVLIQEMALKIDQGFLGAIIALFTPTTDPEAERRRTKLIQQDIDALNAELMETSMTDMSILSFFEHFHISPVKLHLSLSLGSGGEESDKEKQEMFAVHSVNLLLKSIGATLTDVDDLIFKLAYYEIRYQFYKRDQLIWSVVRHYSEQFLKQMYVLVLGLDVLGNPFGLIRGLSEGVEALFYEPFQGAVQGPEEFAEGLVIGVRSLFGHTVGGAAGVVSRITGSVGKGLAAITMDKEYQQKRREELSRQPRDFGDSLARGGKGFLRGVVGGVTGIITKPVEGAKKEGAAGFFKGIGKGLVGAVARPTGGIVDMASSTFQGIQRAAESTEEVSSLRPPRLIHEDGIIRPYDRQESEGSDLLEQELEIQE

SEQ ID NO: 19143 - protein, 55 aa, Artificial Sequence
  Synthetic polypeptide
EKARMDVDSFHMMQTSRYTGYHFWMGAREFCFSPMMLPWFPKHCRQKKWNRLIMK

SEQ ID NO: 19144 - protein, 13 aa, Artificial Sequence
  Synthetic polypeptide
NKRKQGWMWTVSI

SEQ ID NO: 19145 - protein, 729 aa, Artificial Sequence
  Synthetic polypeptide
RHDNYEIRESKDGCGQFPYDANIQIHWVSFLDGRQRVLLFTDDVALVSKALQAEEMEQADYEITLSLHSLGLSLVNNESKQEVSYIGITSSGVVWEVKPKQKWKPFSQKQIILLEQSYQKHQISRDHGWIKLDNNFEVNFDKDPMEMRLPIRSPIKRDFLSGIQIEFKQSSHQRSLRARLYWLQVDNQLPGAMFPVVFHPVAPPKSIALDSEPKPFIDVSVITRFNEYSKVLQFKYFMVLIQEMALKIDQGFLGAIIALFTPTTDPEAERRRTKLIQQDIDALNAELMETSMTDMSILSFFEHFHISPVKLHLSLSLGSGGEESDKEKQEMFAVHSVNLLLKSIGATLTDVDDLIFKLAYYEIRYQFYKRDQLIWSVVRHYSEQFLKQMYVLVLGLDVLGNPFGLIRGLSEGVEALFYEPFQGAVQGPEEFAEGLVIGVRSLFGHTVGGAAGVVSRITGSVGKGLAAITMDKEYQQKRREELSRQPRDFGDSLARGGKGFLRGVVGGVTGIITKPVEGAKKEGAAGFFKGIGKGLVGAVARPTGGIVDMASSTFQGIQRAAESTEEVSSLRPPRLIHEDGIIRPYDRQESEGSDLLENHIKKLEGETYRYHCAIPGSKKTILMVTNRRVLCIKEVEILGLMCVDWQCPFEDFVFPPSVSENVLKISVKEQGLFHKKDSANQGCVRKVYLKDTATAERACNAIEDAQSTRQQQKLMKQSSVRLLRPQLPS

SEQ ID NO: 19146 - protein, 604 aa, Artificial Sequence
  Synthetic polypeptide
RHDNYEIRESKDGCGQFPYDANIQIHWVSFLDGRQRVLLFTDDVALVSKALQAEEMEQADYEITLSLHSLGLSLVNNESKQEVSYIGITSSGVVWEVKPKQKWKPFSQKQIILLEQSYQKHQISRDHGWIKLDNNFEVNFDKDPMEMRLPIRSPIKRDFLSGIQIEFKQSSHQRSLRARLYWLQVDNQLPGAMFPVVFHPVAPPKSIALDSEPKPFIDVSVITRFNEYSKVLQFKYFMVLIQEMALKIDQGFLGAIIALFTPTTDPEAERRRTKLIQQDIDALNAELMETSMTDMSILSFFEHFHISPVKLHLSLSLGSGGEESDKEKQEMFAVHSVNLLLKSIGATLTDVDDLIFKLAYYEIRYQFYKRDQLIWSVVRHYSEQFLKQMYVLVLGLDVLGNPFGLIRGLSEGVEALFYEPFQGAVQGPEEFAEGLVIGVRSLFGHTVGGAAGVVSRITGSVGKGLAAITMDKEYQQKRREELSRQPRDFGDSLARGGKGFLRGVVGGVTGIITKPVEGAKKEGAAGFFKGIGKGLVGAVARPTGGIVDMASSTFQGIQRAAESTEEVSSLRPPRLIHEDGIIRPYDRQESEGSDLLEQELEIQE

SEQ ID NO: 19147 - protein, 3581 aa, Artificial Sequence
  Synthetic polypeptide
YISKGIEVSMSKRCQHSLVHFSTIHYREDCPSVDEWVTDPKRPLSFGVTLGELSLLTANEHWTPCILNEADKIIYKLIRLDSLSAYWNVNCSMSYQRSREQILDQLKNEILTSGNIPPNYQYIFQPISASAKLYMNPYAESELKTPKLDCNIEIQNIAIELTKPQYLSMIDLLESVDYMVRNAPYRKYKPYLPLHTNGRRWWKYAIDSVLEVHIRRYTQMWSWSNIKKHRQLLKSYKIAYKNKLTQSKVSEEIQKEIQDLEKTLDVFNIILARQQAQVEVIRSGQKLRKKSADTGEKRGGWFSGLWGKKESKKKDEESLIPETIDDLMTPEEKDKLFTAIGYSESTHNLTLPKQYVAHIMTLKLVSTSVTIRENKNIPEILKIQIIGLGTQVSQRPGAQALKVEAKLEHWYITGLRQQDIVPSLVASIGDTTSSLLKIKFETNPEDSPADQTLIVQSQPVEVIYDAKTVNAVVEFFQSNKGLDLEQITSATLMKLEEIKERTATGLTHIIETRKVLDLRINLKPSYLVVPQTGFHHEKSDLLILDFGTFQLNSKDQGLQKTTNSSLEEIMDKAYDKFDVEIKNVQLLFARAEETWKKCRFQHPSTMHILQPMDIHVELAKAMVEKDIRMARFKVSGGLPLMHVRISDQKMKDVLYLMNSIPLPQKSSAQSPERQVSSIPIISGGTKGLLGTSLLLDTVESESDDEYFDAEDGEPQTCKSMKGSELKKAAEVPNEELINLLLKFEIKEVILEFTKQQKEEDTILVFNVTQLGTEATMRTFDLTVVSYLKKISLDYHEIEGSKRKPLHLISSSDKPGLDLLKVEYIKADKNGPSFQTAFGKTEQTVKVAFSSLNLLLQTQALVASINYLTTIIPSDDQSISVAKEVQISTEKQQKNSTLPKAIVSSRDSDIIDFRLFAKLNAFCVIVCNEKNNIAEIKIQGLDSSLSLQSRKQSLFARLENIIVTDVDPKTVHKKAVSIMGNEVFRFNLDLYPDATEGDLYTDMSKVDGVLSLNVGCIQIVYLHKFLMSLLNFLNNFQTAKESLSAATAQAAERAATSVKDLAQRSFRVSINIDLKAPVIVIPQSSISTNAVVVDLGLIRVHNQFSLVSDEDYLNPPVIDRMDVQLTKLTLYRTVIQPGIYHPDIQLLHPINLEFLVNRNLAASWYHKVPVVEIKGHLDSMNVSLNQEDLNLLFRILTENLCEGTEDLDKVKPRVQETGEIKEPLEISISQDVHDSKNTLTTGVEEIRSVDIINMLLNFEIKEVVVTLMKKSEKKGRPLHELNVLQLGMEAKVKTYDMTAKAYLKKISMQCFDFTDSKGEPLHIINSSNVTDEPLLKMLLTKADSDGPEFKTIHDSTKQRLKVSFASLDLVLHLEALLSFMDFLSSAAPFSEPSSSEKESELKPLVGESRSIAVKAVSSNISQKDVFDLKITAELNAFNVFVCDQKCNIADIKIHGMDASISVKPKQTDVFARLKDIIVMNVDLQSIHKKAVSILGDEVFRFQLTLYPDATEGEAYADMSKVDGKLSFKVGCIQIVYVHKFFMSLLNFLNNFQTAKEALSTATVQAAERAASSMKDLAQKSFRLLMDINLKAPVIIIPQSSVSPNAVIADLGLIRVENKFSLVPMEHYSLPPVIDKMNIELTQLKLSRTILQASLPQNDIEILKPVNMLLSIQRNLAAAWYVQIPGMEIKGKLKPMQVALSEDDLTVLMKILLENLGEASSQPSPTQSVQETVRVRKVDVSSVPDHLKEQEDWTDSKLSMNQIVSLQFDFHFESLSIILYNNDINQESGVAFHNDSFQLGELRLHLMASSGKMFKDGSMNVSVKLKTCTLDDLREGIERATSRMIDRKNDQDNNSSMIDISYKQDKNGSQIDAVLDKLYVCASVEFLMTVADFFIKAVPQSPENVAKETQILPRQTATGKVKIEKDDSVRPNMTLKAMITDPEVVFVASLTKADAPALTASFQCNLSLSTSKLEQMMEASVRDLKVLACPFLREKRGKNITTVLQPCSLFMEKCTWASGKQNINIMVKEFIIKISPIILNTVLTIMAALSPKTKEDGSKDTSKEMENLWGIKSINDYNTWFLGVDTATEITESFKGIEHSLIEENCGVVVESIQVTLECGLGHRTVPLLLAESKFSGNIKNWTSLMAAVADVTLQVHYYNEIHAVWEPLIERVEGKRQWNLRLDVKKNPVQDKSLLPGDDFIPEPQMAIHISSGNTMNITISKSCLNVFNNLAKGFSEGTASTFDYSLKDRAPFTVKNAVGVPIKVKPNCNLRVMGFPEKSDIFDVDAGQNLELEYASMVPSSQGNLSILSRQESSFFTLTIVPHGYTEVANIPVARPGRRLYNVRNPNASHSDSVLVQIDATEGNKVITLRSPLQIKNHFSIAFIIYKFVKNVKLLERIGIARPEEEFHVPLDSYRCQLFIQPAGILEHQYKESTTYISWKEELHRSREVRCMLQCPSVEVSFLPLIVNTVALPDELSYICTHGEDWDVAYIIHLYPSLTLRNLLPYSLRYLLEGTAETHELAEGSTADVLHSRISGEIMELVLVKYQGKNWNGHFRIRDTLPEFFPVCFSSDSTEVTTVDLSVHVRRIGSRMVLSVFSPYWLINKTTRVLQYRSEDIHVKHPADFRDIILFSFKKKNIFTKNKVQLKISTSAWSSSFSLDTVGSYGCVKCPANNMEYLVGVSIKMSSFNLSRIVTLTPFCTIANKSSLELEVGEIASDGSMPTNKWNYIASSECLPFWPESLSGKLCVRVVGCEGSSKPFFYNRQDNGTLLSLEDLNGGILVDVNTAEHSTVITFSDYHEGSAPALIMNHTPWDILTYKQSGSPEEMVLLPRQARLFAWADPTGTRKLTWTYAANVGEHDLLKDGCGQFPYDANIQIHWVSFLDGRQRVLLFTDDVALVSKALQAEEMEQADYEITLSLHSLGLSLVNNESKQEVSYIGITSSGVVWEVKPKQKWKPFSQKQIILLEQSYQKHQISRDHGWIKLDNNFEVNFDKDPMEMRLPIRSPIKRDFLSGIQIEFKQSSHQRSLRARLYWLQVDNQLPGAMFPVVFHPVAPPKSIALDSEPKPFIDVSVITRFNEYSKVLQFKYFMVLIQEMALKIDQGFLGAIIALFTPTTDPEAERRRTKLIQQDIDALNAELMETSMTDMSILSFFEHFHISPVKLHLSLSLGSGGEESDKEKQEMFAVHSVNLLLKSIGATLTDVDDLIFKLAYYEIRYQFYKRDQLIWSVVRHYSEQFLKQMYVLVLGLDVLGNPFGLIRGLSEGVEALFYEPFQGAVQGPEEFAEGLVIGVRSLFGHTVGGAAGVVSRITGSVGKGLAAITMDKEYQQKRREELSRQPRDFGDSLARGGKGFLRGVVGGVTGIITKPVEGAKKEGAAGFFKGIGKGLVGAVARPTGGIVDMASSTFQGIQRAAESTEEVSSLRPPRLIHEDGIIRPYDRQESEGSDLLENHIKKLEGETYRYHCAIPGSKKTILMVTNRRVLCIKEVEILGLMCVDWQCPFEDFVFPPSVSENVLKISVKEQGLFHKKDSANQGCVRKVYLKDTATAERACNAIEDAQSTRQQQKLMKQSSVRLLRPQLPS

SEQ ID NO: 19148 - protein, 55 aa, Artificial Sequence
  Synthetic polypeptide
IYPKELKSVCQRDVSIPLFISALFTIEKIAHQWMNGSLIQSGLFHLVSHWESLVY

SEQ ID NO: 19149 - protein, 3 aa, Artificial Sequence
  Synthetic polypeptide
MGH

SEQ ID NO: 19150 - protein, 3456 aa, Artificial Sequence
  Synthetic polypeptide
YISKGIEVSMSKRCQHSLVHFSTIHYREDCPSVDEWVTDPKRPLSFGVTLGELSLLTANEHWTPCILNEADKIIYKLIRLDSLSAYWNVNCSMSYQRSREQILDQLKNEILTSGNIPPNYQYIFQPISASAKLYMNPYAESELKTPKLDCNIEIQNIAIELTKPQYLSMIDLLESVDYMVRNAPYRKYKPYLPLHTNGRRWWKYAIDSVLEVHIRRYTQMWSWSNIKKHRQLLKSYKIAYKNKLTQSKVSEEIQKEIQDLEKTLDVFNIILARQQAQVEVIRSGQKLRKKSADTGEKRGGWFSGLWGKKESKKKDEESLIPETIDDLMTPEEKDKLFTAIGYSESTHNLTLPKQYVAHIMTLKLVSTSVTIRENKNIPEILKIQIIGLGTQVSQRPGAQALKVEAKLEHWYITGLRQQDIVPSLVASIGDTTSSLLKIKFETNPEDSPADQTLIVQSQPVEVIYDAKTVNAVVEFFQSNKGLDLEQITSATLMKLEEIKERTATGLTHIIETRKVLDLRINLKPSYLVVPQTGFHHEKSDLLILDFGTFQLNSKDQGLQKTTNSSLEEIMDKAYDKFDVEIKNVQLLFARAEETWKKCRFQHPSTMHILQPMDIHVELAKAMVEKDIRMARFKVSGGLPLMHVRISDQKMKDVLYLMNSIPLPQKSSAQSPERQVSSIPIISGGTKGLLGTSLLLDTVESESDDEYFDAEDGEPQTCKSMKGSELKKAAEVPNEELINLLLKFEIKEVILEFTKQQKEEDTILVFNVTQLGTEATMRTFDLTVVSYLKKISLDYHEIEGSKRKPLHLISSSDKPGLDLLKVEYIKADKNGPSFQTAFGKTEQTVKVAFSSLNLLLQTQALVASINYLTTIIPSDDQSISVAKEVQISTEKQQKNSTLPKAIVSSRDSDIIDFRLFAKLNAFCVIVCNEKNNIAEIKIQGLDSSLSLQSRKQSLFARLENIIVTDVDPKTVHKKAVSIMGNEVFRFNLDLYPDATEGDLYTDMSKVDGVLSLNVGCIQIVYLHKFLMSLLNFLNNFQTAKESLSAATAQAAERAATSVKDLAQRSFRVSINIDLKAPVIVIPQSSISTNAVVVDLGLIRVHNQFSLVSDEDYLNPPVIDRMDVQLTKLTLYRTVIQPGIYHPDIQLLHPINLEFLVNRNLAASWYHKVPVVEIKGHLDSMNVSLNQEDLNLLFRILTENLCEGTEDLDKVKPRVQETGEIKEPLEISISQDVHDSKNTLTTGVEEIRSVDIINMLLNFEIKEVVVTLMKKSEKKGRPLHELNVLQLGMEAKVKTYDMTAKAYLKKISMQCFDFTDSKGEPLHIINSSNVTDEPLLKMLLTKADSDGPEFKTIHDSTKQRLKVSFASLDLVLHLEALLSFMDFLSSAAPFSEPSSSEKESELKPLVGESRSIAVKAVSSNISQKDVFDLKITAELNAFNVFVCDQKCNIADIKIHGMDASISVKPKQTDVFARLKDIIVMNVDLQSIHKKAVSILGDEVFRFQLTLYPDATEGEAYADMSKVDGKLSFKVGCIQIVYVHKFFMSLLNFLNNFQTAKEALSTATVQAAERAASSMKDLAQKSFRLLMDINLKAPVIIIPQSSVSPNAVIADLGLIRVENKFSLVPMEHYSLPPVIDKMNIELTQLKLSRTILQASLPQNDIEILKPVNMLLSIQRNLAAAWYVQIPGMEIKGKLKPMQVALSEDDLTVLMKILLENLGEASSQPSPTQSVQETVRVRKVDVSSVPDHLKEQEDWTDSKLSMNQIVSLQFDFHFESLSIILYNNDINQESGVAFHNDSFQLGELRLHLMASSGKMFKDGSMNVSVKLKTCTLDDLREGIERATSRMIDRKNDQDNNSSMIDISYKQDKNGSQIDAVLDKLYVCASVEFLMTVADFFIKAVPQSPENVAKETQILPRQTATGKVKIEKDDSVRPNMTLKAMITDPEVVFVASLTKADAPALTASFQCNLSLSTSKLEQMMEASVRDLKVLACPFLREKRGKNITTVLQPCSLFMEKCTWASGKQNINIMVKEFIIKISPIILNTVLTIMAALSPKTKEDGSKDTSKEMENLWGIKSINDYNTWFLGVDTATEITESFKGIEHSLIEENCGVVVESIQVTLECGLGHRTVPLLLAESKFSGNIKNWTSLMAAVADVTLQVHYYNEIHAVWEPLIERVEGKRQWNLRLDVKKNPVQDKSLLPGDDFIPEPQMAIHISSGNTMNITISKSCLNVFNNLAKGFSEGTASTFDYSLKDRAPFTVKNAVGVPIKVKPNCNLRVMGFPEKSDIFDVDAGQNLELEYASMVPSSQGNLSILSRQESSFFTLTIVPHGYTEVANIPVARPGRRLYNVRNPNASHSDSVLVQIDATEGNKVITLRSPLQIKNHFSIAFIIYKFVKNVKLLERIGIARPEEEFHVPLDSYRCQLFIQPAGILEHQYKESTTYISWKEELHRSREVRCMLQCPSVEVSFLPLIVNTVALPDELSYICTHGEDWDVAYIIHLYPSLTLRNLLPYSLRYLLEGTAETHELAEGSTADVLHSRISGEIMELVLVKYQGKNWNGHFRIRDTLPEFFPVCFSSDSTEVTTVDLSVHVRRIGSRMVLSVFSPYWLINKTTRVLQYRSEDIHVKHPADFRDIILFSFKKKNIFTKNKVQLKISTSAWSSSFSLDTVGSYGCVKCPANNMEYLVGVSIKMSSFNLSRIVTLTPFCTIANKSSLELEVGEIASDGSMPTNKWNYIASSECLPFWPESLSGKLCVRVVGCEGSSKPFFYNRQDNGTLLSLEDLNGGILVDVNTAEHSTVITFSDYHEGSAPALIMNHTPWDILTYKQSGSPEEMVLLPRQARLFAWADPTGTRKLTWTYAANVGEHDLLKDGCGQFPYDANIQIHWVSFLDGRQRVLLFTDDVALVSKALQAEEMEQADYEITLSLHSLGLSLVNNESKQEVSYIGITSSGVVWEVKPKQKWKPFSQKQIILLEQSYQKHQISRDHGWIKLDNNFEVNFDKDPMEMRLPIRSPIKRDFLSGIQIEFKQSSHQRSLRARLYWLQVDNQLPGAMFPVVFHPVAPPKSIALDSEPKPFIDVSVITRFNEYSKVLQFKYFMVLIQEMALKIDQGFLGAIIALFTPTTDPEAERRRTKLIQQDIDALNAELMETSMTDMSILSFFEHFHISPVKLHLSLSLGSGGEESDKEKQEMFAVHSVNLLLKSIGATLTDVDDLIFKLAYYEIRYQFYKRDQLIWSVVRHYSEQFLKQMYVLVLGLDVLGNPFGLIRGLSEGVEALFYEPFQGAVQGPEEFAEGLVIGVRSLFGHTVGGAAGVVSRITGSVGKGLAAITMDKEYQQKRREELSRQPRDFGDSLARGGKGFLRGVVGGVTGIITKPVEGAKKEGAAGFFKGIGKGLVGAVARPTGGIVDMASSTFQGIQRAAESTEEVSSLRPPRLIHEDGIIRPYDRQESEGSDLLEQELEIQE

SEQ ID NO: 19151 - protein, 34 aa, Artificial Sequence
  Synthetic polypeptide
DVGSASAPPPRLGCEERLCPAVTPSGRMRWAHRA

SEQ ID NO: 19152 - protein, 5 aa, Artificial Sequence
  Synthetic polypeptide
PRLGG

SEQ ID NO: 19153 - protein, 440 aa, Artificial Sequence
  Synthetic polypeptide
GAPLPCRDPVWEDEVGAPGIVVGVSVDGKEVWSEGLGYADVENRVPCKPETVMRIASISKSLTMVALAKLWEAGKLDLDIPVQHYVPEFPEKEYEGEKVSVTTRLLISHLSGIRHYEKDIKKVKEEKAYKALKMMKENVAFEQEKEGKSNEKNDFTKFKTEQENEAKCRNSKPGKKKNDFEQGELYLREKFENSIESLRLFKNDPLFFKPGSQFLYSTFGYTLLAAIVERASGCKYLDYMQKIFHDLDMLTTVQEENEPVIYNRARFYVYNKKKRLVNTPYVDNSYKWAGGGFLSTVGDLLKFGNAMLYGYQVGLFKNSNENLLPGYLKPETMVMMWTPVPNTEMSWDKEGKYAMAWGVVERKQTYGSCRKQRHYASHTGGAVGASSVLLVLPEELDTETINNKVPPRGIIVSIICNMQSVGLNSTALKIALEFDKDRSD

SEQ ID NO: 19154 - protein, 266 aa, Artificial Sequence
  Synthetic polypeptide
GAPLPCRDPVWEDEVGAPGIVVGVSVDGKEVWSEGLGYADVENRVPCKPETVMRIASISKSLTMVALAKLWEAGKLDLDIPVQHYVPEFPEKEYEGEKVSVTTRLLISHLSGIRHYEKDIKKVKEEKAYKALKMMKENVAFEQEKEGKSNEKNDFTKFKTEQENEAKCRNSKPGKKKNDFEQGELYLREKFENSIESLRLFKNDPLFFKPGSQFLYSTFGYTLLAAIVERASGCKYLDYMQKIFHDLDMLTTVQEENEPVIYNRAR

SEQ ID NO: 19155 - protein, 15 aa, Artificial Sequence
  Synthetic polypeptide
FLQSNFQSCKRLSWN

SEQ ID NO: 19156 - protein, 190 aa, Artificial Sequence
  Synthetic polypeptide
AFTFTHHSLIDSFRATSSPVSAFHGIDFKIRTIELDGKKIKLQIWDTAGQERFRTITTAYYRGAMGIMLVYDITNEKSFDNIKNWIRNIEEHASSDVERMILGNKCDMNDKRQVSKERGEKLAIDYGIKFLETSAKSSANVEEAFFTLARDIMTKLNRKMNDSNSAGAGGPVKITENRSKKTSFFRCSLL

SEQ ID NO: 19157 - protein, 12 aa, Artificial Sequence
  Synthetic polypeptide
APFMELILKLER

SEQ ID NO: 19158 - protein, 75 aa, Artificial Sequence
  Synthetic polypeptide
AFTFTHHSLIDSFRATSSPVSAFHGIDFKIRTIELDGKKIKLQIWDTAGQERFRTITTAYYRGAMEGILGIKRTS

SEQ ID NO: 19159 - protein, 171 aa, Artificial Sequence
  Synthetic polypeptide
AFTFTHHSLIDSFRATSSPVSAFHGIDFKIRTIELDGKKIKLQIWDTAGQERFRTITTAYYRGAMGIMLVYDITNEKSFDNIKNWIRNIEEHASSDVERMILGNKCDMNDKRQVSKERGEKLAIDYGIKFLETSAKSSANVEEAFFTLARDIMTKLNRKMVCITYNFYFHY

SEQ ID NO: 19160 - protein, 173 aa, Artificial Sequence
  Synthetic polypeptide
AFTFTHHSLIDSFRATSSPVSAFHGIDFKIRTIELDGKKIKLQIWDTAGQERFRTITTAYYRGAMGIMLVYDITNEKSFDNIKNWIRNIEEHASSDVERMILGNKCDMNDKRQVSKERGEKLAIDYGIKFLETSAKSSANVEENDSNSAGAGGPVKITENRSKKTSFFRCSLL

SEQ ID NO: 19161 - protein, 185 aa, Artificial Sequence
  Synthetic polypeptide
CSGQSIGFGITVTYSTVVLGIDFKIRTIELDGKKIKLQIWDTAGQERFRTITTAYYRGAMGIMLVYDITNEKSFDNIKNWIRNIEEHASSDVERMILGNKCDMNDKRQVSKERGEKLAIDYGIKFLETSAKSSANVEEAFFTLARDIMTKLNRKMNDSNSAGAGGPVKITENRSKKTSFFRCSLL

SEQ ID NO: 19162 - protein, 31 aa, Artificial Sequence
  Synthetic polypeptide
KQCDVVDRVLDLESLSLIALWCWELILKLER

SEQ ID NO: 19163 - protein, 6 aa, Artificial Sequence
  Synthetic polypeptide
HCGVGN

SEQ ID NO: 19164 - protein, 70 aa, Artificial Sequence
  Synthetic polypeptide
CSGQSIGFGITVTYSTVVLGIDFKIRTIELDGKKIKLQIWDTAGQERFRTITTAYYRGAMEGILGIKRTS

SEQ ID NO: 19165 - protein, 166 aa, Artificial Sequence
  Synthetic polypeptide
CSGQSIGFGITVTYSTVVLGIDFKIRTIELDGKKIKLQIWDTAGQERFRTITTAYYRGAMGIMLVYDITNEKSFDNIKNWIRNIEEHASSDVERMILGNKCDMNDKRQVSKERGEKLAIDYGIKFLETSAKSSANVEEAFFTLARDIMTKLNRKMVCITYNFYFHY

SEQ ID NO: 19166 - protein, 168 aa, Artificial Sequence
  Synthetic polypeptide
CSGQSIGFGITVTYSTVVLGIDFKIRTIELDGKKIKLQIWDTAGQERFRTITTAYYRGAMGIMLVYDITNEKSFDNIKNWIRNIEEHASSDVERMILGNKCDMNDKRQVSKERGEKLAIDYGIKFLETSAKSSANVEENDSNSAGAGGPVKITENRSKKTSFFRCSLL

SEQ ID NO: 19167 - protein, 59 aa, Artificial Sequence
  Synthetic polypeptide
TFLKRRQINGQQAFFTLARDIMTKLNRKMNDSNSAGAGGPVKITENRSKKTSFFRCSLL

SEQ ID NO: 19168 - protein, 12 aa, Artificial Sequence
  Synthetic polypeptide
MANRHFLHLHEI

SEQ ID NO: 19169 - protein, 31 aa, Artificial Sequence
  Synthetic polypeptide
IDISQKKTNKWPTGIFYTCTRYNDKTQQKNE

SEQ ID NO: 19170 - protein, 40 aa, Artificial Sequence
  Synthetic polypeptide
TFLKRRQINGQQAFFTLARDIMTKLNRKMVCITYNFYFHY

SEQ ID NO: 19171 - protein, 35 aa, Artificial Sequence
  Synthetic polypeptide
IDISQKKTNKWPTGIFYTCTRYNDKTQQKNGLYHL

SEQ ID NO: 19172 - protein, 29 aa, Artificial Sequence
  Synthetic polypeptide
MERMCLEWSLRVKWSIYCCHGYIRRHSPK

SEQ ID NO: 19173 - protein, 48 aa, Artificial Sequence
  Synthetic polypeptide
LDGKNVLGMEPACKMEHLLLSRLYSEAFSKMRLTASYVGQNLESLIHS

SEQ ID NO: 19174 - protein, 14 aa, Artificial Sequence
  Synthetic polypeptide
LDGKNVLGMEPACK

SEQ ID NO: 19175 - protein, 1441 aa, Artificial Sequence
  Synthetic polypeptide
FNQLPMENIGVMTCVWCNKKGLLATSGNDGTIRVWNVTKKQYSLQQTCVFNRLEGDAEESLGSPSDPSFSPVSWSISGKYLAGALEKMVNIWQVNGGKGLVDIQPHWVSALAWPEEGPATAWSGESPELLLVGRMDGSLGLIEVVDVSTMHRRELEHCYRKDVSVTCIAWFSEDRPFAVGYFDGKLLLGTKEPLEKGGIVLIDAHKDTLISMKWDPTGHILMTCAKEDSVKLWGSISGCWCCLHSLCHPSIVNGIAWCRLPGKGSKLQLLMATGCQSGLVCVWRIPQDTTQTNVTSAEGWWEQESNCQDGYRKSSGAKCVYQLRGHITPVRTVAFSSDGLALVSGGLGGLMNIWSLRDGSVLQTVVIGSGAIQTTVWIPEVGVAACSNRSKDVLVVNCTAEWAAANHVLATCRTALKQQGVLGLNMAPCMRAFLERLPMMLQEQYAYEKPHVVCGDQLVHSPYMQCLASLAVGLHLDQLLCNPPVPPHHQNCLPDPASWNPNEWAWLECFSTTIKAAEALTNGAQFPESFTVPDLEPVPEDELVFLMDNSKWINGMDEQIMSWATSRPEDWHLGGKCDVYLWGAGRHGQLAEAGRNVMVPAAAPSFSQAQQVICGQNCTFVIQANGTVLACGEGSYGRLGQGNSDDLHVLTVISALQGFVVTQLVTSCGSDGHSMALTESGEVFSWGDGDYGKLGHGNSDRQRRPRQIEALQGEEVVQMSCGFKHSAVVTSDGKLFTFGNGDYGRLGLGNTSNKKLPERVTALEGYQIGQVACGLNHTLAVSADGSMVWAFGDGDYGKLGLGNSTAKSSPQKIDVLCGIGIKKVACGTQFSVALTKDGHVYTFGQDRLIGLPEGRARNHNRPQQIPVLAGVIIEDVAVGAEHTLALASNGDVYAWGSNSEGQLGLGHTNHVREPTLVTGLQGKNVRQISAGRCHSAAWTAPPVPPRAPGVSVPLQLGLPDTVPPQYGALREVSIHTVRARLRLLYHFSDLMYSSWRLLNLSPNNQNSTSHYNAGTWGIVQGQLRPLLAPRVYTLPMVRSIGKTMVQGKNYGPQITVKRISTRGRKCKPIFVQIARQVVKLNASDLRLPSRAWKVKLVGEGADDAGGVFDDTITEMCQELETGIVDLLIPSPNATAEVGYNRDRFLFNPSACLDEHLMQFKFLGILMGVAIRTKKPLDLHLAPLVWKQLCCVPLTLEDLEEVDLLYVQTLNSILHIEDSGITEESFHEMIPLDSFVGQSADGKMVPIIPGGNSIPLTFSNRKEYVERAIEYRLHEMDRQVAAVREGMSWIVPVPLLSLLTAKQLEQMVCGMPEISVEVLKKVVRYREVDEQHQLVQWFWHTLEEFSNEERVLFMRFVSGRSRLPANTADISQRFQIMKVDRPYDSLPTSQTCFFQLRLPPYSSQLVMAERLRYAINNCRSIDMDNYMLSRNVDNAEGSDTDY

SEQ ID NO: 19176 - protein, 21 aa, Artificial Sequence
  Synthetic polypeptide
SSVSVGSASIDSTNYQWKILG

SEQ ID NO: 19177 - protein, 29 aa, Artificial Sequence
  Synthetic polypeptide
FDPLYPWVLHPLIQPTTNGKYWGNDMCLV

SEQ ID NO: 19178 - protein, 60 aa, Artificial Sequence
  Synthetic polypeptide
GWAWWLMLVIPALWKAEERRSLEASSSRPGWATWLPWLRRKELLWENNVRRAGSCPSKPS

SEQ ID NO: 19179 - protein, 1744 aa, Artificial Sequence
  Synthetic polypeptide
SQHFGRLKKEGRLRPAVQDQAGQHGCHGSVEKSSSGRITLGEQAAALANPHDRVVALRRVTAAAQVLLARTMVMRALSLLSVSGSSCSLAAGLESLGLTDIRTLVRLMCLAAAGRAGLSTSPSAMASTSERSRGGHSKANKPISCLAYLSTAVGCLASNAPSAAKLLVQLCTQNLISAATGVNLTTVDDSIQRKFLPSFLRGIAEENKLVTSPNFVVTQALVALLADKGAKLRPNYDKSEVEKKGPLELANALAACCLSSRLSSQHRQWAAQQLVRTLAAHDRDNQTTLQTLADMGGDLRKCSFIKLEAHQNRVMTCVWCNKKGLLATSGNDGTIRVWNVTKKQYSLQQTCVFNRLEGDAEESLGSPSDPSFSPVSWSISGKYLAGALEKMVNIWQVNGGKGLVDIQPHWVSALAWPEEGPATAWSGESPELLLVGRMDGSLGLIEVVDVSTMHRRELEHCYRKDVSVTCIAWFSEDRPFAVGYFDGKLLLGTKEPLEKGGIVLIDAHKDTLISMKWDPTGHILMTCAKEDSVKLWGSISGCWCCLHSLCHPSIVNGIAWCRLPGKGSKLQLLMATGCQSGLVCVWRIPQDTTQTNVTSAEGWWEQESNCQDGYRKSSGAKCVYQLRGHITPVRTVAFSSDGLALVSGGLGGLMNIWSLRDGSVLQTVVIGSGAIQTTVWIPEVGVAACSNRSKDVLVVNCTAEWAAANHVLATCRTALKQQGVLGLNMAPCMRAFLERLPMMLQEQYAYEKPHVVCGDQLVHSPYMQCLASLAVGLHLDQLLCNPPVPPHHQNCLPDPASWNPNEWAWLECFSTTIKAAEALTNGAQFPESFTVPDLEPVPEDELVFLMDNSKWINGMDEQIMSWATSRPEDWHLGGKCDVYLWGAGRHGQLAEAGRNVMVPAAAPSFSQAQQVICGQNCTFVIQANGTVLACGEGSYGRLGQGNSDDLHVLTVISALQGFVVTQLVTSCGSDGHSMALTESGEVFSWGDGDYGKLGHGNSDRQRRPRQIEALQGEEVVQMSCGFKHSAVVTSDGKLFTFGNGDYGRLGLGNTSNKKLPERVTALEGYQIGQVACGLNHTLAVSADGSMVWAFGDGDYGKLGLGNSTAKSSPQKIDVLCGIGIKKVACGTQFSVALTKDGHVYTFGQDRLIGLPEGRARNHNRPQQIPVLAGVIIEDVAVGAEHTLALASNGDVYAWGSNSEGQLGLGHTNHVREPTLVTGLQGKNVRQISAGRCHSAAWTAPPVPPRAPGVSVPLQLGLPDTVPPQYGALREVSIHTVRARLRLLYHFSDLMYSSWRLLNLSPNNQNSTSHYNAGTWGIVQGQLRPLLAPRVYTLPMVRSIGKTMVQGKNYGPQITVKRISTRGRKCKPIFVQIARQVVKLNASDLRLPSRAWKVKLVGEGADDAGGVFDDTITEMCQELETGIVDLLIPSPNATAEVGYNRDRFLFNPSACLDEHLMQFKFLGILMGVAIRTKKPLDLHLAPLVWKQLCCVPLTLEDLEEVDLLYVQTLNSILHIEDSGITEESFHEMIPLDSFVGQSADGKMVPIIPGGNSIPLTFSNRKEYVERAIEYRLHEMDRQVAAVREGMSWIVPVPLLSLLTAKQLEQMVCGMPEISVEVLKKVVRYREVDEQHQLVQWFWHTLEEFSNEERVLFMRFVSGRSRLPANTADISQRFQIMKVDRPYDSLPTSQTCFFQLRLPPYSSQLVMAERLRYAINNCRSIDMDNYMLSRNVDNAEGSDTDY

SEQ ID NO: 19180 - protein, 16 aa, Artificial Sequence
  Synthetic polypeptide
GQQFKTRLGNMVAMAP

SEQ ID NO: 19181 - protein, 26 aa, Artificial Sequence
  Synthetic polypeptide
LGVVVGACNPRMGSEQLREIFRLKSR

SEQ ID NO: 19182 - protein, 53 aa, Artificial Sequence
  Synthetic polypeptide
SQHFGRLRWSDHLRSGVQDQPGQHGETPSLLKIPKISWAWWWAPVIPGWDQSS

SEQ ID NO: 19183 - protein, 3156 aa, Artificial Sequence
  Synthetic polypeptide
SQDGIRAAKRNIQIEIQVAVHKIYQQLSATLERALQANKHHIEAQQRLLLVTVFALSVHYQPVDVSLAISTGLLNVLSQLCGTDTMLGQPLQLLPKTGVSQLSTALKVASTRLLQILAITTGTYADKLSPKVVQSLLDLLCSQLKNLLSQTGVLHMASFGEGEQEDGEEEEKKVDSSGETEKKDFRAALRKQHAAELHLGDFLVFLRRVVSSKAIQSKMASPKWTEVLLNIASQKCSSGIPLVGNLRTRLLALHVLEAVLPACESGVEDDQMAQIVERLFSLLSDCMWETPIAQAKHAIQIKEKEQEIKLQKQGELEEEDENLPIQEVSFDPEKAQCCLVENGQILTHGSGGKGYGLASTGVTSGCYQWKFYIVKENRGNEGTCVGVSRWPVHDFNHRTTSDMWLYRAYSGNLYHNGEQTLTLSSFTQGDFITCVLDMEARTISFGKNGEEPKLAFEDVDAAELYPCVMFYSSNPGEKVKICDMQMRGTPRDLLPGDPICSPVAAVLAEATIQLIRILHRTDRWTYCINKKMMERLHKIKICIKESGQKLKKSRSVQSREENEMREEKESKEEEKGKHTRHGLADLSELQLRTLCIEVWPVLAVIGGVDAGLRVGGRCVHKQTGRHATLLGVVKEGSTSAKVQWDEAEITISFPTFWSPSDTPLYNLEPCEPLPFDVARFRGLTASVLLDLTYLTGVHEDMGKQSTKRHEKKHRHESEEKGDVEQKPESESALDMRTGLTSDDVKSQSTTSSKSENEIASFSLDPTLPSVESQHQITEGKRKNHEHMSKNHDVAQSEIRAVQLSYLYLGAMKSLSALLGCSKYAELLLIPKVLAENGHNSDCASSPVVHEDVEMRAALQFLMRHMVKRAVMRSPIKRALGLADLERAQAMIYKLVVHGLLEDQFGGKIKQEIDQQAEESDPAQQAQTPVTTSPSASSTTSFMSSSLEDTTTATTPVTDTETVPASESPGVMPLSLLRQMFSSYPTTTVLPTRRAQTPPISSLPTSPSDEVGRRQSLTSPDSQSARPANRTALSDPSSRLSTSPPPPAIAVPLLEMGFSLRQIAKAMEATGARGEADAQNITVLAMWMIEHPGHEDEEEPQSGSTADSRPGAAVLGSGGKSNDPCYLQSPGDIPSADAAEMEEGFSESPDNLDHTENAASGSGPSARGRSAVTRRHKFDLAARTLLARAAGLYRSVQAHRNQSRREGISLQQDPGALYDFNLDEELEIDLDDEAMEAMFGQDLTSDNDILGMWIPEVLDWPTWHVCESEDREEVVVCELCECSVVSFNQHMKRNHPGCGRSANRQGYRSNGSYVDGWFGGECGSGNPYYLLCGTCREKYLAMKTKSKSTSSERYKGQAPDLIGKQDSVYEEDWDMLDVDEDEKLTGEEEFELLAGPLGLNDRRIVPEPVQFPDSDPLGASVAMVTATNSMEETLMQIGCHGSVEKSSSGRITLGEQAAALANPHDRVVALRRVTAAAQVLLARTMVMRALSLLSVSGSSCSLAAGLESLGLTDIRTLVRLMCLAAAGRAGLSTSPSAMASTSERSRGGHSKANKPISCLAYLSTAVGCLASNAPSAAKLLVQLCTQNLISAATGVNLTTVDDSIQRKFLPSFLRGIAEENKLVTSPNFVVTQALVALLADKGAKLRPNYDKSEVEKKGPLELANALAACCLSSRLSSQHRQWAAQQLVRTLAAHDRDNQTTLQTLADMGGDLRKCSFIKLEAHQNRVMTCVWCNKKGLLATSGNDGTIRVWNVTKKQYSLQQTCVFNRLEGDAEESLGSPSDPSFSPVSWSISGKYLAGALEKMVNIWQVNGGKGLVDIQPHWVSALAWPEEGPATAWSGESPELLLVGRMDGSLGLIEVVDVSTMHRRELEHCYRKDVSVTCIAWFSEDRPFAVGYFDGKLLLGTKEPLEKGGIVLIDAHKDTLISMKWDPTGHILMTCAKEDSVKLWGSISGCWCCLHSLCHPSIVNGIAWCRLPGKGSKLQLLMATGCQSGLVCVWRIPQDTTQTNVTSAEGWWEQESNCQDGYRKSSGAKCVYQLRGHITPVRTVAFSSDGLALVSGGLGGLMNIWSLRDGSVLQTVVIGSGAIQTTVWIPEVGVAACSNRSKDVLVVNCTAEWAAANHVLATCRTALKQQGVLGLNMAPCMRAFLERLPMMLQEQYAYEKPHVVCGDQLVHSPYMQCLASLAVGLHLDQLLCNPPVPPHHQNCLPDPASWNPNEWAWLECFSTTIKAAEALTNGAQFPESFTVPDLEPVPEDELVFLMDNSKWINGMDEQIMSWATSRPEDWHLGGKCDVYLWGAGRHGQLAEAGRNVMVPAAAPSFSQAQQVICGQNCTFVIQANGTVLACGEGSYGRLGQGNSDDLHVLTVISALQGFVVTQLVTSCGSDGHSMALTESGEVFSWGDGDYGKLGHGNSDRQRRPRQIEALQGEEVVQMSCGFKHSAVVTSDGKLFTFGNGDYGRLGLGNTSNKKLPERVTALEGYQIGQVACGLNHTLAVSADGSMVWAFGDGDYGKLGLGNSTAKSSPQKIDVLCGIGIKKVACGTQFSVALTKDGHVYTFGQDRLIGLPEGRARNHNRPQQIPVLAGVIIEDVAVGAEHTLALASNGDVYAWGSNSEGQLGLGHTNHVREPTLVTGLQGKNVRQISAGRCHSAAWTAPPVPPRAPGVSVPLQLGLPDTVPPQYGALREVSIHTVRARLRLLYHFSDLMYSSWRLLNLSPNNQNSTSHYNAGTWGIVQGQLRPLLAPRVYTLPMVRSIGKTMVQGKNYGPQITVKRISTRGRKCKPIFVQIARQVVKLNASDLRLPSRAWKVKLVGEGADDAGGVFDDTITEMCQELETGIVDLLIPSPNATAEVGYNRDRFLFNPSACLDEHLMQFKFLGILMGVAIRTKKPLDLHLAPLVWKQLCCVPLTLEDLEEVDLLYVQTLNSILHIEDSGITEESFHEMIPLDSFVGQSADGKMVPIIPGGNSIPLTFSNRKEYVERAIEYRLHEMDRQVAAVREGMSWIVPVPLLSLLTAKQLEQMVCGMPEISVEVLKKVVRYREVDEQHQLVQWFWHTLEEFSNEERVLFMRFVSGRSRLPANTADISQRFQIMKVDRPYDSLPTSQTCFFQLRLPPYSSQLVMAERLRYAINNCRSIDMDNYMLSRNVDNAEGSDTDY

SEQ ID NO: 19184 - protein, 17 aa, Artificial Sequence
  Synthetic polypeptide
GKEFEARISRLAWATCQ

SEQ ID NO: 19185 - protein, 36 aa, Artificial Sequence
  Synthetic polypeptide
PGQHVNKQINDKERVAAAMENPNLREIVEQCVLEPD

SEQ ID NO: 19186 - protein, 15 aa, Artificial Sequence
  Synthetic polypeptide
GQDFKTSLGNMSISR

SEQ ID NO: 19187 - protein, 97 aa, Artificial Sequence
  Synthetic polypeptide
RPGAPGGRRWRLPGPAARWSPLFPHQQCCQYTFWCQWSTMTSHLPVSRSWFVPDQLGSTHVMWLWPQSLSAWAPVNLELASTLKASCGRKQKMGCWW

SEQ ID NO: 19188 - protein, 39 aa, Artificial Sequence
  Synthetic polypeptide
GPGPRAGGGGGSRDRPRDGVPCFHTSSAANTPFGASGQQ

SEQ ID NO: 19189 - protein, 1179 aa, Artificial Sequence
  Synthetic polypeptide
ARGPGRAEVAAPGTGRAMESPVSTPAVLPIHLLVPVVNNDISSPCEQIMVRTRSVGVNTCDVALATEPECLGPCEPGTSVNLEGIVWQETEDGMLVVNVTWRNKTYVGTLLDCTRHDWAPPRFCDSPTSDLEMRNGRGRGKRMRPNSNTPVNETATASDSKGTSNSSKTRAGANSKGRRGSQNSSEHRPPASSTSEDVKASPSSANKRKNKPLSDMELNSSSEDSKGSKRVRTNSMGSATGPLPGTKVEPTVLDRNCPSPVLIDCPHPNCNKKYKHINGLKYHQAHAHTDDDSKPEADGDSEYGEEPILHADLGSCNGASVSQKGSLSPARSATPKVRLVEPHSPSPSSKFSTKGLCKKKLSGEGDTDLGALSNDGSDDGPSVMDETSNDAFDSLERKCMEKEKCKKPSSLKPEKIPSKSLKSARPIAPAIPPQQIYTFQTATFTAASPGSSSGLTATVAQAMPNSPQLKPIQPKPTVMGEPFTVNPALTPAKDKKKKDKKKKESSKELESPLTPGKVCRAEEGKSPFRESSGDGMKMEGLLNGSSDPHQSRLASIKAEADKIYSFTDNAPSPSIGGSSRLENTTPTQPLTPLHVVTQNGAEASSVKTNSPAYSDISDAGEDGEGKVDSVKSKDAEQLVKEGAKKTLFPPQPQSKDSPYYQGFESYYSPSYAQSSPGALNPSSQAGVESQALKTKRDEEPESIEGKVKNDICEEKKPELSSSSQQPSVIQQRPNMYMQSLYYNQYAYVPPYGYSDQSYHTHLLSTNTAYRQQYEEQQKRQSLEQQQRGVDKKAEMGLKEREAALKEEWKQKPSIPPTLTKAPSLTDLVKSGPGKAKEPGADPAKSVIIPKLDDSSKLPGQAPEGLKVKLSDASHLSKEASEAKTGAECGRQAEMDPILWYRQEAEPRMWTYVYPAKYSDIKSEDERWKEERDRKLKEERSRSKDSVPKEDGKESTSSDCKLPTSEESRLGSKEPRPSVHVPVSSPLTQHQSYIPYMHGYSYSQSYDPNHPSYRSMPAVMMQNYPGSYLPSSYSFSPYGSKVSGGEDADKARASPSVTCKSSSESKALDILQQHASHYKSKSPTISDKTSQERDRGGCGVVGGGGSCSSVGGASGGERSVDRPRTSPSQRLMSTHHHHHHLGYSLLPAQYNLPYAAGLSSTAIVASQQGSTPSLYPPPRR

SEQ ID NO: 19190 - protein, 41 aa, Artificial Sequence
  Synthetic polypeptide
FFFYQIGKEQNENIMLPKEKGKRDVGGKCNVEEQDICRYTP

SEQ ID NO: 19191 - protein, 1120 aa, Artificial Sequence
  Synthetic polypeptide
NAKKKPYIKHNFSFIRLAKNKMRTSCCQRKRARGMLVVNVTWRNKTYVGTLLDCTRHDWAPPRFCDSPTSDLEMRNGRGRGKRMRPNSNTPVNETATASDSKGTSNSSKTRAGANSKGRRGSQNSSEHRPPASSTSEDVKASPSSANKRKNKPLSDMELNSSSEDSKGSKRVRTNSMGSATGPLPGTKVEPTVLDRNCPSPVLIDCPHPNCNKKYKHINGLKYHQAHAHTDDDSKPEADGDSEYGEEPILHADLGSCNGASVSQKGSLSPARSATPKVRLVEPHSPSPSSKFSTKGLCKKKLSGEGDTDLGALSNDGSDDGPSVMDETSNDAFDSLERKCMEKEKCKKPSSLKPEKIPSKSLKSARPIAPAIPPQQIYTFQTATFTAASPGSSSGLTATVAQAMPNSPQLKPIQPKPTVMGEPFTVNPALTPAKDKKKKDKKKKESSKELESPLTPGKVCRAEEGKSPFRESSGDGMKMEGLLNGSSDPHQSRLASIKAEADKIYSFTDNAPSPSIGGSSRLENTTPTQPLTPLHVVTQNGAEASSVKTNSPAYSDISDAGEDGEGKVDSVKSKDAEQLVKEGAKKTLFPPQPQSKDSPYYQGFESYYSPSYAQSSPGALNPSSQAGVESQALKTKRDEEPESIEGKVKNDICEEKKPELSSSSQQPSVIQQRPNMYMQSLYYNQYAYVPPYGYSDQSYHTHLLSTNTAYRQQYEEQQKRQSLEQQQRGVDKKAEMGLKEREAALKEEWKQKPSIPPTLTKAPSLTDLVKSGPGKAKEPGADPAKSVIIPKLDDSSKLPGQAPEGLKVKLSDASHLSKEASEAKTGAECGRQAEMDPILWYRQEAEPRMWTYVYPAKYSDIKSEDERWKEERDRKLKEERSRSKDSVPKEDGKESTSSDCKLPTSEESRLGSKEPRPSVHVPVSSPLTQHQSYIPYMHGYSYSQSYDPNHPSYRSMPAVMMQNYPGSYLPSSYSFSPYGSKVSGGEDADKARASPSVTCKSSSESKALDILQQHASHYKSKSPTISDKTSQERDRGGCGVVGGGGSCSSVGGASGGERSVDRPRTSPSQRLMSTHHHHHHLGYSLLPAQYNLPYAAGLSSTAIVASQQGSTPSLYPPPRR

SEQ ID NO: 19192 - protein, 15 aa, Artificial Sequence
  Synthetic polypeptide
EHHVAKGKGQEGCWW

SEQ ID NO: 19193 - protein, 110 aa, Artificial Sequence
  Synthetic polypeptide
GRAQWLTPVIPALWEAEAGGSQGQEIKTILANTSCPAAEQAIRRDPAHHLWGLSAAATCDQGLPAPTVLLPVQELEEVCASDPGADQGVEAGRPDLHLSTAGREARQVFR

SEQ ID NO: 19194 - protein, 341 aa, Artificial Sequence
  Synthetic polypeptide
SQHFGRPRQADHKVRRSRLSWLTRAVRQQNKPFGGIQLIICGDFLQLPPVTKGSQPPRFCFQSKSWKRCVPVTLELTKVWRQADQTFISLLQAVRLGRCSDEVTRQLQATASHKVGRDGIVATRLCTHQDDVALTNERRLQELPGKVHRFEAMDSNPELASTLDAQCPVSQLLQLKLGAQVMLVKNLSVSRGLVNGARGVVVGFEAEGRGLPQVRFLCGVTEVIHADRWTVQATGGQLLSRQQLPLQLAWAMSIHKSQGMTLDCVEISLGRVFASGQAYVALSRARSLQGLRVLDFDPMAVRCDPRVLHFYATLRRGRSLSLESPDDDEAASDQENMDPIL

SEQ ID NO: 19195 - protein, 27 aa, Artificial Sequence
  Synthetic polypeptide
HELSGSRTSHSEGSSSSSVGTFCSCHL

SEQ ID NO: 19196 - protein, 407 aa, Artificial Sequence
  Synthetic polypeptide
SQHFGRPRQADHKVRRSRLSWLTRAVRQQNKPFGGIQLIICGDFLQLPPVTKGSQPPRFCFQSKSWKRCVPVTLELTKVWRQADQTFISLLQAVRLGRCSDEVTRQLQATASHKVGRDGIVATRLCTHQDDVALTNERRLQELPGKVHRFEAMDSNPELASTLDAQCPVSQLLQLKLGAQVMLVKNLSVSRGLVNGARGVVVGFEAEGRGLPQVRFLCGVTEVIHADRWTVQATGGQLLSRQQLPLQLAWAMSIHKSQGMTLDCVEISLGRVFASGQAYVALSRARSLQGLRVLDFDPMAVRCDPRVLHFYATLRRGRSLSLAAEGRGNEDRCSGSSIRALGGDWWGLRLGAASKQRTELRCVSTARPSLAQPRTNTLQSLTKEHKLQNVHPYFKLLFQGINSVWGH

SEQ ID NO: 19197 - protein, 41 aa, Artificial Sequence
  Synthetic polypeptide
GRAQWLTPVIPALWEAEAGGSQGQEIKTILANTASAQARLL

SEQ ID NO: 19198 - protein, 56 aa, Artificial Sequence
  Synthetic polypeptide
SQHFGRPRQADHKVRRSRLSWLTRHRLRPGSSSPVCGPGPKARRAAGLAELPAVGH

SEQ ID NO: 19199 - protein, 370 aa, Artificial Sequence
  Synthetic polypeptide
HGIGSGQAPLAQCVALAQRPGVRQGWLNCQRLVIDEISMVEADLFDKLEAVARAVRQQNKPFGGIQLIICGDFLQLPPVTKGSQPPRFCFQSKSWKRCVPVTLELTKVWRQADQTFISLLQAVRLGRCSDEVTRQLQATASHKVGRDGIVATRLCTHQDDVALTNERRLQELPGKVHRFEAMDSNPELASTLDAQCPVSQLLQLKLGAQVMLVKNLSVSRGLVNGARGVVVGFEAEGRGLPQVRFLCGVTEVIHADRWTVQATGGQLLSRQQLPLQLAWAMSIHKSQGMTLDCVEISLGRVFASGQAYVALSRARSLQGLRVLDFDPMAVRCDPRVLHFYATLRRGRSLSLESPDDDEAASDQENMDPIL

SEQ ID NO: 19200 - protein, 436 aa, Artificial Sequence
  Synthetic polypeptide
HGIGSGQAPLAQCVALAQRPGVRQGWLNCQRLVIDEISMVEADLFDKLEAVARAVRQQNKPFGGIQLIICGDFLQLPPVTKGSQPPRFCFQSKSWKRCVPVTLELTKVWRQADQTFISLLQAVRLGRCSDEVTRQLQATASHKVGRDGIVATRLCTHQDDVALTNERRLQELPGKVHRFEAMDSNPELASTLDAQCPVSQLLQLKLGAQVMLVKNLSVSRGLVNGARGVVVGFEAEGRGLPQVRFLCGVTEVIHADRWTVQATGGQLLSRQQLPLQLAWAMSIHKSQGMTLDCVEISLGRVFASGQAYVALSRARSLQGLRVLDFDPMAVRCDPRVLHFYATLRRGRSLSLAAEGRGNEDRCSGSSIRALGGDWWGLRLGAASKQRTELRCVSTARPSLAQPRTNTLQSLTKEHKLQNVHPYFKLLFQGINSVWGH

SEQ ID NO: 19201 - protein, 87 aa, Artificial Sequence
  Synthetic polypeptide
DPVFDQSALSTEAKEEMYKLYPNARRAHLKTGGNFPYLCRSAEVNLYVQIHLLQFHGTKYAAIDPSMVSAEELEVQKGSLGISQEEQ

SEQ ID NO: 19202 - protein, 54 aa, Artificial Sequence
  Synthetic polypeptide
SQRFGRLRQEDCLSPRVQDQPGQHSETLCLIRVRFQLKLKKKCTSCILMPEELI

SEQ ID NO: 19203 - protein, 16 aa, Artificial Sequence
  Synthetic polypeptide
VQEFRTSLGNIVRPCV

SEQ ID NO: 19204 - protein, 26 aa, Artificial Sequence
  Synthetic polypeptide
SQRFGRLRQEDCLSPRVQDQPGQHSV

SEQ ID NO: 19205 - protein, 96 aa, Artificial Sequence
  Synthetic polypeptide
VQEFRTSLGNIVFDQSALSTEAKEEMYKLYPNARRAHLKTGGNFPYLCRSAEVNLYVQIHLLQFHGTKYAAIDPSMVSAEELEVQKGSLGISQEEQ

SEQ ID NO: 19206 - protein, 191 aa, Artificial Sequence
  Synthetic polypeptide
KYKISWARWHMPIIPATQEAEAGESLEPRMRRLCFWLMPAFMLKKIVLGNFSSGPVDPMMADAIDFMVDRLESLGQSELASRLTLNCQNSYVEPHKIRDIPVTIMDVFDQSALSTEAKEEMYKLYPNARRAHLKTGGNFPYLCRSAEVNLYVQIHLLQFHGTKYAAIDPSMVSAEELEVQKGSLGISQEEQ

SEQ ID NO: 19207 - protein, 23 aa, Artificial Sequence
  Synthetic polypeptide
SQLLRRLRQENHLNPGCGGCAFG

SEQ ID NO: 19208 - protein, 34 aa, Artificial Sequence
  Synthetic polypeptide
TQDAEVVLLADACIYAQKNSSWKFFIWPGGPYDG

SEQ ID NO: 19209 - protein, 61 aa, Artificial Sequence
  Synthetic polypeptide
KYKISWARWHMPIIPATQEAEAGESLEPRMRRLCFWLMPAFMLKKIVLGNFSSGPVDPMMA

SEQ ID NO: 19210 - protein, 17 aa, Artificial Sequence
  Synthetic polypeptide
NKSDHVTLLKILCSFQF

SEQ ID NO: 19211 - protein, 27 aa, Artificial Sequence
  Synthetic polypeptide
QSDPFKTSQIMSLCSKSSAHFSFEKFA

SEQ ID NO: 19212 - protein, 192 aa, Artificial Sequence
  Synthetic polypeptide
KVILLKQVRSCHSAQNPLLISVLKNLPESLSNGRQQPMEGATYAPKISAGTSCIKWEEQTSEQIFRLYRAIGNIIPLQTLWMANTIKLLDLVEVNSSVLADPKLTGQALIPGSVIYHKQSQILLVYCKDGWIGVRSVMLKKSLTATDFYNGYLHPWYQKNSQAQPSQCRFQTLRLPTKKKQKKTVAMQQCIE

SEQ ID NO: 19213 - protein, 23 aa, Artificial Sequence
  Synthetic polypeptide
QSDPFKTSQIMSLCSKSSAHFSF

SEQ ID NO: 19214 - protein, 23 aa, Artificial Sequence
  Synthetic polypeptide
KVILLKQVRSCHSAQNPLLISVL

SEQ ID NO: 19215 - protein, 221 aa, Artificial Sequence
  Synthetic polypeptide
NKSDHVTLLKILWFDVGPILKQETVPVPPKSTAKELEAVLSRLGANMLISVLKNLPESLSNGRQQPMEGATYAPKISAGTSCIKWEEQTSEQIFRLYRAIGNIIPLQTLWMANTIKLLDLVEVNSSVLADPKLTGQALIPGSVIYHKQSQILLVYCKDGWIGVRSVMLKKSLTATDFYNGYLHPWYQKNSQAQPSQCRFQTLRLPTKKKQKKTVAMQQCIE

SEQ ID NO: 19216 - protein, 21 aa, Artificial Sequence
  Synthetic polypeptide
QSDPFKTSQIMSLCSKSSGLM

SEQ ID NO: 19217 - protein, 19 aa, Artificial Sequence
  Synthetic polypeptide
KVILLKQVRSCHSAQNPLV

SEQ ID NO: 19218 - protein, 262 aa, Artificial Sequence
  Synthetic polypeptide
NKSDHVTLLKILCGILNVHPSCLPRWRGPAPVIHTVLHGDTVTGVTIMQIRPKRFDVGPILKQETVPVPPKSTAKELEAVLSRLGANMLISVLKNLPESLSNGRQQPMEGATYAPKISAGTSCIKWEEQTSEQIFRLYRAIGNIIPLQTLWMANTIKLLDLVEVNSSVLADPKLTGQALIPGSVIYHKQSQILLVYCKDGWIGVRSVMLKKSLTATDFYNGYLHPWYQKNSQAQPSQCRFQTLRLPTKKKQKKTVAMQQCIE

SEQ ID NO: 19219 - protein, 21 aa, Artificial Sequence
  Synthetic polypeptide
QSDPFKTSQIMSLCSKSSVAY

SEQ ID NO: 19220 - protein, 55 aa, Artificial Sequence
  Synthetic polypeptide
KVILLKQVRSCHSAQNPLWHIECSSQLPPEMAWPSPCNPYSASRRHSYWSNNYAN

SEQ ID NO: 19221 - protein, 324 aa, Artificial Sequence
  Synthetic polypeptide
RVVMLTVKVCSFIPEPARPRTHQKEETPNASEGQKEQALDTPPLRTLRFTTRVCGFVLELADASKLPNLKELLQSSGDNHKRAWDLVSWILSSKVLTIHSAGKAEFEKIQKLTGAPHTPVPAPDFLFEIEYFDPANAKFYETKGERDLIYAFHGSRLENFHSIIHNGLHCHLNKTSLFGEGTYLTSDLSLALIYSPHGHGWQHSLLGPILSCVAVCEVIDHPDVKCQTKKKDSKEIDRRRARIKHSEGGDIPPKYFVVTNNQLLRVKYLLVYSQKPPKSRASSQLSWFSSHWFTVMISLYLLLLLIVSVINSSAFQHFWNRAKR

SEQ ID NO: 19222 - protein, 21 aa, Artificial Sequence
  Synthetic polypeptide
DSPRESAASFLNLQMPASYLT

SEQ ID NO: 19223 - protein, 630 aa, Artificial Sequence
  Synthetic polypeptide
LHALYATLVPFAPAELKVQAKMESLVVSWQPPPHPTQISGYKLYWREVGAEEEANGDRLPGGRGDQAWDVGPVRLKKKVKQYELTQLVPGRLYEVKLVAFNKHEDGYAAVWKGKTEKAPAPDMPIQRGPPLPPAHVHAESNSSTSIWLRWKKPDFTTVKIVNYTVRFSPWGLRNASLVTYYTSSGEDILIGGLKPFTKYEFAVQSHGVDMDGPFGSVVERSTLPDRPSTPPSDLRLSPLTPSTVRLHWCPPTEPNGEIVEYLILYSSNHTQPEHQWTLLTTQGNIFSAEVHGLESDTRYFFKMGARTEVGPGPFSRLQDVITLQEKLSDSLDMHSVTGIIVGVCLGLLCLLACMCAGLRRSPHRESLPGLSSTATPGNPALYSRARLGPPSPPAAHELESLVHPHPQDWSPPPSDVEDRAEVHSLMGGGVSEGRSHSKRKISWAQPSGLSWAGSWAGCELPQAGPRPALTRALLPPAGTGQTLLLQALVYDAIKGNGRKKSPPACRNQVEAEVIVHSDFSASNGNPDLHLQDLEPEDPLPPEAPDLISGVGDPGQGAAWLDRELGGCELAAPGPDRLTCLPEAASASCSYPDLQPGEVLEETPGDSCQLKSPCPLGASPGLPRSPVSSSA

SEQ ID NO: 19224 - protein, 49 aa, Artificial Sequence
  Synthetic polypeptide
TCSLCDTSPFCPCRVEGAGKDGVPGRVMAATPSPHPDLWLQTILAGGGG

SEQ ID NO: 19225 - protein, 36 aa, Artificial Sequence
  Synthetic polypeptide
SQHFGRPRQADYLRSRVHNQPGKHDLSSGETQHKSS

SEQ ID NO: 19226 - protein, 51 aa, Artificial Sequence
  Synthetic polypeptide
GQEFTTSLANMIYPQERHSIRVPESGEHYELHLLHYLQENLGSRIAALKVI

SEQ ID NO: 19227 - protein, 344 aa, Artificial Sequence
  Synthetic polypeptide
HFLAMKYFKVKNPAISITENVLHFKAQGHGAKGDNVYEFHLEFLDLVKPEPVYKLTQRQVNITVQKKVSQWWERLTKQEKRPLFLAPDFDRWLDESDAEMELRAKEEERLNKLRLESEGSPETLTNLRKGYLFMYNLVQFLGFSWIFVNLTVRFCILGKESFYDTFHTVADMMYFCQMLAVVETINAAIGVTTSPVLPSLIQLLGRNFILFIIFGTMEEMQNKAVVFFVFYLWSAIEIFRYSFYMLTCIDMDWKVLTWLRYTLWIPLYPLGCLAEAVSVIQSIPIFNETGRFSFTLPYPVKIKVRFSFFLQIYLIMIFLGLYINFRHLYKQRRRRYGQKKKKIH

SEQ ID NO: 19228 - protein, 38 aa, Artificial Sequence
  Synthetic polypeptide
NILKLRTLPSASLKTCCISKLKDMVPKETMSMNFTWSS

SEQ ID NO: 19229 - protein, 289 aa, Artificial Sequence
  Synthetic polypeptide
HFLAMKYFKVKNPAISITENVLHFKAQGHGAKGDNVYEFHLEFLDLVKPEEEERLNKLRLESEGSPETLTNLRKGYLFMYNLVQFLGFSWIFVNLTVRFCILGKESFYDTFHTVADMMYFCQMLAVVETINAAIGVTTSPVLPSLIQLLGRNFILFIIFGTMEEMQNKAVVFFVFYLWSAIEIFRYSFYMLTCIDMDWKVLTWLRYTLWIPLYPLGCLAEAVSVIQSIPIFNETGRFSFTLPYPVKIKVRFSFFLQIYLIMIFLGLYINFRHLYKQRRRRYGQKKKKIH

SEQ ID NO: 19230 - protein, 256 aa, Artificial Sequence
  Synthetic polypeptide
GRARWLTPVIPALWEAKEEERLNKLRLESEGSPETLTNLRKGYLFMYNLVQFLGFSWIFVNLTVRFCILGKESFYDTFHTVADMMYFCQMLAVVETINAAIGVTTSPVLPSLIQLLGRNFILFIIFGTMEEMQNKAVVFFVFYLWSAIEIFRYSFYMLTCIDMDWKVLTWLRYTLWIPLYPLGCLAEAVSVIQSIPIFNETGRFSFTLPYPVKIKVRFSFFLQIYLIMIFLGLYINFRHLYKQRRRRYGQKKKKIH

SEQ ID NO: 19231 - protein, 12 aa, Artificial Sequence
  Synthetic polypeptide
SQHFGRPRKKSA

SEQ ID NO: 19232 - protein, 22 aa, Artificial Sequence
  Synthetic polypeptide
PGTVAHACNPSTLGGQGRRAPK

SEQ ID NO: 19233 - protein, 150 aa, Artificial Sequence
  Synthetic polypeptide
GRARWLTPVIPALWEAKEEERLNKLRLESEGSPETLTNLRKGYLFMYNLVQFLGFSWIFVNLTVRFCILGKESFYDTFHTVADMMYFCQMLAVVETINAAIGVTTSPVLPSLIQLLGRNFILFIIFGTMEEMQNKAVVFFVFYLWSAIEI

SEQ ID NO: 19234 - protein, 35 aa, Artificial Sequence
  Synthetic polypeptide
NQESWACSCCNLRLRQRPLGAPLQQPVPVPERRPV

SEQ ID NO: 19235 - protein, 931 aa, Artificial Sequence
  Synthetic polypeptide
AVGRARTRRAGLALAVTSGCDSDHWGPHCSNRCQCQNGALCNPITGACVCAAGFRGWRCEELCAPGTHGKGCQLPCQCRHGASCDPRAGECLCAPGYTGVYCEELCPPGSHGAHCELRCPCQNGGTCHHITGECACPPGWTGAVCAQPCPPGTFGQNCSQDCPCHHGGQCDHVTGQCHCTAGYMGDRCQEECPFGSFGFQCSQHCDCHNGGQCSPTTGACECEPGYKGPRCQERLCPEGLHGPGCTLPCPCDADNTISCHPVTGACTCQPGWSGHHCNESCPVGYYGDGCQLPCTCQNGADCHSITGGCTCAPGFMGEVCAVSCAAGTYGPNCSSICSCNNGGTCSPVDGSCTCKEGWQGLDCTLPCPSGTWGLNCNESCTCANGAACSPIDGSCSCTPGWLGDTCELPCPDGTFGLNCSEHCDCSHADGCDPVTGHCCCLAGWTGIRCDSTCPPGRWGPNCSVSCSCENGGSCSPEDGSCECAPGFRGPLCQRICPPGFYGHGCAQPCPLCVHSSRPCHHISGICECLPGFSGALCNQVCAGGYFGQDCAQLCSCANNGTCSPIDGSCQCFPGWIGKDCSQACPPGFWGPACFHACSCHNGASCSAEDGACHCTPGWTGLFCTQRCPAAFFGKDCGRVCQCQNGASCDHISGKCTCRTGFTGQHCEQRCAPGTFGYGCQQLCECMNNSTCDHVTGTCYCSPGFKGIRCDQAALMMEELNPYTKISPALGAERHSVGAVTGIMLLLFLIVVLLGLFAWHRRRQKEKGRDLAPRVSYTPAMRMTSTDYSLSGACGMDRRQNTYIMDKGFKDYMKESVCSSSTCSLNSSENPYATIKDPPILTCKLPESSYVEMKSPVHMGSPYTDVPSLSTSNKNIYEVEPTVSVVQEGCGHNSSYIQNAYDLPRNSHIPGHYDLLPVRQSPANGPSQDKQS

SEQ ID NO: 19236 - protein, 156 aa, Artificial Sequence
  Synthetic polypeptide
PQAATATTGGPTAATGASARTAPCVTPSQAPACAPPASVDGAARSSAHLAPTARDASCRASADTVPAATPAPASASAHLATPASTARSCALLGAMELTVSCAAPVRMGAPATTSLASVPAPQAGREQCVPSPAHQGHLARTAARIVLATMEGSVTT

SEQ ID NO: 19237 - protein, 762 aa, Artificial Sequence
  Synthetic polypeptide
AVGRARTRRAGLALAVTSGCDSDHWGPHCSNRCQCQNGALCNPITGACVCAAGFRGWRCEELCAPGTHGKGCQLPCQCRHGASCDPRAGECLCAPGYTGVYCEELCPPGSHGAHCELRCPCQNGGTCHHITGECACPPGWTGAVCAQPCPPGTFGQNCSQDCPCHHGGQCDHVTGQCHCTAGYMGDRCQEECPFGSFGFQCSQHCDCHNGGQCSPTTGACECEPGYKGPRCQERLCPEGLHGPGCTLPCPCDADNTISCHPVTGACTCQPGWSGHHCNESCPVGYYGDGCQLPCTCQNGADCHSITGGCTCAPGFMGEVCAVSCAAGTYGPNCSSICSCNNGGTCSPVDGSCTCKEGWQGLDCTLPCPSGTWGLNCNESCTCANGAACSPIDGSCSCTPGWLGDTCELPCPDGTFGLNCSEHCDCSHADGCDPVTGHCCCLAGWTGIRCDSTCPPGRWGPNCSVSCSCENGGSCSPEDGSCECAPGFRGPLCQRICPPGFYGHGCAQPCPLCVHSSRPCHHISGICECLPGFSGALCNQVCAGGYFGQDCAQLCSCANNGTCSPIDGSCQCFPGWIGKDCSQACPPGFWGPACFHACSCHNGASCSAEDGACHCTPGWTGLFCTQRKPHLLASQPLRIPCCGLLATVGIVQTSREGGMQAAPGLVVPDSCPTRTEELCRGSSRPDWIQGIDKPKVLEGQGCKAAQQHFLGRTVGAYASVRMAPAVTTSVASAPAAQASPGNTVSRDVPQEPLAMGVSSYVSA

SEQ ID NO: 19238 - protein, 214 aa, Artificial Sequence
  Synthetic polypeptide
GGSLEAAQHSQKQSTELFQCMYFKDKDPATEERCISDGVIYSIRTNGVLLFIPRFGIKGAAYLKNKDGLVISCGPDSCSEWKPGSLQRFQNKITSTTTDGESVTFHLFDHVTVRISIQASRCHSDTIRLEIISNKPYKIPNTELIHQSSPLLKSELVKEVTKSVEEAQLAQEVKVNIIQEEYQEYRQTKGRSLYTLLEEIRDLALLDVSNNYGI

SEQ ID NO: 19239 - protein, 62 aa, Artificial Sequence
  Synthetic polypeptide
ADHLRQHSILRSSLLSSSSACTSKTKTLPPRSVAYLTELFIQLEQMVCFYLYQGLGLKVLLI

SEQ ID NO: 19240 - protein, 61 aa, Artificial Sequence
  Synthetic polypeptide
CLAWGLACARKTPGDSLLCAVRHLEHGTVSGRDGGWEVSHPSSRCQGAGADVWVPGGRRCG

SEQ ID NO: 19241 - protein, 189 aa, Artificial Sequence
  Synthetic polypeptide
SSIPPVPWGQGQGVSLVPSAWHGAWHVPERLQGTHYSVQSDIWSMGLSLVEMAVGRYPIPPPDAKELELMFGCQVEGDAAETPPRPRTPGRPLSSYGMDSRPPMAIFELLDYIVNEPPPKLPSGVFSLEFQDFVNKCLIKNPAERADLKQLMVHAFIKRSDAEEVDFAGWLCSTIGLNQPSTPTHAAGV

SEQ ID NO: 19242 - protein, 49 aa, Artificial Sequence
  Synthetic polypeptide
PPYHRFLGDRDKVSLLSLVPGMGPGMCQKDSRGLITLCSQTSGAWDCLW

SEQ ID NO: 19243 - protein, 44 aa, Artificial Sequence
  Synthetic polypeptide
TSLLSAACRHAREGKGGSRNQNQRRFCRTCLYPGVRVSPGKVGH

SEQ ID NO: 19244 - protein, 41 aa, Artificial Sequence
  Synthetic polypeptide
VRHPRPVCCQLLADMPEKAREGAGTRTRGGFAGLAYIQASE

SEQ ID NO: 19245 - protein, 47 aa, Artificial Sequence
  Synthetic polypeptide
DILDQSAVSCLQTCPRRQGREQEPEPEEVLQDLPISRRQSEPREGWP

SEQ ID NO: 19246 - protein, 31 aa, Artificial Sequence
  Synthetic polypeptide
ILGISATSLLSAVSSRRVQATGSVRFHIVLH

SEQ ID NO: 19247 - protein, 258 aa, Artificial Sequence
  Synthetic polypeptide
KKCLVFRWWLMVAQHCEYTQKPLNGIFLKRMNLRNLRHLPTLGCLLATSTSHWICPIPHCLTLKRRLPTPSSLLRVNSQTPACLRTPPSRATGAAWRTGSTGRAWAASMRCTTRPSASSTTYLRAAASAWASSTWSSAASRCGERAARSASASCSARSPTACGPTTAASTPSSSTPRRWTRPAAAPWSCARCPPATPSRCSTSSARACSTRPSPTPPTAPTTPTASASASPRAGGPATPGSSSPPAPAGWRSSSTTPD

SEQ ID NO: 19248 - protein, 84 aa, Artificial Sequence
  Synthetic polypeptide
KKCLVFRWWLMVAQHCEYTQKPLNGIFLKRMNLRNLRHLPTLGCLLATSTSHWICPIPHCLTLKRRLPTPSSLLRVNSQQQMLG

SEQ ID NO: 19249 - protein, 392 aa, Artificial Sequence
  Synthetic polypeptide
SKHFLFPDHAQRPDPSSSLHQCLEPVSKSCVGLFPRSLDGRLQVSHRKGLPHVIYCRLWRWPDLHSHHELRAMELCEFAFNMKKDEVCVNPYHYQRVETPVLPPVLVPRHTEIPAEFPPLDDYSHSIPENTNFPAGIEPQSNIPETPPPGYLSEDGETSDHQMNHSMDAGSPNLSPNPMSPAHNNLDLQPVTYCEPAFWCSISYYELNQRVGETFHASQPSMTVDGFTDPSNSERFCLGLLSNVNRNAAVELTRRHIGRGVRLYYIGGEVFAECLSDSAIFVQSPNCNQRYGWHPATVCKIPPGCNLKIFNNQEFAALLAQSVNQGFEAVYQLTRMCTIRMSFVKGWGAEYRRQTVTSTPCWIELHLNGPLQWLDKVLTQMGSPSIRCSSVS

SEQ ID NO: 19250 - protein, 89 aa, Artificial Sequence
  Synthetic polypeptide
GQGTGPSRASTSFFQIMLRGLTLPVPCISVLSLFPSPAWASSPGPWMAGCRCPIGRGSLMSSTAACGDGQTCTATTSYGPWSCVSSPSI

SEQ ID NO: 19251 - protein, 52 aa, Artificial Sequence
  Synthetic polypeptide
ACFQVLRGPLPQVPGWPVAGVPSEGAPSCHLLPPVAMARPAQPPRATGHGAV

SEQ ID NO: 19252 - protein, 82 aa, Artificial Sequence
  Synthetic polypeptide
SKHFLFPDHAQRPDPSSSLHQCLEPVSKSCVGLFPRSLDGRLQVSHRKGLPHVIYCRLWRWPDLHSHHELRAMELCEFAFNM

SEQ ID NO: 19253 - protein, 61 aa, Artificial Sequence
  Synthetic polypeptide
SFKTQPKCCLCHGAFLGNPSQVPGWPVAGVPSEGAPSCHLLPPVAMARPAQPPRATGHGAV

SEQ ID NO: 19254 - protein, 377 aa, Artificial Sequence
  Synthetic polypeptide
LSRHNPNAVFAMVPSLGTQARSLDGRLQVSHRKGLPHVIYCRLWRWPDLHSHHELRAMELCEFAFNMKKDEVCVNPYHYQRVETPVLPPVLVPRHTEIPAEFPPLDDYSHSIPENTNFPAGIEPQSNIPETPPPGYLSEDGETSDHQMNHSMDAGSPNLSPNPMSPAHNNLDLQPVTYCEPAFWCSISYYELNQRVGETFHASQPSMTVDGFTDPSNSERFCLGLLSNVNRNAAVELTRRHIGRGVRLYYIGGEVFAECLSDSAIFVQSPNCNQRYGWHPATVCKIPPGCNLKIFNNQEFAALLAQSVNQGFEAVYQLTRMCTIRMSFVKGWGAEYRRQTVTSTPCWIELHLNGPLQWLDKVLTQMGSPSIRCSSVS

SEQ ID NO: 19255 - protein, 66 aa, Artificial Sequence
  Synthetic polypeptide
FQDTTQMLSLPWCLPWEPKPGPWMAGCRCPIGRGSLMSSTAACGDGQTCTATTSYGPWSCVSSPSI

SEQ ID NO: 19256 - protein, 67 aa, Artificial Sequence
  Synthetic polypeptide
LSRHNPNAVFAMVPSLGTQARSLDGRLQVSHRKGLPHVIYCRLWRWPDLHSHHELRAMELCEFAFNM

SEQ ID NO: 19257 - protein, 86 aa, Artificial Sequence
  Synthetic polypeptide
GCCKDAVEPYPMLDLDIQELASLTTGGGDVENFERLFSKLKEMKDKAATLPHEQRKVHAEKVAKAFWMAIGGDRDEIEGLSSDEEH

SEQ ID NO: 19258 - protein, 17 aa, Artificial Sequence
  Synthetic polypeptide
IFPHRAVAKMQWNHIPC

SEQ ID NO: 19259 - protein, 42 aa, Artificial Sequence
  Synthetic polypeptide
NNGDKSFLIGLLQRCSGTISHVRSGYSRISQSYHWRRRCGEF

SEQ ID NO: 19260 - protein, 39 aa, Artificial Sequence
  Synthetic polypeptide
LTPIIPALWKAKAGASRGQEIETILANTIGTKALAFSTH

SEQ ID NO: 19261 - protein, 24 aa, Artificial Sequence
  Synthetic polypeptide
SQHFGRPRRAHHEVRRSRPSWLTR

SEQ ID NO: 19262 - protein, 138 aa, Artificial Sequence
  Synthetic polypeptide
HDRNQGFSLLNSLTGTNHSIGSADPCHPEQPHLPAADSTESLSDHRGGASNTTDAQVDSIVDPMLDLDIQELASLTTGGGDVENFERLFSKLKEMKDKAATLPHEQRKVHAEKVAKAFWMAIGGDRDEIEGLSSDEEH

SEQ ID NO: 19263 - protein, 410 aa, Artificial Sequence
  Synthetic polypeptide
IREAEVVDVIGQVLPEATTTAFEYEDEDGDRITVRSDEEMKAMLSYYYSTVMEQQVNGQLIEPLQIFPRACKPPGERNIHGLKVNTRAGPSQHSSPAVSDSLPSNSLKKSSAELKKILANGQMNEQDIRYRDTLGHGNGGTVYKAYHVPSGKILAVKVILLDITLELQKQIMSELEILYKCDSSYIIGFYGAFFVENRISICTEFMDGGSLDVYRKMPEHVLGRIAVAVVKGLTYLWSLKILHRDVKPSNMLVNTRGQVKLCDFGVSTQLVNSIAKTYVGTNAYMAPERISGEQYGIHSDVWSLGISFMELALGRFPYPQIQKNQGSLMPLQLLQCIVDEDSPVLPVGEFSEPFVHFITQCMRKQPKERPAPEELMGHPFIVQFNDGNAAVVSMWVCRALEERRSQQGPP

SEQ ID NO: 19264 - protein, 50 aa, Artificial Sequence
  Synthetic polypeptide
NPVSTENTKMSGHGWRTPVVPVTRQGLGAGGGGSAEAGESLESGRLRLWM

SEQ ID NO: 19265 - protein, 10 aa, Artificial Sequence
  Synthetic polypeptide
GCGCDRPGSA

SEQ ID NO: 19266 - protein, 400 aa, Artificial Sequence
  Synthetic polypeptide
IREAEVVDVIGQVLPEATTTAFEYEDEDGDRITVRSDEEMKAMLSYYYSTVMEQQVNGQLIEPLQIFPRACKPPGERNIHGLKVNTRAGPSQHSSPAVSDSLPSNSLKKSSAELKKILANGQMNEQDIRYRDTLGHGNGGTVYKAYHVPSGKILAVKVILLDITLELQKQIMSELEILYKCDSSYIIGFYGAFFVENRISICTEFMDGGSLDVYRKMPEHVLGRIAVAVVKGLTYLWSLKILHRDVKPSNMLVNTRGQVKLCDFGVSTQLVNSIAKTYVGTNAYMAPERISGEQYGIHSDVWSLGISFMEIQKNQGSLMPLQLLQCIVDEDSPVLPVGEFSEPFVHFITQCMRKQPKERPAPEELMGHPFIVQFNDGNAAVVSMWVCRALEERRSQQGPP

SEQ ID NO: 19267 - protein, 402 aa, Artificial Sequence
  Synthetic polypeptide
VLLWKENNNNDVHVADEDEDGDRITVRSDEEMKAMLSYYYSTVMEQQVNGQLIEPLQIFPRACKPPGERNIHGLKVNTRAGPSQHSSPAVSDSLPSNSLKKSSAELKKILANGQMNEQDIRYRDTLGHGNGGTVYKAYHVPSGKILAVKVILLDITLELQKQIMSELEILYKCDSSYIIGFYGAFFVENRISICTEFMDGGSLDVYRKMPEHVLGRIAVAVVKGLTYLWSLKILHRDVKPSNMLVNTRGQVKLCDFGVSTQLVNSIAKTYVGTNAYMAPERISGEQYGIHSDVWSLGISFMELALGRFPYPQIQKNQGSLMPLQLLQCIVDEDSPVLPVGEFSEPFVHFITQCMRKQPKERPAPEELMGHPFIVQFNDGNAAVVSMWVCRALEERRSQQGPP

SEQ ID NO: 19268 - protein, 31 aa, Artificial Sequence
  Synthetic polypeptide
PCTRPRFSCGKRIIIMMFMSQMKMKMVIELQ

SEQ ID NO: 19269 - protein, 5 aa, Artificial Sequence
  Synthetic polypeptide
CSCRR

SEQ ID NO: 19270 - protein, 392 aa, Artificial Sequence
  Synthetic polypeptide
VLLWKENNNNDVHVADEDEDGDRITVRSDEEMKAMLSYYYSTVMEQQVNGQLIEPLQIFPRACKPPGERNIHGLKVNTRAGPSQHSSPAVSDSLPSNSLKKSSAELKKILANGQMNEQDIRYRDTLGHGNGGTVYKAYHVPSGKILAVKVILLDITLELQKQIMSELEILYKCDSSYIIGFYGAFFVENRISICTEFMDGGSLDVYRKMPEHVLGRIAVAVVKGLTYLWSLKILHRDVKPSNMLVNTRGQVKLCDFGVSTQLVNSIAKTYVGTNAYMAPERISGEQYGIHSDVWSLGISFMEIQKNQGSLMPLQLLQCIVDEDSPVLPVGEFSEPFVHFITQCMRKQPKERPAPEELMGHPFIVQFNDGNAAVVSMWVCRALEERRSQQGPP

SEQ ID NO: 19271 - protein, 318 aa, Artificial Sequence
  Synthetic polypeptide
TSDSKFFSFWTLGPTPVICRGLSGLQLQTEGCTVGFPTFEVFRLGLASLLLSLQMAYCGTSPCHPVILLDITLELQKQIMSELEILYKCDSSYIIGFYGAFFVENRISICTEFMDGGSLDVYRKMPEHVLGRIAVAVVKGLTYLWSLKILHRDVKPSNMLVNTRGQVKLCDFGVSTQLVNSIAKTYVGTNAYMAPERISGEQYGIHSDVWSLGISFMELALGRFPYPQIQKNQGSLMPLQLLQCIVDEDSPVLPVGEFSEPFVHFITQCMRKQPKERPAPEELMGHPFIVQFNDGNAAVVSMWVCRALEERRSQQGPP

SEQ ID NO: 19272 - protein, 51 aa, Artificial Sequence
  Synthetic polypeptide
FAGGFQAFSYRLKAALLASLLLRFSDLDWLPCSSACRWPIVGLHLVILSYY

SEQ ID NO: 19273 - protein, 41 aa, Artificial Sequence
  Synthetic polypeptide
GFQTWTGFLAPQLADGLLWDFTLSSCHTTRYYTGTSEANYV

SEQ ID NO: 19274 - protein, 308 aa, Artificial Sequence
  Synthetic polypeptide
TSDSKFFSFWTLGPTPVICRGLSGLQLQTEGCTVGFPTFEVFRLGLASLLLSLQMAYCGTSPCHPVILLDITLELQKQIMSELEILYKCDSSYIIGFYGAFFVENRISICTEFMDGGSLDVYRKMPEHVLGRIAVAVVKGLTYLWSLKILHRDVKPSNMLVNTRGQVKLCDFGVSTQLVNSIAKTYVGTNAYMAPERISGEQYGIHSDVWSLGISFMEIQKNQGSLMPLQLLQCIVDEDSPVLPVGEFSEPFVHFITQCMRKQPKERPAPEELMGHPFIVQFNDGNAAVVSMWVCRALEERRSQQGPP

SEQ ID NO: 19275 - protein, 175 aa, Artificial Sequence
  Synthetic polypeptide
QTKTCAPEKDVKPSNMLVNTRGQVKLCDFGVSTQLVNSIAKTYVGTNAYMAPERISGEQYGIHSDVWSLGISFMELALGRFPYPQIQKNQGSLMPLQLLQCIVDEDSPVLPVGEFSEPFVHFITQCMRKQPKERPAPEELMGHPFIVQFNDGNAAVVSMWVCRALEERRSQQGPP

SEQ ID NO: 19276 - protein, 112 aa, Artificial Sequence
  Synthetic polypeptide
NKLLLHVTTWVNIRYFMLNEGGDSKGYQLCDSTYMTFWKRQNTYMEKAKYNFPSYGMEHQHHWLTNSGGGVDCKGMKEHFGMLEMFCSLIFVVVTWLYVFFSKQRPVHLKRT

SEQ ID NO: 19277 - protein, 16 aa, Artificial Sequence
  Synthetic polypeptide
KGREALQYASKHKRTG

SEQ ID NO: 19278 - protein, 165 aa, Artificial Sequence
  Synthetic polypeptide
QTKTCAPEKDVKPSNMLVNTRGQVKLCDFGVSTQLVNSIAKTYVGTNAYMAPERISGEQYGIHSDVWSLGISFMEIQKNQGSLMPLQLLQCIVDEDSPVLPVGEFSEPFVHFITQCMRKQPKERPAPEELMGHPFIVQFNDGNAAVVSMWVCRALEERRSQQGPP

SEQ ID NO: 19279 - protein, 645 aa, Artificial Sequence
  Synthetic polypeptide
SWQMVMSLRVSELQVLLGYAGRNKHGRKHELLTKALHLLKAGCSPAVQMKIKELYRRRFPQKIMTPADLSIPNVHSSPMPATLSPSTIPQLTYDGHPASSPLLPVSLLGPKHELELPHLTSALHPVHPDIKLQKLPFYDLLDELIKPTSLASDNSQRFRETCFAFALTPQQVQQISSSMDISGTKCDFTVQVQLRFCLSETSCPQEDHFPPNLCVKVNTKPCSLPGYLPPTKNGVEPKRPSRPINITSLVRLSTTVPNTIVVSWTAEIGRNYSMAVYLVKQLSSTVLLQRLRAKGIRNPDHSRALIKEKLTADPDSEIATTSLRVSLLCPLGKMRLTIPCRALTCSHLQCFDATLYIQMNEKKPTWVCPVCDKKAPYEHLIIDGLFMEILKYCTDCDEIQFKEDGTWAPMRSKKEVQEVSASYNGVDGCLSSTLEHQVASHHQSSNKNKKVEVIDLTIDSSSDEEEEEPSAKRTCPSLSPTSPLNNKGILSLPHQASPVSRTPSLPAVDTSYINTSLIQDYRHPFHMTPMPYDLQGLDFFPFLSGDNQHYNTSLLAAAAAAVSDDQDLLHSSRFFPYTSSQMFLDQLSAGGSTSLPTTNGSSSGSNSSLVSSNSLRESHSHTVTNRSSTDTASIFGIIPDIISLD

SEQ ID NO: 19280 - protein, 8 aa, Artificial Sequence
  Synthetic polypeptide
LCDLGKWL

SEQ ID NO: 19281 - protein, 13 aa, Artificial Sequence
  Synthetic polypeptide
ANSCVILANGYEP

SEQ ID NO: 19282 - protein, 154 aa, Artificial Sequence
  Synthetic polypeptide
SWQMVMSLRVSELQVLLGYAGRNKHGRKHELLTKALHLLKAGCSPAVQMKIKELYRRRFPQKIMTPADLSIPNVHSSPMPATLSPSTIPQLTYDGHPASSPLLPVSLLGPKHELELPHLTSALHPVHPDIKLQKLPFYDLLDELIKPTSLAEII

SEQ ID NO: 19283 - protein, 55 aa, Artificial Sequence
  Synthetic polypeptide
CTVFIKSTVVYNNVLSLTFTHHSLTGSPRATSSTAGSIHALQHLLACRCSSSSFR

SEQ ID NO: 19284 - protein, 121 aa, Artificial Sequence
  Synthetic polypeptide
ASHSLTIHSLAHPEQLPVLQAPFMHYNTSLLAAAAAAVSDDQDLLHSSRFFPYTSSQMFLDQLSAGGSTSLPTTNGSSSGSNSSLVSSNSLRESHSHTVTNRSSTDTASIFGIIPDIISLD

SEQ ID NO: 19285 - protein, 65 aa, Artificial Sequence
  Synthetic polypeptide
CPKPHIHSPFTHWLTQSNFQYCRLHSCITTPPCLPLQQQQFQMIKTSYTRLGFSRIPPHRCFLIS

SEQ ID NO: 19286 - protein, 40 aa, Artificial Sequence
  Synthetic polypeptide
ASHSLTIHSLAHPEQLPVLQAPFMHYNTSLLAAAAAAVSD

SEQ ID NO: 19287 - protein, 43 aa, Artificial Sequence
  Synthetic polypeptide
CPKPHIHSPFTHWLTQSNFQYCRLHSCITTPPCLPLQQQQFQM

SEQ ID NO: 19288 - protein, 220 aa, Artificial Sequence
  Synthetic polypeptide
FETSLGNILIERSPRTLPRSITYVSIIIFIMGASIHLVGDSVNHRLLFSGYQHHLSVRENPIIKNLKPETLIDSFELLYYYDEYLGHCMWYIPFFLILFMYFSGCFTASKAESLIPGPALLLVAPSGLYYWYLVTEGQIFILFIFTFFAMLALVLHQKRKRLFLDSNGLFLFSSFALTLLLVALWVAWLWNDPVLRKKYPGVIYVPEPWAFYTLHVSSRH

SEQ ID NO: 19289 - protein, 48 aa, Artificial Sequence
  Synthetic polypeptide
QAWWLTPVISILWEADTGGSLEASSLRPAWATYSSSGPPAPCHAPSRT

SEQ ID NO: 19290 - protein, 37 aa, Artificial Sequence
  Synthetic polypeptide
DQPGQHTHRAVPPHPATLHHVREHHHLHHGCQHPPGG

SEQ ID NO: 19291 - protein, 122 aa, Artificial Sequence
  Synthetic polypeptide
FETSLGNILIERSPRTLPRSITYVSIIIFIMGASIHLVGDSVNHRLLFSGYQHHLSVRENPIIKNLKPETLVRPPPAPCLSTPLSCSTIMMSTWVTACGTSPSSSSSSCTSAAALLPLKLRA

SEQ ID NO: 19292 - protein, 4 aa, Artificial Sequence
  Synthetic polypeptide
PVVS

SEQ ID NO: 19293 - protein, 182 aa, Artificial Sequence
  Synthetic polypeptide
SPLGNLASYLVHTEFLYKVPDLWFLEIQKPRLCKVIRVLAFAYPYTWDSLPIFYRLFLFPGESAQNEATSYHQKHMIMTLLASFLYSAHLPERLAPGRFDYIGHSHQLFHVCVILATHMQMEAILLDKTLRKEWLLATSKPFSFSQIAGAILLCIIFSLSNIIYFSAALYRIPKPELHKKET

SEQ ID NO: 19294 - protein, 40 aa, Artificial Sequence
  Synthetic polypeptide
LLEPIKALWGIWPHTLSTQSSCTRFLTCGFLKSRSPDSVR

SEQ ID NO: 19295 - protein, 320 aa, Artificial Sequence
  Synthetic polypeptide
SEARLIEVFHEQGILFGYRHPQSSATACILSLFQMTNETLNIWTHLLPFWFFAWRFVTALYMTDIKNDSYSWPMLVYMCTSCVYPLVSSCAHTFSSMSKNARHICYFLDYGAVNLFSLGSAIAYSAYTFPDALMCTTFHDYYVALAVLNTILSTGLSCYSRFLEIQKPRLCKVIRVLAFAYPYTWDSLPIFYRLFLFPGESAQNEATSYHQKHMIMTLLASFLYSAHLPERLAPGRFDYIGHSHQLFHVCVILATHMQMEAILLDKTLRKEWLLATSKPFSFSQIAGAILLCIIFSLSNIIYFSAALYRIPKPELHKKET

SEQ ID NO: 19296 - protein, 78 aa, Artificial Sequence
  Synthetic polypeptide
GRLGSLREGDTTENLYYYSFSQASPKGSVTQGNCALGKGSNQRFHGLLDTGSVLTLIPGGPKCYCGPLVRGEAHRGVP

SEQ ID NO: 19297 - protein, 14 aa, Artificial Sequence
  Synthetic polypeptide
GLPSHAELKRQSQM

SEQ ID NO: 19298 - protein, 720 aa, Artificial Sequence
  Synthetic polypeptide
GAFPPFAWCIALLPPCEEGCVCFPFCDDSKFSEASPAMLNLKGNRKCELNCQAMGYRFYVRQAEKVIDGTPCDQNGTAICVSGQCKSIGCDDYLGSDKVVDKCGVCGGDNTGCQVVSGVFKHALTSLGYHRVVEIPEGATKINITEMYKSNNYLALRSRSGRSIINGNWAIDRPGKYEGGGTMFTYKRPNEISSTAGESFLAEGPTNEILDVYMIHQQPNPGVHYEYVIMGTNAISPQVPPHRRPGEPFNGQMVTEGRSQEEGEQKGRNEEKEDLRGEAPEMFTSESAQTFPVRHPDRFSPHRPDNLVPPAPQPPRRSRDHNWKQLGTTECSTTCGKGSQYPIFRCVHRSTHEEAPESYCDSSMKPTPEEEPCNIFPCPAFWDIGEWSECSKTCGLGMQHRQVLCRQVYANRSLTVQPYRCQHLEKPETTSTCQLKICSEWQIRTDWTSCSVPCGVGQRTRDVKCVSNIGDVVDDEECNMKLRPNDIENCDMGPCAKSWFLTEWSERCSAECGAGVRTRSVVCMTNHVSSLPLEGCGNNRPAEATPCDNGPCTGKVEWFAGSWSQCSIECGSGTQQREVICVRKNADTFEVLDPSECSFLEKPPSQQSCHLKPCGAKWFSTEWSMCSKSCQGGFRVREVRCLSDDMTLSNLCDPQLKPEERESCNPQDCVPEVDENCKDKYYNCNVVVQARLCVYNYYKTACCASCTRVANRQTGFLGSR

SEQ ID NO: 19299 - protein, 11 aa, Artificial Sequence
  Synthetic polypeptide
EMNVCKRQSQM

SEQ ID NO: 19300 - protein, 682 aa, Artificial Sequence
  Synthetic polypeptide
MYVKGNRKCELNCQAMGYRFYVRQAEKVIDGTPCDQNGTAICVSGQCKSIGCDDYLGSDKVVDKCGVCGGDNTGCQVVSGVFKHALTSLGYHRVVEIPEGATKINITEMYKSNNYLALRSRSGRSIINGNWAIDRPGKYEGGGTMFTYKRPNEISSTAGESFLAEGPTNEILDVYMIHQQPNPGVHYEYVIMGTNAISPQVPPHRRPGEPFNGQMVTEGRSQEEGEQKGRNEEKEDLRGEAPEMFTSESAQTFPVRHPDRFSPHRPDNLVPPAPQPPRRSRDHNWKQLGTTECSTTCGKGSQYPIFRCVHRSTHEEAPESYCDSSMKPTPEEEPCNIFPCPAFWDIGEWSECSKTCGLGMQHRQVLCRQVYANRSLTVQPYRCQHLEKPETTSTCQLKICSEWQIRTDWTSCSVPCGVGQRTRDVKCVSNIGDVVDDEECNMKLRPNDIENCDMGPCAKSWFLTEWSERCSAECGAGVRTRSVVCMTNHVSSLPLEGCGNNRPAEATPCDNGPCTGKVEWFAGSWSQCSIECGSGTQQREVICVRKNADTFEVLDPSECSFLEKPPSQQSCHLKPCGAKWFSTEWSMCSKSCQGGFRVREVRCLSDDMTLSNLCDPQLKPEERESCNPQDCVPEVDENCKDKYYNCNVVVQARLCVYNYYKTACCASCTRVANRQTGFLGSR

SEQ ID NO: 19301 - protein, 20 aa, Artificial Sequence
  Synthetic polypeptide
SQHFGRPRWANHLSKRQSQM

SEQ ID NO: 19302 - protein, 40 aa, Artificial Sequence
  Synthetic polypeptide
GQVWWLMPVIPALWEAEVGESLEVRSSRLAWPTCKRQSQM

SEQ ID NO: 19303 - protein, 704 aa, Artificial Sequence
  Synthetic polypeptide
SQHFGRPRWANHLRSGVQDWPGQHVKGNRKCELNCQAMGYRFYVRQAEKVIDGTPCDQNGTAICVSGQCKSIGCDDYLGSDKVVDKCGVCGGDNTGCQVVSGVFKHALTSLGYHRVVEIPEGATKINITEMYKSNNYLALRSRSGRSIINGNWAIDRPGKYEGGGTMFTYKRPNEISSTAGESFLAEGPTNEILDVYMIHQQPNPGVHYEYVIMGTNAISPQVPPHRRPGEPFNGQMVTEGRSQEEGEQKGRNEEKEDLRGEAPEMFTSESAQTFPVRHPDRFSPHRPDNLVPPAPQPPRRSRDHNWKQLGTTECSTTCGKGSQYPIFRCVHRSTHEEAPESYCDSSMKPTPEEEPCNIFPCPAFWDIGEWSECSKTCGLGMQHRQVLCRQVYANRSLTVQPYRCQHLEKPETTSTCQLKICSEWQIRTDWTSCSVPCGVGQRTRDVKCVSNIGDVVDDEECNMKLRPNDIENCDMGPCAKSWFLTEWSERCSAECGAGVRTRSVVCMTNHVSSLPLEGCGNNRPAEATPCDNGPCTGKVEWFAGSWSQCSIECGSGTQQREVICVRKNADTFEVLDPSECSFLEKPPSQQSCHLKPCGAKWFSTEWSMCSKSCQGGFRVREVRCLSDDMTLSNLCDPQLKPEERESCNPQDCVPEVDENCKDKYYNCNVVVQARLCVYNYYKTACCASCTRVANRQTGFLGSR

SEQ ID NO: 19304 - protein, 701 aa, Artificial Sequence
  Synthetic polypeptide
TREAEVAVSQDCTTALQPGLQIKGNRKCELNCQAMGYRFYVRQAEKVIDGTPCDQNGTAICVSGQCKSIGCDDYLGSDKVVDKCGVCGGDNTGCQVVSGVFKHALTSLGYHRVVEIPEGATKINITEMYKSNNYLALRSRSGRSIINGNWAIDRPGKYEGGGTMFTYKRPNEISSTAGESFLAEGPTNEILDVYMIHQQPNPGVHYEYVIMGTNAISPQVPPHRRPGEPFNGQMVTEGRSQEEGEQKGRNEEKEDLRGEAPEMFTSESAQTFPVRHPDRFSPHRPDNLVPPAPQPPRRSRDHNWKQLGTTECSTTCGKGSQYPIFRCVHRSTHEEAPESYCDSSMKPTPEEEPCNIFPCPAFWDIGEWSECSKTCGLGMQHRQVLCRQVYANRSLTVQPYRCQHLEKPETTSTCQLKICSEWQIRTDWTSCSVPCGVGQRTRDVKCVSNIGDVVDDEECNMKLRPNDIENCDMGPCAKSWFLTEWSERCSAECGAGVRTRSVVCMTNHVSSLPLEGCGNNRPAEATPCDNGPCTGKVEWFAGSWSQCSIECGSGTQQREVICVRKNADTFEVLDPSECSFLEKPPSQQSCHLKPCGAKWFSTEWSMCSKSCQGGFRVREVRCLSDDMTLSNLCDPQLKPEERESCNPQDCVPEVDENCKDKYYNCNVVVQARLCVYNYYKTACCASCTRVANRQTGFLGSR

SEQ ID NO: 19305 - protein, 41 aa, Artificial Sequence
  Synthetic polypeptide
SQLLGRLRQENHLNPGGGGCCEPRLHHCAPAWVTDKRQSQM

SEQ ID NO: 19306 - protein, 26 aa, Artificial Sequence
  Synthetic polypeptide
GQQPTNAQKDSFSEQSCVLQRETRQS

SEQ ID NO: 19307 - protein, 342 aa, Artificial Sequence
  Synthetic polypeptide
ASNQQMHRKTASLNSPVSCKEKPDRVEEPPDYSLHWPEGLKGEEIKKCGREGITLNKYNQQYHKLFKDVPLEEVVLKVCSCALQRDFLLQGRLYISPNWLCFHASLFGKDIKVVIPVVSVQMIKKHKMARLLPNGLAITTNTSQKYIFVSLLSRDSVYDLLRRVCTHLQPSSKKSLSVREFSGEPESLEVLIPEMKWRKVCPSSRSLSLPDNIPCIPPSSVDSTDSFFPSRKPPMSEKSRAQVASENGGRWAWPMPGWGPACPKKMPNCSPTAKNAVYEEDELEEEPRSTGELRLWDYRLLKVFFVLICFLVMSSSYLAFRISRLEQQLCSLSWDDPVPGHR

SEQ ID NO: 19308 - protein, 12 aa, Artificial Sequence
  Synthetic polypeptide
PATNKCTERQLL

SEQ ID NO: 19309 - protein, 209 aa, Artificial Sequence
  Synthetic polypeptide
ASNQQMHRKTASLNSPVSCKEKPDRVEEPPDYSLHWPEGLKGEEIKKCGREGITLNKYNQQYHKLFKDVPLEEVVLKVCSCALQRDFLLQGRLYISPNWLCFHASLFGKDIKVVIPVVSVQMIKKHKMARLLPNGLAITTNTSQKYIFVSLLSRDSVYDLLRRVCTHLQPSSKKSLSVREFSGEPESLEVLIPEMKWRKVCPSSRSLSL

SEQ ID NO: 19310 - protein, 164 aa, Artificial Sequence
  Synthetic polypeptide
ASNQQMHRKTASLNSPVSCKEKPDRVEEPPDYSLHWPEGLKGEEIKKCGREGITLNKYNQQYHKLFKDVPLEEVVLKVCSCALQRDFLLQGRLYISPNWLCFHASLFGKDIKVVIPVVSVQMIKKHKMARLLPNGLAITTNTSQKYIFVSLLSRDSVYDLLRRV

SEQ ID NO: 19311 - protein, 145 aa, Artificial Sequence
  Synthetic polypeptide
ASNQQMHRKTASLNSPVSCKEKPDRVEEPPDYSLHWPEGLKGEEIKKCGREGITLNKYNQQYHKLFKDVPLEEVVLKVCSCALQRDFLLQGRLYISPNWLCFHASLFGKDIKVVIPVVSVQMIKKHKMARLLPNGLAITTNTSQK

SEQ ID NO: 19312 - protein, 47 aa, Artificial Sequence
  Synthetic polypeptide
ASNQQMHRKTASLNSPVSCKEKPDRVEEPPDYSAIPLSQCGSLSQVR

SEQ ID NO: 19313 - protein, 49 aa, Artificial Sequence
  Synthetic polypeptide
ASGCSCFAATWDKSLPLSGPALHHKQPTNAQKDSFSEQSCVLQRETRQS

SEQ ID NO: 19314 - protein, 372 aa, Artificial Sequence
  Synthetic polypeptide
ESEVSSKPQAVPVLLRLGTSHFRFLGLLYTISNQQMHRKTASLNSPVSCKEKPDRVEEPPDYSLHWPEGLKGEEIKKCGREGITLNKYNQQYHKLFKDVPLEEVVLKVCSCALQRDFLLQGRLYISPNWLCFHASLFGKDIKVVIPVVSVQMIKKHKMARLLPNGLAITTNTSQKYIFVSLLSRDSVYDLLRRVCTHLQPSSKKSLSVREFSGEPESLEVLIPEMKWRKVCPSSRSLSLPDNIPCIPPSSVDSTDSFFPSRKPPMSEKSRAQVASENGGRWAWPMPGWGPACPKKMPNCSPTAKNAVYEEDELEEEPRSTGELRLWDYRLLKVFFVLICFLVMSSSYLAFRISRLEQQLCSLSWDDPVPGHR

SEQ ID NO: 19315 - protein, 239 aa, Artificial Sequence
  Synthetic polypeptide
ESEVSSKPQAVPVLLRLGTSHFRFLGLLYTISNQQMHRKTASLNSPVSCKEKPDRVEEPPDYSLHWPEGLKGEEIKKCGREGITLNKYNQQYHKLFKDVPLEEVVLKVCSCALQRDFLLQGRLYISPNWLCFHASLFGKDIKVVIPVVSVQMIKKHKMARLLPNGLAITTNTSQKYIFVSLLSRDSVYDLLRRVCTHLQPSSKKSLSVREFSGEPESLEVLIPEMKWRKVCPSSRSLSL

SEQ ID NO: 19316 - protein, 194 aa, Artificial Sequence
  Synthetic polypeptide
ESEVSSKPQAVPVLLRLGTSHFRFLGLLYTISNQQMHRKTASLNSPVSCKEKPDRVEEPPDYSLHWPEGLKGEEIKKCGREGITLNKYNQQYHKLFKDVPLEEVVLKVCSCALQRDFLLQGRLYISPNWLCFHASLFGKDIKVVIPVVSVQMIKKHKMARLLPNGLAITTNTSQKYIFVSLLSRDSVYDLLRRV

SEQ ID NO: 19317 - protein, 175 aa, Artificial Sequence
  Synthetic polypeptide
ESEVSSKPQAVPVLLRLGTSHFRFLGLLYTISNQQMHRKTASLNSPVSCKEKPDRVEEPPDYSLHWPEGLKGEEIKKCGREGITLNKYNQQYHKLFKDVPLEEVVLKVCSCALQRDFLLQGRLYISPNWLCFHASLFGKDIKVVIPVVSVQMIKKHKMARLLPNGLAITTNTSQK

SEQ ID NO: 19318 - protein, 77 aa, Artificial Sequence
  Synthetic polypeptide
ESEVSSKPQAVPVLLRLGTSHFRFLGLLYTISNQQMHRKTASLNSPVSCKEKPDRVEEPPDYSAIPLSQCGSLSQVR

SEQ ID NO: 19319 - protein, 516 aa, Artificial Sequence
  Synthetic polypeptide
KDSCLRGCGTLRPQQPCRSPIVKPGLPSFRPSSCTQPWLTHSWSTCAAWTLIHHPSQPGTLASSVPLYHAETIKNVRTATESFASDPILYRPVAVALDTKGPEIRTGLIKGSGTAEVELKKGATLKITLDNAYMEKCDENILWLDYKNICKVVEVGSKIYVDDGLISLQVKQKGADFLVTEVENGGSLGSKKGVNLPGAAVDLPAVSEKDIQDLKFGVEQDVDMVFASFIRKASDVHEVRKVLGEKGKNIKIISKIENHEGVRRFDEILEASDGIMVARGDLGIEIPAEKVFLAQKMMIGRCNRAGKPVICATQMLESMIKKPRPTRAEGSDVANAVLDGADCIMLSGETAKGDYPLEAVRMQHLIAREAEAAIYHLQLFEELRRLAPITSDPTEATAVGAVEASFKCCSGAIIVLTKSGRSAHQVARYRPRAPIIAVTRNPQTARQAHLYRGIFPVLCKDPVQEAWAEDVDLRVNFAMNVGKARGFFKKGDVVIVLTGWRPGSGFTNTMRVVPVP

SEQ ID NO: 19320 - protein, 49 aa, Artificial Sequence
  Synthetic polypeptide
FPETLKEFSLYTSVSPGKTGSNIFLMMVERIHAYVDVAHSDLSSHVEAP

SEQ ID NO: 19321 - protein, 87 aa, Artificial Sequence
  Synthetic polypeptide
WLKGFMLTWMWHTQTSAAMSKPHSEAGTAFIQTQQLHAAMADTFLEHMCRLDIDSPPITARNTGIICTIVPCGDHQECAHSHGKLCF

SEQ ID NO: 19322 - protein, 26 aa, Artificial Sequence
  Synthetic polypeptide
GWARWLTPVIPALWEAEAGGSQEEEL

SEQ ID NO: 19323 - protein, 268 aa, Artificial Sequence
  Synthetic polypeptide
SQHFGRLRQVDHKKKNYERLQKALDSVMSIREMTQGSYLEIKKQMDKLDPLAHPLLQWIISSNRSHIVKLPLSRLKFMHTSHQFLLLSSPPAKEARFRTAKKLYGSTFAFHGSHIENWHSILRNGLVNASYTKLQLHGAAYGKGIYLSPISSISFGYSGMGKGQHRMPSKDELVQRYNRMNTIPQTRSIQSRFLQSRNLNCIALCEVITSKDLQKHGNIWVCPVSDHVCTRFFFVYEDGQVGDANINTQDPKIQKEIMRVIGTQVYTN

SEQ ID NO: 19324 - protein, 19 aa, Artificial Sequence
  Synthetic polypeptide
GRWITRRRIMSGFRKLWIV

SEQ ID NO: 19325 - protein, 156 aa, Artificial Sequence
  Synthetic polypeptide
SQHFGRLRQVDHKKKNYERLQKALDSVMSIREMTQGSYLEIKKQMDKLDPLAHPLLQWIISSNRSHIVKLPLSRLKFMHTSHQFLLLSSPPAKEARFRTAKKLYGSTFAFHGSHIENWHSILRNGLVNASYTKLQEWEKDSTGCPPRMSWSRDTTG

SEQ ID NO: 19326 - protein, 269 aa, Artificial Sequence
  Synthetic polypeptide
SQHFGRLRQVDHKKKNYERLQKALDSVMSIREMTQGSYLEIKKQMDKLDPLAHPLLQWIISSNRSHIVKLPLSRQLKFMHTSHQFLLLSSPPAKEARFRTAKKLYGSTFAFHGSHIENWHSILRNGLVNASYTKLQLHGAAYGKGIYLSPISSISFGYSGMGKGQHRMPSKDELVQRYNRMNTIPQTRSIQSRFLQSRNLNCIALCEVITSKDLQKHGNIWVCPVSDHVCTRFFFVYEDGQVGDANINTQDPKIQKEIMRVIGTQVYTN

SEQ ID NO: 19327 - protein, 157 aa, Artificial Sequence
  Synthetic polypeptide
SQHFGRLRQVDHKKKNYERLQKALDSVMSIREMTQGSYLEIKKQMDKLDPLAHPLLQWIISSNRSHIVKLPLSRQLKFMHTSHQFLLLSSPPAKEARFRTAKKLYGSTFAFHGSHIENWHSILRNGLVNASYTKLQEWEKDSTGCPPRMSWSRDTTG

SEQ ID NO: 19328 - protein, 70 aa, Artificial Sequence
  Synthetic polypeptide
SQHFGRLRQVDHKKKNYERLQKALDSVMSIREMTQGSYLEIKKQMDKLDPLAHPLLQWNGKRTAQDALQG

SEQ ID NO: 19329 - protein, 191 aa, Artificial Sequence
  Synthetic polypeptide
SQHFGRLRQVDHKKKNYERLQKALDSVMSIREMTQGSYLEIKKQMDKLDPLAHPLLQWIISSNRSHIVKLPLSRQLKFMHTSHQFLLLSSPPAKEARFRTAKKLYGSTFAFHGSHIENWHSILRNGLVNASYTKLQLHGAAYGKGIYLSPISSISFGYSGMGKGQHRMPSKDELVQRYNRMNTIPQTRSIQ

SEQ ID NO: 19330 - protein, 3 aa, Artificial Sequence
  Synthetic polypeptide
PAI

SEQ ID NO: 19331 - protein, 165 aa, Artificial Sequence
  Synthetic polypeptide
DPVSTKNLLKISQRSRAALQRYLFYCNRYMNHMQSLRFEHKLYAQVKQKMEEMQQHNMSWIEVQFLKKAVDVLCQCRATLMYTYVFAFYLKKNNQSIIFENNQADLENATEVLSGYLERDISQDSLQDIKQKVQDKYRYCESRRRVLLQHVHEGYEKDLWEYIED

SEQ ID NO: 19332 - protein, 20 aa, Artificial Sequence
  Synthetic polypeptide
KLASDLGQPCRGTCSTVIAI

SEQ ID NO: 19333 - protein, 6 aa, Artificial Sequence
  Synthetic polypeptide
TSQCMC

SEQ ID NO: 19334 - protein, 426 aa, Artificial Sequence
  Synthetic polypeptide
GLPSHAELVNACVDVVLSGVKLLQALGLSPGNGKDHSILHSRNDLEEAFIHFMGKGAAAERFFSDKETFHDIAQVASEFPGAQHYVGGNAALIGQKFAANSDLKVLLCGPVGPKLHELLDDNVFVPPESLQEVDEFHLILEYQAGEEWGQLKAPHANRFIFSHDLSNGAMNMLEVFVSSLEEFQPDLVVLSGLHMMEGQSKELQRKRLLEVVTSISDIPTGIPVHLELASMTNRELMSSIVHQVFPAVTSLGLNEQELLFLTQSASGPHSSLSSWNGVPDVGMVSDILFWILKEHGRSKSRASDLTRIHFHTLVYHILATVDGHWANQLAAVAAGARVAGTQACATETIDTSRVSLRAPQEFMTSHSEAGSRIVLNPNKPVVEWHREGISFHFTPVLVCKDPIRTVGLGDAISAEGLFYSEVHPHY

SEQ ID NO: 19335 - protein, 156 aa, Artificial Sequence
  Synthetic polypeptide
GLPSHAELVNACVDVVLSGVKLLQALGLSPGNGKDHSILHSRNDLEEAFIHFMGKGAAAERFFSDKETFHDIAQVASEFPGAQHYVGGNAALIGQKFAANSDLKVLLCGPVGPKLHELLDDNVFVPPESLQEVDEFHLILEYQAAGLSRGDFPWAE

SEQ ID NO: 19336 - protein, 46 aa, Artificial Sequence
  Synthetic polypeptide
VRSHEILWFYKGLFPAIHSARLLPDTLRRRCLASPSPSTMNSQCMC

SEQ ID NO: 19337 - protein, 89 aa, Artificial Sequence
  Synthetic polypeptide
RRGAGQPSTTGSPAVSRLTGRCCVGGAALAWVCMWVQPWEHCGSASQEPWRSRSLKTQWWHWWAPMPPCAAPSPLSLASAWHSSTSSGS

SEQ ID NO: 19338 - protein, 54 aa, Artificial Sequence
  Synthetic polypeptide
GAARGSLPPRGAQLSAASQEDAASAGQPWHGCACGCSPGSTVVLPHRSPGGPGP

SEQ ID NO: 19339 - protein, 127 aa, Artificial Sequence
  Synthetic polypeptide
ARRGAAFHHGEPSCQPPHRKMLRRRGSPGMGVHVGAALGALWFCLTGALEVQVPEDPVVALVGTDATLCCSFSPEPGFSLAQLNLIWQLTDTKQLVHSFAEGQDQGSAYANRTALFPDLLAQGNASL

SEQ ID NO: 19340 - protein, 22 aa, Artificial Sequence
  Synthetic polypeptide
RRGAELRTRMGREKAPRQPCSL

SEQ ID NO: 19341 - protein, 5 aa, Artificial Sequence
  Synthetic polypeptide
GAARS

SEQ ID NO: 19342 - protein, 36 aa, Artificial Sequence
  Synthetic polypeptide
ARRGAEDQDGEGEGSKTALQPLKHSDSKEDDGQEIA

SEQ ID NO: 19343 - protein, 35 aa, Artificial Sequence
  Synthetic polypeptide
ARRGAEDQDGEGEGSKTALQPLKHSDSKEGKDTWA

SEQ ID NO: 19344 - protein, 68 aa, Artificial Sequence
  Synthetic polypeptide
SSSVGTDLPPPRASSPGRGSLPPRGAQLSAASQEDAASAGQPWHGCACGCSPGSTVVLPHRSPGGPGP

SEQ ID NO: 19345 - protein, 137 aa, Artificial Sequence
  Synthetic polypeptide
ELIFPLHVLHLQAGAAFHHGEPSCQPPHRKMLRRRGSPGMGVHVGAALGALWFCLTGALEVQVPEDPVVALVGTDATLCCSFSPEPGFSLAQLNLIWQLTDTKQLVHSFAEGQDQGSAYANRTALFPDLLAQGNASL

SEQ ID NO: 19346 - protein, 96 aa, Artificial Sequence
  Synthetic polypeptide
SSPSTCFISRQGQPSTTGSPAVSRLTGRCCVGGAALAWVCMWVQPWEHCGSASQEPWRSRSLKTQWWHWWAPMPPCAAPSPLSLASAWHSSTSSGS

SEQ ID NO: 19347 - protein, 10 aa, Artificial Sequence
  Synthetic polypeptide
ARHDDGQEIA

SEQ ID NO: 19348 - protein, 8 aa, Artificial Sequence
  Synthetic polypeptide
PGMMMDKK

SEQ ID NO: 19349 - protein, 24 aa, Artificial Sequence
  Synthetic polypeptide
EERFQRQGLLNPQKRGSQEGNRSP

SEQ ID NO: 19350 - protein, 14 aa, Artificial Sequence
  Synthetic polypeptide
THKKEEAKRETGLP

SEQ ID NO: 19351 - protein, 24 aa, Artificial Sequence
  Synthetic polypeptide
GKIPETRFTEPTKKRKPRGKQVSL

SEQ ID NO: 19352 - protein, 218 aa, Artificial Sequence
  Synthetic polypeptide
THKKEEAKRETGLPDLVPDPNYVQASTYVQRAHLYSLRCAAEEKCLASTAYAPEATDYDVRVLLRFPQRVKNQGTADFLPNRPRHTWEWHSCHQHYHSMDEFSHYDLLDAATGKKVAEGHKASFCLEDSTCDFGNLKRYACTSHTQGLSPGCYDTYNADIDCQWIDITDVQPGNYILKVHVNPKYIVLESDFTNNVVRCNIHYTGRYVSATNCKIVQS

SEQ ID NO: 19353 - protein, 79 aa, Artificial Sequence
  Synthetic polypeptide
GKIPETRFTEPTKKRKPRGKQVSLTWSQTPTMCKHPLMCREPTCTPCAVLRRRSVWPAQPMPLRPPTTMCGCYCASPSA

SEQ ID NO: 19354 - protein, 76 aa, Artificial Sequence
  Synthetic polypeptide
GWAQWLTPVIPALWEAEAGGSRSQEMKTSLANMGSWCSRSSSSWEPRPWPSWCSCLCSMAGTSCSSVPWSPRGPSG

SEQ ID NO: 19355 - protein, 71 aa, Artificial Sequence
  Synthetic polypeptide
RPAWPTWAPGAADHLLPGNHGPGLPGAHACAPWQEPPALPFPGVLVALLADFGPGCDPAEHGSPLGLPGDS

SEQ ID NO: 19356 - protein, 250 aa, Artificial Sequence
  Synthetic polypeptide
GRWITKSGDEDQPGQHGLLVQQIIFFLGTTALAFLVLMPVLHGRNLLLFRSLESSWPFWLTLALAVILQNMAAHWVFLETHDGHPQLTNRRVLYAATFLLFPLNVLVGAMVATWRVLLSALYNAIHLGQMDLSLLPPRAATLDPGYYTYRNFLKIEVSQSHPAMTAFCSLLLQAQSLLPRTMAAPQDSLRPGEEDEGMQLLQTKDSMAKGARPGASRGRARWGLAYTLLHNPTLQVFRKTALLGANGAQP

SEQ ID NO: 19357 - protein, 84 aa, Artificial Sequence
  Synthetic polypeptide
GWAQWLTPVIPALWEAEAGGSRSQEMKTSLANMGSWCSRSSSSWEPRPWPSWCSCLCSMAGTSCSSVPWSPREHGSPLGLPGDS

SEQ ID NO: 19358 - protein, 207 aa, Artificial Sequence
  Synthetic polypeptide
RPAWPTWAPGAADHLLPGNHGPGLPGAHACAPWQEPPALPFPGVLVNMAAHWVFLETHDGHPQLTNRRVLYAATFLLFPLNVLVGAMVATWRVLLSALYNAIHLGQMDLSLLPPRAATLDPGYYTYRNFLKIEVSQSHPAMTAFCSLLLQAQSLLPRTMAAPQDSLRPGEEDEGMQLLQTKDSMAKGARPGASRGRARWGLAYTLLH

SEQ ID NO: 19359 - protein, 55 aa, Artificial Sequence
  Synthetic polypeptide
GRWITKSGDEDQPGQHGLLVQQIIFFLGTTALAFLVLMPVLHGRNLLLFRSLESS

SEQ ID NO: 19360 - protein, 5 aa, Artificial Sequence
  Synthetic polypeptide
RMKAM

SEQ ID NO: 19361 - protein, 611 aa, Artificial Sequence
  Synthetic polypeptide
LKNEGHVGQDRVDFGQTEPHTVLFHEPGSSSVWVGGRGKVYLFDFPEGKNASVRTVNIGSTKGSCLDKRDCENYITLLERRSEGLLACGTNARHPSCWNLVNGTVVPLGEMRGYAPFSPDENSLVLFEGDEVYSTIRKQEYNGKIPRFRRIRGESELYTSDTVMQNPQFIKATIVHQDQAYDDKIYYFFREDNPDKNPEAPLNVSRVAQLCRGDQGGESSLSVSKWNTFLKAMLVCSDAATNKNFNRLQDVFLLPDPSGQWRDTRVYGVFSNPWNYSAVCVYSLGDIDKVFRTSSLKGYHSSLPNPRPGKCLPDQQPIPTETFQVADRHPEVAQRVEPMGPLKTPLFHSKYHYQKVAVHRMQASHGETFHVLYLTTDRGTIHKVVEPGEQEHSFAFNIMEIQPFRRAAAIQTMSLDAERRKLYVSSQWEVSQVPLDLCEVYGGGCHGCLMSRDPYCGWDQGRCISIYSSERSVLQSINPAEPHKECPNPKPDKAPLQKVSLAPNSRYYLSCPMESRHATYSWRHKENVEQSCEPGHQSPNCILFIENLTAQQYGHYFCEAQEGSYFREAQHWQLLPEDGIMAEHLLGHACALAASLWLGVLPTLTLGLLVH

SEQ ID NO: 19362 - protein, 597 aa, Artificial Sequence
  Synthetic polypeptide
LKNEGHVGQDRVDFGQTEPHTVLFHEPGSSSVWVGGRGKVYLFDFPEGKNASVRTDCENYITLLERRSEGLLACGTNARHPSCWNLVNGTVVPLGEMRGYAPFSPDENSLVLFEGDEVYSTIRKQEYNGKIPRFRRIRGESELYTSDTVMQNPQFIKATIVHQDQAYDDKIYYFFREDNPDKNPEAPLNVSRVAQLCRGDQGGESSLSVSKWNTFLKAMLVCSDAATNKNFNRLQDVFLLPDPSGQWRDTRVYGVFSNPWNYSAVCVYSLGDIDKVFRTSSLKGYHSSLPNPRPGKCLPDQQPIPTETFQVADRHPEVAQRVEPMGPLKTPLFHSKYHYQKVAVHRMQASHGETFHVLYLTTDRGTIHKVVEPGEQEHSFAFNIMEIQPFRRAAAIQTMSLDAERRKLYVSSQWEVSQVPLDLCEVYGGGCHGCLMSRDPYCGWDQGRCISIYSSERSVLQSINPAEPHKECPNPKPDKAPLQKVSLAPNSRYYLSCPMESRHATYSWRHKENVEQSCEPGHQSPNCILFIENLTAQQYGHYFCEAQEGSYFREAQHWQLLPEDGIMAEHLLGHACALAASLWLGVLPTLTLGLLVH

SEQ ID NO: 19363 - protein, 64 aa, Artificial Sequence
  Synthetic polypeptide
ISLMRSGGFKKGNFPAQAVFSCLPPCEMCLSSSAMIVRPPHPRGTVCGGISDQCHLCHLLWPAL

SEQ ID NO: 19364 - protein, 332 aa, Artificial Sequence
  Synthetic polypeptide
GLPTHAELYVVVSVTNVICAICFGRRYDHNHQELLSLVNLNNNFGEVVGSGNPADFIPILRYLPNPSLNAFKDLNEKFYSFMQKMVKEHYKTFEKGHIRDITDSLIEHCQEKQLDENANVQLSDEKIINIVLDLFGAGFDTVTTAISWSLMYLVMNPRVQRKIQEELDTVIGRSRRPRLSDRSHLPYMEAFILETFRHSSFVPFTIPHSTTRDTSLKGFYIPKGRCVFVNQWQINHDQKLWVNPSEFLPERFLTPDGAIDKVLSEKVIIFGMGKRKCIGETIARWEVFLFLAILLQRVEFSVPLGVKVDMTPIYGLTMKHACCEHFQMQLRS

SEQ ID NO: 19365 - protein, 24 aa, Artificial Sequence
  Synthetic polypeptide
DVPFIFCHDCEASPPTRNCMWWYQ

SEQ ID NO: 19366 - protein, 303 aa, Artificial Sequence
  Synthetic polypeptide
GLPTHAELYVVVSVTNVICAICFGRRYDHNHQELLSLVNLNNNFGEVVGSGNPADFIPILRYLPNPSLNAFKDLNEKFYSFMQKMVKEHYKTFEKGHIRDITDSLIEHCQEKQLDENANVQLSDEKIINIVLDLFGAGFDTVTTAISWSLMYLVMNPRVQRKIQEELDTVIGRSRRPRLSDRSHLPYMEAFILETFRHSSFVPFTIPHRKLWVNPSEFLPERFLTPDGAIDKVLSEKVIIFGMGKRKCIGETIARWEVFLFLAILLQRVEFSVPLGVKVDMTPIYGLTMKHACCEHFQMQLRS

SEQ ID NO: 19367 - protein, 40 aa, Artificial Sequence
  Synthetic polypeptide
EAKAGGSCNVRSLRPAWPTWTKQDLIRKSTPMSSRNLDQL

SEQ ID NO: 19368 - protein, 12 aa, Artificial Sequence
  Synthetic polypeptide
DQPGQHGQSRTS

SEQ ID NO: 19369 - protein, 54 aa, Artificial Sequence
  Synthetic polypeptide
GGWIMQCQEFETSLANMDKAGPHKEIYPYVIQELRPTLNELGISTPEELGLDKV

SEQ ID NO: 19370 - protein, 37 aa, Artificial Sequence
  Synthetic polypeptide
SQLLGRLRQENGLNLGGGGCGEPRSYHCTPAWATNWK

SEQ ID NO: 19371 - protein, 29 aa, Artificial Sequence
  Synthetic polypeptide
TWEAEVAVSRDHTTALQPGRQTGSSSGHN

SEQ ID NO: 19372 - protein, 172 aa, Artificial Sequence
  Synthetic polypeptide
AEIIPLHSSLGDKLEVAVVTTERAKHFYSPQDIPVTLYSDADEWEIWKSRSDPVLHIDLRRWADLLLVAPLDANTLGKVASGICDNLLTCVMRAWDRSKPLLFCPAMNTAMWEHPITAQQVDQLKAFGYVEIPCVAKKLVCGDEGLGAMAEVGTIVDKVKEVLFQHSGFQQS

SEQ ID NO: 19373 - protein, 129 aa, Artificial Sequence
  Synthetic polypeptide
AEIIPLHSSLGDKLEVAVVTTERAKHFYSPQDIPVTLYSDADEWETCVMRAWDRSKPLLFCPAMNTAMWEHPITAQQVDQLKAFGYVEIPCVAKKLVCGDEGLGAMAEVGTIVDKVKEVLFQHSGFQQS

SEQ ID NO: 19374 - protein, 30 aa, Artificial Sequence
  Synthetic polypeptide
AEIIPLHSSLGDKLEVAVVTTERAKHFYSP

SEQ ID NO: 19375 - protein, 33 aa, Artificial Sequence
  Synthetic polypeptide
LYHCTPAWVRERDPVSIKRFQPCHRAPAVMGPL

SEQ ID NO: 19376 - protein, 20 aa, Artificial Sequence
  Synthetic polypeptide
KGFSHATELRQSWARYSSSS

SEQ ID NO: 19377 - protein, 1231 aa, Artificial Sequence
  Synthetic polypeptide
AMIVPLHSSLGERAGPCLNKKVSAMPQSSGSHGPAIAAVHSSHHHPTAVQPHGGQVVQSHAHPAPPVAPVQGQQQFQRLKVEDALSYLDQVKLQFGSQPQVYNDFLDIMKEFKSQSIDTPGVISRVSQLFKGHPDLIMGFNTFLPPGYKIEVQTNDMVNVTTPGQVHQIPTHGIQPQPQPPPQHPSQPSAQSAPAPAQPAPQPPPAKVSKPSQLQAHTPASQQTPPLPPYASPRSPPVQPHTPVTISLGTAPSLQNNQPVEFNHAINYVNKIKNRFQGQPDIYKAFLEILHTYQKEQRNAKEAGGNYTPALTEQEVYAQVARLFKNQEDLLSEFGQFLPDANSSVLLSKTTAEKVDSVRNDHGGTVKKPQLNNKPQRPSQNGCQIRRHPTGTTPPVKKKPKLLNLKDSSMADASKHGGGTESLFFDKVRKALRSAEAYENFLRCLVIFNQEVISRAELVQLVSPFLGKFPELFNWFKNFLGYKESVHLETYPKERATEGIAMEIDYASCKRLGSSYRALPKSYQQPKCTGRTPLCKEVLNDTWVSFPSWSEDSTFVSSKKTQYEEHIYRCEDERFELDVVLETNLATIRVLEAIQKKLSRLSAEEQAKFRLDNTLGGTSEVIHRKALQRIYADKAADIIDGLRKNPSIAVPIVLKRLKMKEEEWREAQRGFNKVWREQNEKYYLKSLDHQGINFKQNDTKVLRSKSLLNEIESIYDERQEQATEENAGVPVGPHLSLAYEDKQILEDAAALIIHHVKRQTGIQKEDKYKIKQIMHHFIPDLLFAQRGDLSDVEEEEEEEMDVDEATGAVKKHNGVGGSPPKSKLLFSNTAAQKLRGMDEVYNLFYVNNNWYIFMRLHQILCLRLLRICSQAERQIEEENREREWEREVLGIKRDKSDSPAIQLRLKEPMDVDVEDYYPAFLDMVRSLLDGNIDSSQYEDSLREMFTIHAYIAFTMDKLIQSIVRQLQHIVSDEICVQVTDLYLAENNNGATGGQLNTQNSRSLLESTYQRKAEQLMSDENCFKLMFIQSQGQVQLTIELLDTEEENSDDPVEAERWSDYVERYMNSDTTSPELREHLAQKPVFLPRNLRRIRKCQRGREQQEKEGKEGNSKKTMENVDSLDKLECRFKLNSYKMVYVIKSEDYMYRRTALLRAHQSHERVSKRLHQRFQAWVDKWTKEHVPREMAAETSKWLMGEGLEGLVPCTTTCDTETLHFVSINKYRVKYGTVFKAP

SEQ ID NO: 19378 - protein, 134 aa, Artificial Sequence
  Synthetic polypeptide
AMIVPLHSSLGERAGPCLNKKVSAMPQSSGSHGPAIAAVHSSHHHPTAVQPHGGQVVQSHAHPAPPVAPVQGQQQFQRLKVEDALSYLDQVKLQFGSQPQVYNDFLDIMKEFKSQSIDTPGVISRVSQLFKGHP

SEQ ID NO: 19379 - protein, 100 aa, Artificial Sequence
  Synthetic polypeptide
AMIVPLHSSLGERAGPCLNKKVSAMPQSSGSHGPAIAAVHSSHHHPTAVQPHGGQVVQSHAHPAPPVAPVQGQQQFQRLKVEDALSYLDQVKLQFGSQPQ

SEQ ID NO: 19380 - protein, 88 aa, Artificial Sequence
  Synthetic polypeptide
AMIVPLHSSLGERAGPCLNKKVSAMPQSSGSHGPAIAAVHSSHHHPTAVQPHGGQVVQSHAHPAPPVAPVQGQQQFQRLKVEDALSYL

SEQ ID NO: 19381 - protein, 114 aa, Artificial Sequence
  Synthetic polypeptide
AMIVPLHSSLGERAGPCLNKKVSAMPQSSGSHGPAIAAVHSSHHHPTAVQPHGGQVVQSHAHPAPPVAPVQGQQQFQRLKVVFSSFSWVKKFIFSRKYWLQLVGCGGTTSNLRY

SEQ ID NO: 19382 - protein, 81 aa, Artificial Sequence
  Synthetic polypeptide
AMIVPLHSSLGERAGPCLNKKVSAMPQSSGSHGPAIAAVHSSHHHPTAVQPHGGQVVQSHAHPAPPVAPVQGQQQFQRLKV

SEQ ID NO: 19383 - protein, 65 aa, Artificial Sequence
  Synthetic polypeptide
AMIVPLHSSLGERAGPCLNKKVSAMPQSSGSHGPAIAAVHSSHHHPTAVQPHGGQVVQSHAHPAP

SEQ ID NO: 19384 - protein, 56 aa, Artificial Sequence
  Synthetic polypeptide
AMIVPLHSSLGERAGPCLNKKVSAMPQSSGSHGPAIAAVHSSHHHPTAVQPHGGQV

SEQ ID NO: 19385 - protein, 40 aa, Artificial Sequence
  Synthetic polypeptide
AMTALLHSCLGHFQRASSVQYDINLVETSSTSAHHSHEQH

SEQ ID NO: 19386 - protein, 23 aa, Artificial Sequence
  Synthetic polypeptide
LHYCTPAWATFREPVQSSMISTW

SEQ ID NO: 19387 - protein, 47 aa, Artificial Sequence
  Synthetic polypeptide
HMHVVLAAWEAEMGRSLEPRNERLQLSHDCTTALLPGPLSESQFSPV

SEQ ID NO: 19388 - protein, 35 aa, Artificial Sequence
  Synthetic polypeptide
AMTALLHSCLGHFQRASSVQYDINLVETSSTSAHH

SEQ ID NO: 19389 - protein, 39 aa, Artificial Sequence
  Synthetic polypeptide
IVRGALKTIQELVVKRFFSQAPASKLKVTCLKLLWHWRS

SEQ ID NO: 19390 - protein, 3 aa, Artificial Sequence
  Synthetic polypeptide
EVR

SEQ ID NO: 19391 - protein, 114 aa, Artificial Sequence
  Synthetic polypeptide
NSSSFSSSSVYTKMKMTTMKTFMMIYFHLMNSKRCVENYTGARCEEVFLPGSSIQTKSNLFEAFVALAVLVTLIIGAFYFLCRKGHFQRASSVQYDINLVETSSTSAHHSHEQH

SEQ ID NO: 19392 - protein, 89 aa, Artificial Sequence
  Synthetic polypeptide
NSSSFSSSSVYTKMKMTTMKTFMMIYFHLMNSKRCVENYTGARCEEVFLPGSSIQTKSNLFEAFVALAVLVTLIIGAFYFLCRCGNTCM

SEQ ID NO: 19393 - protein, 109 aa, Artificial Sequence
  Synthetic polypeptide
NSSSFSSSSVYTKMKMTTMKTFMMIYFHLMNSKRCVENYTGARCEEVFLPGSSIQTKSNLFEAFVALAVLVTLIIGAFYFLCRKGHFQRASSVQYDINLVETSSTSAHH

SEQ ID NO: 19394 - protein, 333 aa, Artificial Sequence
  Synthetic polypeptide
AVMAPPHSSLGNRASLLRFQSTLVIAEHANDSLAPITLNTITAATRLGGEVSCLVAGTKCDKVAQDLCKVAGIAKVLVAQHDVYKGLLPEELTPLILATQKQFNYTHICAGASAFGKNLLPRVAAKLEVAPISDIIAIKSPDTFVRTIYAGNALCTVKCDEKVKVFSVRGTSFDAAATSGGSASSEKASSTSPVEISEWLDQKLTKSDRPELTGAKVVVSGGRGLKSGENFKLLYDLADQLHAAVGASRAAVDAGFVPNDMQVGQTGKIVAPELYIAVGISGAIQHLAGMKDSKTIVAINKDPEAPIFQVADYGIVADLFKVVPEMTEILKKK

SEQ ID NO: 19395 - protein, 21 aa, Artificial Sequence
  Synthetic polypeptide
WHHRTPAWETEPHCYDFRVPW

SEQ ID NO: 19396 - protein, 34 aa, Artificial Sequence
  Synthetic polypeptide
SQEFETAVSCDGTTALQPGKQSLIATISEYPGNS

SEQ ID NO: 19397 - protein, 64 aa, Artificial Sequence
  Synthetic polypeptide
AVMAPPHSSLGNRASLLRFQSTLVIAEHANDSLAPITLNTITAATRLGGEVSCLVAGTKCDKRN

SEQ ID NO: 19398 - protein, 303 aa, Artificial Sequence
  Synthetic polypeptide
AVMAPPHSSLGNRASLLRFQSTLVIAEHANDSLAPITLNTITAATRLGGEVSCLVAGTKCDKVAQDLCKVAGIAKVLVAQHDVYKGLLPEELTPLILATQKQFNYTHICAGASAFGKNLLPRVAAKLEVAPISDIIAIKSPDTFVRTIYAGNALCTVKCDEKVKVFSVRGTSFDAAATSGGSASSEKASSTSPVEISEWLDQKLTKSDRPELTGAKVVVSGVGASRAAVDAGFVPNDMQVGQTGKIVAPELYIAVGISGAIQHLAGMKDSKTIVAINKDPEAPIFQVADYGIVADLFKVVPEM

SEQ ID NO: 19399 - protein, 289 aa, Artificial Sequence
  Synthetic polypeptide
AVMAPPHSSLGNRASLLRFQSTLVIAEHANDSLAPITLNTITAATRLGGEVSCLVAGTKCDKVAQDLCKVAGIAKVLVAQHDVYKGLLPEELTPLILATQKQFNYTHICAGASAFGKNLLPRVAAKLEVAPISDIIAIKSPDTFVRTIYAGNALCTVKCDEKVKVFSVRGTSFDAAATSGGSASSEKASSTSPVEISEWLDQKLTKSDRPELTGAKVVVSGDGVSLLLPRLECNGTISAHRHLHLPGSSDSPASASRVAGITGRGLKSGENFKLLYDLADQLHAAVGAS

SEQ ID NO: 19400 - protein, 3 aa, Artificial Sequence
  Synthetic polypeptide
NQW

SEQ ID NO: 19401 - protein, 56 aa, Artificial Sequence
  Synthetic polypeptide
PLFYLMVPKHKKSDASNLDMPNRSCKVLPLNESVKVLNLLRKGKKSYAEVTEISGK

SEQ ID NO: 19402 - protein, 792 aa, Artificial Sequence
  Synthetic polypeptide
GKERNLMLRLLKSVVNEIAFINTLEAQNKRHDVLSKLKEYEQRLNELQEERQRRQEEKQARDEAVQERKRALEAERQARVEELLMKRKEQEARIEQQRQEKEKAREDAARERARDREERLAALTAAQQEAMEELQKKIQLKHDESIRRHMEQIEQRKEKAAELSSGRHANTDYAPKLTPYERKKQCSLCNVLISSEVYLFSHVKGRKHQQAVRENTSIQGRELSDEEVEHLSLKKYIIDIVVESTAPAEALKDGEERQKNKKKAKKIKARMNFRAKEYESLMETKNSGSDSPYKAKLQRLAKDLLKQVQVQDSGSWANNKVSALDRTLGEITRILEKENVADQIAFQAAGGLTALEHILQAVVPATNVNTVLRIPPKSLCNAINVYNLTCNNCSENCSDVLFSNKITFLMDLLIHQLTVYVPDENNTILGRNTNKQVFEGLTTGLLKVSAVVLGCLIANRPDGNCQPATPKIPTQEMKNKPSQGDPFNNRVQDLISYVVNMGLIDKLCACFLSVQGPVDENPKMAIFLQHAAGLLHAMCTLCFAVTGRSYSIFDNNRQDPTGLTAALQATDLAGVLHMLYCVLFHGTILDPSTASPKENYTQNTIQVAIQSLRFFNSFAALHLPAFQSIVGAEGLSLAFRHMASSLLGHCSQVSCESLLHEVIVCVGYFTVNHPDNQVIVQSGRHPTVLQKLCQLPFQYFSDPRLIKVLFPSLIAACYNNHQNKIILEQEMSCVLLATFIQDLAQTPGQAENQPYQPKGKCLGSQDYLELANRFPQQAWEEARQFFLKKEKK

SEQ ID NO: 19403 - protein, 153 aa, Artificial Sequence
  Synthetic polypeptide
GKERNLMLRLLKSVVNEIAFINTLEAQNKRHDVLSKLKEYEQRLNELQEERQRRQEEKQARDEAVQERKRALEAERQARVEELLMKRKEQEARIEQQRQEKEKAREDAARERARDREERLAALTAAQQEAMEELQKKIQLKHDESIRRHMEQI

SEQ ID NO: 19404 - protein, 133 aa, Artificial Sequence
  Synthetic polypeptide
GKERNLMLRLLKSVVNEIAFINTLEAQNKRHDVLSKLKEYEQRLNELQEERQRRQEEKQARDEAVQERKRALEAERQARVEELLMKRKEQEARIEQQRQEKEKAREDAARERARDREERLAALTAAQQEAMEE

SEQ ID NO: 19405 - protein, 70 aa, Artificial Sequence
  Synthetic polypeptide
ASILSPLTTCDVLGHLRTLQKALTSYGPLTLNFSASMGQLAFYAMWEPMSSSLMMTMTTSLKMCTRSSLL

SEQ ID NO: 19406 - protein, 22 aa, Artificial Sequence
  Synthetic polypeptide
TSQPPWGSWHFMLCGSLCLHHL

SEQ ID NO: 19407 - protein, 258 aa, Artificial Sequence
  Synthetic polypeptide
CPGPPQDFAEGPDQLRPLDLELLSLHGAAGILCYVGAYVFITYDDYDHFFEDVYTLIPAVVIIAVGALLFIIGLIGCCATIRESRCGLATFVIILLLVFVTEVVVVVLGYVYRAKVENEVDRSIQKVYKTYNGTNPDAASRAIDYVQRQLHCCGIHNYSDWENTDWFKETKNQSVPLSCCRETASNCNGSLAHPSDLYAEGCEALVVKKLQEIMMHVIWAALAFAAIQLLGMLCACIVLCRRSRDPAYELLITGGTYA

SEQ ID NO: 19408 - protein, 233 aa, Artificial Sequence
  Synthetic polypeptide
CPGPPQDFAEGPDQLRPLDLELLSLHGAAGILCYVGAYVFITYDDYDHFFEDVYTLIPAVVIIAVGALLFIIGLIGCCATIRESRCGLATVENEVDRSIQKVYKTYNGTNPDAASRAIDYVQRQLHCCGIHNYSDWENTDWFKETKNQSVPLSCCRETASNCNGSLAHPSDLYAEGCEALVVKKLQEIMMHVIWAALAFAAIQLLGMLCACIVLCRRSRDPAYELLITGGTYA

SEQ ID NO: 19409 - protein, 6 aa, Artificial Sequence
  Synthetic polypeptide
SHLFRQ

SEQ ID NO: 19410 - protein, 37 aa, Artificial Sequence
  Synthetic polypeptide
GQEFEAAVSCDHTCSDSNFNSRRWYWPRNFSCSYEDF

SEQ ID NO: 19411 - protein, 341 aa, Artificial Sequence
  Synthetic polypeptide
AVITPVQTVTLIPGDGIGPEISAAVMKIFDAAKAPIQWEERNVTAIQGPGGKWMIPSEAKESMDKNKMGLKGPLKTPIAAGHPSMNLLLRKTFDLYANVRPCVSIEGYKTPYTDVNIVTIRENTEGEYSGIEHVIVDGVVQSIKLITEGASKRIAEFAFEYARNNHRSNVTAVHKANIMRMSDGLFLQKCREVAESCKDIKFNEMYLDTVCLNMVQDPSQFDVLVMPNLYGDILSDLCAGLIGGLGVTPSGNIGANGVAIFESVHGTAPDIAGKDMANPTALLLSAVMMLRHMGLFDHAARIEAACFATIKDGKSLTKDLGGNAKCSDFTEEICRRVKDLD

SEQ ID NO: 19412 - protein, 35 aa, Artificial Sequence
  Synthetic polypeptide
AVITPVQTVTLIPGDGIGPEISAAVMKIFDAAKAL

SEQ ID NO: 19413 - protein, 306 aa, Artificial Sequence
  Synthetic polypeptide
AVITPVQTVTLIPGDGIGPEISAAVMKIFDAAKAPIQWEERNVTAIQGPGGKWMIPSEAKESMDKNKMGLKGYKTPYTDVNIVTIRENTEGEYSGIEHVIVDGVVQSIKLITEGASKRIAEFAFEYARNNHRSNVTAVHKANIMRMSDGLFLQKCREVAESCKDIKFNEMYLDTVCLNMVQDPSQFDVLVMPNLYGDILSDLCAGLIGGLGVTPSGNIGANGVAIFESVHGTAPDIAGKDMANPTALLLSAVMMLRHMGLFDHAARIEAACFATIKDGKSLTKDLGGNAKCSDFTEEICRRVKDLD

SEQ ID NO: 19414 - protein, 109 aa, Artificial Sequence
  Synthetic polypeptide
HFWSLRTCNRGPGGTGHRAPGSSRRGGLLPVLRAVAPRTAQAGCICAPRRARLLRATIPRARAALQPDRQSAPAGARLCERDAAARRPGPRAHPGPHPGLPPAWRGAGP

SEQ ID NO: 19415 - protein, 77 aa, Artificial Sequence
  Synthetic polypeptide
QAQWLTPVILALLESEDVQPRAGRHWTSCTRFESTRGAPSCPTSCGPAHCASGMYLCAETRPPSTSYNTAGASCAST

SEQ ID NO: 19416 - protein, 331 aa, Artificial Sequence
  Synthetic polypeptide
TRESEVAVGRDPAIALQPGPQSERVLCFHGPLLYEAKCVKVAIKDKQVKYFIHYSGWNKNWDEWVPESRVLKYVDTNLQKQRELQKANQEQYAEGKMRGAAPGKKTSGLQQKNVEVKTKKNKQKTPGNGDGGSTSETPQPPRKKRARVDPTVENEETFMNRVEVKVKIPEELKPWLVDDWDLITRQKQLFYLPAKKNVDSILEDYANYKKSRGNTDNKEYAVNEVVAGIKEYFNVMLGTQLLYKFERPQYAEILADHPDAPMSQVYGAPHLLRLFVRIGAMLAYTPLDEKSLALLLNYLHDFLKYLAKNSATLFSASDYEVAPPEYHRKAV

SEQ ID NO: 19417 - protein, 30 aa, Artificial Sequence
  Synthetic polypeptide
AEILPSHSSLGHRVSECCAFMGLFFMKQSV

SEQ ID NO: 19418 - protein, 38 aa, Artificial Sequence
  Synthetic polypeptide
APVIPATRAAETGNRLNPGVGGCSRPRSCHRTPAWATE

SEQ ID NO: 19419 - protein, 370 aa, Artificial Sequence
  Synthetic polypeptide
TRESEVAVGRDPAIALQPGPQSERVLCFHGPLLYEAKCVKVAIKDKQVKYFIHYSGWNKKSAVRPRRSEKSLKTHEDIVALFPVPEGAPSVHHPLLTSSWDEWVPESRVLKYVDTNLQKQRELQKANQEQYAEGKMRGAAPGKKTSGLQQKNVEVKTKKNKQKTPGNGDGGSTSETPQPPRKKRARVDPTVENEETFMNRVEVKVKIPEELKPWLVDDWDLITRQKQLFYLPAKKNVDSILEDYANYKKSRGNTDNKEYAVNEVVAGIKEYFNVMLGTQLLYKFERPQYAEILADHPDAPMSQVYGAPHLLRLFVRIGAMLAYTPLDEKSLALLLNYLHDFLKYLAKNSATLFSASDYEVAPPEYHRKAV

SEQ ID NO: 19420 - protein, 277 aa, Artificial Sequence
  Synthetic polypeptide
TRESEVAVGRDPAIALQPGPQSERVLCFHGPLLYEAKCVKVAIKDKQVKYFIHYSGWNKNWDEWVPESRVLKYVDTNLQKQRELQKANQKTKKNKQKTPGNGDGGSTSETPQPPRKKRARVDPTVENEETFMNRVEVKVKIPEELKPWLVDDWDLITRQKQLFYLPAKKNVDSILEDYANYKKSRGNTDNKEYAVNEVVAGIKEYFNVMLGTQLLYKFERPQYAEILADHPDAPMSQVYGAPHLLRLFVRIGAMLAYTPLDEKSLALLLNYLHDFLK

SEQ ID NO: 19421 - protein, 243 aa, Artificial Sequence
  Synthetic polypeptide
TRESEVAVGRDPAIALQPGPQSERVLCFHGPLLYEAKCVKVAIKDKQVKYFIHYSGWNKNWDEWVPESRVLKYVDTNLQKQRELQKANQEQYAEGKMRGAAPGKKTSGLQQKNVEVKTKKNKQKTPGNGDGGSTSETPQPPRKKRARVDPTVENEETFMNRVEVKVKIPEELKPWLVDDWDLITRQKQLFYLPAKKNVDSILEDYANYKKSRGNTDNKEYAVNEVVAGIKEYFNVMLGTQLLY

SEQ ID NO: 19422 - protein, 14 aa, Artificial Sequence
  Synthetic polypeptide
SSIKIEVSLQVMDV

SEQ ID NO: 19423 - protein, 55 aa, Artificial Sequence
  Synthetic polypeptide
FKFKLFVVVAEKNVKVIKHKNRSFTSSHGCLSTVRPTVRRSTTTGCRRLPATGGR

SEQ ID NO: 19424 - protein, 53 aa, Artificial Sequence
  Synthetic polypeptide
FKFKLFVVVAEKNVKVIKHKNRSFTSSHGCLRKPKHTVYWLQNQLGNTSACAF

SEQ ID NO: 19425 - protein, 63 aa, Artificial Sequence
  Synthetic polypeptide
DLCRDIHCSIIYNLPKLKTIQIFISKLNKRFRGAYWKEVDKMVDYMQPGGTPATEGLGRLAPS

SEQ ID NO: 19426 - protein, 36 aa, Artificial Sequence
  Synthetic polypeptide
IRDSEELIGRRWTRWSTICSQAEHLPPRDWDDWHPP

SEQ ID NO: 19427 - protein, 102 aa, Artificial Sequence
  Synthetic polypeptide
TGGGAQRVRRRDPPPASVSDTAQQPSEEQSKSLEKPKQKKNRCFMCRKKVGLTGFECRCGNVYCGVHRYSDVHNCSYNYKADAAEKIRKENPVVVGEKIQKI

SEQ ID NO: 19428 - protein, 92 aa, Artificial Sequence
  Synthetic polypeptide
PAAARSVSGGETRRQLQYQTQHSSHLKSKASLLKNRNKKRIAVSCAGRKWDLLGLNAGVEMFTVVYTVTQMYTIALTITKPMLLRKSEKKIQ

SEQ ID NO: 19429 - protein, 25 aa, Artificial Sequence
  Synthetic polypeptide
RRRRAACQAERPAASFSIRHSTAAI

SEQ ID NO: 19430 - protein, 71 aa, Artificial Sequence
  Synthetic polypeptide
TGGGAQRVRRRDPPPASVSDTAQQPSEEQSKSLEKPKQKKNRCFMCRKKVGLTGKDLNQMFKIKMMFYNNA

SEQ ID NO: 19431 - protein, 56 aa, Artificial Sequence
  Synthetic polypeptide
PAAARSVSGGETRRQLQYQTQHSSHLKSKASLLKNRNKKRIAVSCAGRKWDLLVRT

SEQ ID NO: 19432 - protein, 33 aa, Artificial Sequence
  Synthetic polypeptide
TGGGAQRVRRRDPPPASVSDTAQQPSEEQSKSL

SEQ ID NO: 19433 - protein, 33 aa, Artificial Sequence
  Synthetic polypeptide
PAAARSVSGGETRRQLQYQTQHSSHLKSKASLL

SEQ ID NO: 19434 - protein, 36 aa, Artificial Sequence
  Synthetic polypeptide
TGGGAQRVRRRDPPPASVSDTAQQPSEEQSKSLEKP

SEQ ID NO: 19435 - protein, 35 aa, Artificial Sequence
  Synthetic polypeptide
PAAARSVSGGETRRQLQYQTQHSSHLKSKASLLKN

SEQ ID NO: 19436 - protein, 53 aa, Artificial Sequence
  Synthetic polypeptide
TGGGAQRVRRRDPPPASVSDTAQQPSEEQSKSLEKPKQKKNRCFMCRKKVGLT

SEQ ID NO: 19437 - protein, 53 aa, Artificial Sequence
  Synthetic polypeptide
PAAARSVSGGETRRQLQYQTQHSSHLKSKASLLKNRNKKRIAVSCAGRKWDLL

SEQ ID NO: 19438 - protein, 28 aa, Artificial Sequence
  Synthetic polypeptide
LNACNPSTLGGRRGLITRCATEEHGSRN

SEQ ID NO: 19439 - protein, 28 aa, Artificial Sequence
  Synthetic polypeptide
SRGVQLRNMAQETNHSQVPMLCSTGCGF

SEQ ID NO: 19440 - protein, 16 aa, Artificial Sequence
  Synthetic polypeptide
SQHFGRPTRTNHEVCN

SEQ ID NO: 19441 - protein, 147 aa, Artificial Sequence
  Synthetic polypeptide
SRGVQLRNMAQETNHSQVPMLCSTGCGFYGNPRTNGMCSVCYKEHLQRQNSSNGRISPPATSVSSLSESLPVQCTDGSVPEAQSALDSTSSSMQPSPVSNQSLLSESVASSQLDSTSVDKAVPETEDVQASVSDTAQQPSEEQSKSL

SEQ ID NO: 19442 - protein, 150 aa, Artificial Sequence
  Synthetic polypeptide
SRGVQLRNMAQETNHSQVPMLCSTGCGFYGNPRTNGMCSVCYKEHLQRQNSSNGRISPPATSVSSLSESLPVQCTDGSVPEAQSALDSTSSSMQPSPVSNQSLLSESVASSQLDSTSVDKAVPETEDVQASVSDTAQQPSEEQSKSLEKP

SEQ ID NO: 19443 - protein, 167 aa, Artificial Sequence
  Synthetic polypeptide
SRGVQLRNMAQETNHSQVPMLCSTGCGFYGNPRTNGMCSVCYKEHLQRQNSSNGRISPPATSVSSLSESLPVQCTDGSVPEAQSALDSTSSSMQPSPVSNQSLLSESVASSQLDSTSVDKAVPETEDVQASVSDTAQQPSEEQSKSLEKPKQKKNRCFMCRKKVGLT

SEQ ID NO: 19444 - protein, 54 aa, Artificial Sequence
  Synthetic polypeptide
LNACNPSTLGGRRGLITRSGDRDHPGQHGVQLRNMAQETNHSQVPMLCSTGCGF

SEQ ID NO: 19445 - protein, 16 aa, Artificial Sequence
  Synthetic polypeptide
SRGQEIETILANMVCN

SEQ ID NO: 19446 - protein, 34 aa, Artificial Sequence
  Synthetic polypeptide
SQHFGRPTRTNHEVRRSRPSWPTWCATEEHGSRN

SEQ ID NO: 19447 - protein, 173 aa, Artificial Sequence
  Synthetic polypeptide
LNACNPSTLGGRRGLITRSGDRDHPGQHGVQLRNMAQETNHSQVPMLCSTGCGFYGNPRTNGMCSVCYKEHLQRQNSSNGRISPPATSVSSLSESLPVQCTDGSVPEAQSALDSTSSSMQPSPVSNQSLLSESVASSQLDSTSVDKAVPETEDVQASVSDTAQQPSEEQSKSL

SEQ ID NO: 19448 - protein, 176 aa, Artificial Sequence
  Synthetic polypeptide
LNACNPSTLGGRRGLITRSGDRDHPGQHGVQLRNMAQETNHSQVPMLCSTGCGFYGNPRTNGMCSVCYKEHLQRQNSSNGRISPPATSVSSLSESLPVQCTDGSVPEAQSALDSTSSSMQPSPVSNQSLLSESVASSQLDSTSVDKAVPETEDVQASVSDTAQQPSEEQSKSLEKP

SEQ ID NO: 19449 - protein, 193 aa, Artificial Sequence
  Synthetic polypeptide
LNACNPSTLGGRRGLITRSGDRDHPGQHGVQLRNMAQETNHSQVPMLCSTGCGFYGNPRTNGMCSVCYKEHLQRQNSSNGRISPPATSVSSLSESLPVQCTDGSVPEAQSALDSTSSSMQPSPVSNQSLLSESVASSQLDSTSVDKAVPETEDVQASVSDTAQQPSEEQSKSLEKPKQKKNRCFMCRKKVGLT

SEQ ID NO: 19450 - protein, 8 aa, Artificial Sequence
  Synthetic polypeptide
IAYHSKRV

SEQ ID NO: 19451 - protein, 70 aa, Artificial Sequence
  Synthetic polypeptide
SALITSVSAVCLCSKLPTTVKGFECRCGNVYCGVHRYSDVHNCSYNYKADAAEKIRKENPVVVGEKIQKI

SEQ ID NO: 19452 - protein, 40 aa, Artificial Sequence
  Synthetic polypeptide
KGLNAGVEMFTVVYTVTQMYTIALTITKPMLLRKSEKKIQ

SEQ ID NO: 19453 - protein, 48 aa, Artificial Sequence
  Synthetic polypeptide
SALITSVSAVCLCSKLPTTVKGFECRCGNVYCGVHRYSDVHNCSYNYK

SEQ ID NO: 19454 - protein, 28 aa, Artificial Sequence
  Synthetic polypeptide
KGLNAGVEMFTVVYTVTQMYTIALTITK

SEQ ID NO: 19455 - protein, 115 aa, Artificial Sequence
  Synthetic polypeptide
RTKKQKSQKLHCISIKLHQVCLPLQPPLLPSPPLLTLRQQDQPLFYLFNVKTRMKTFMMIDFHLMNRFECRCGNVYCGVHRYSDVHNCSYNYKADAAEKIRKENPVVVGEKIQKI

SEQ ID NO: 19456 - protein, 40 aa, Artificial Sequence
  Synthetic polypeptide
IGLNAGVEMFTVVYTVTQMYTIALTITKPMLLRKSEKKIQ

SEQ ID NO: 19457 - protein, 93 aa, Artificial Sequence
  Synthetic polypeptide
RTKKQKSQKLHCISIKLHQVCLPLQPPLLPSPPLLTLRQQDQPLFYLFNVKTRMKTFMMIDFHLMNRFECRCGNVYCGVHRYSDVHNCSYNYK

SEQ ID NO: 19458 - protein, 28 aa, Artificial Sequence
  Synthetic polypeptide
IGLNAGVEMFTVVYTVTQMYTIALTITK

SEQ ID NO: 19459 - protein, 67 aa, Artificial Sequence
  Synthetic polypeptide
MAISDRLDKENVVWKCSFGPPSSKQNNHHEEKVQEWPWPCERRRSPICCGPLYRIHQGLATSRNDHT

SEQ ID NO: 19460 - protein, 540 aa, Artificial Sequence
  Synthetic polypeptide
FLKDLKREVPFDPAIPFLGIYPKNYKSFCYKDICMHMFIAALFTIAKTWNQPKWPSVIDWIKKMWCGNAPLDHLPLNRITTMRKRFRNGLGPVKEGEAQYAVVHCTGYIKAWPPAGMTIPEEDADVGQGSKYCLVAIGRLQVTSSPVCMDMNGMSVPTEFLSRHNSDGIITFVDPRCISVIGYQPQDLLGKDILEFCHPEDQSHLRESFQQVVKLKGQVLSVMYRFRTKNREWMLIRTSSFTFQNPYSDEIEYIICTNTNVKQLQQQQAELEVHQRDGLSSYDLSQVPVPNLPAGVHEAGKSVEKADAIFSQERDPRFAEMFAGISASEKKMMSSASAAGTQQIYSQGSPFPSGHSGKAFSSSVVHVPGVNDIQSSSSTGQNMSQISRQLNQSQVAWTGSRPPFPGQQIPSQSSKTQSSPFGIGTSHTYPADPSSYSPLSSPATSSPSGNAYSSLANRTPGFAESGQSSGQFQGRPSEVWSQWQSQHHGQQSGEQHSHQQPGQTEVFQDMLPMPGDPTQGTGNYNIEDFADLGMFPPFSE

SEQ ID NO: 19461 - protein, 14 aa, Artificial Sequence
  Synthetic polypeptide
RKCGVEMLLWTTFL

SEQ ID NO: 19462 - protein, 179 aa, Artificial Sequence
  Synthetic polypeptide
FLKDLKREVPFDPAIPFLGIYPKNYKSFCYKDICMHMFIAALFTIAKTWNQPKWPSVIDWIKKMWCGNAPLDHLPLNRITTMRKRFRNGLGPVKEGEAQYAVVHCTGYIKAWPPAGMTIPEEDADVGQGSKYCLVAIGRLQVTSSPVCMDMNGMSVPTEFLSRHNSDGIITFVDPRCIS

SEQ ID NO: 19463 - protein, 52 aa, Artificial Sequence
  Synthetic polypeptide
RDSSTSTSQAAKKIVLNFMFCGFLSKIIDMEFAISPVRRICFGKNGSHMEVT

SEQ ID NO: 19464 - protein, 15 aa, Artificial Sequence
  Synthetic polypeptide
EILPQAHLRQPKRLC

SEQ ID NO: 19465 - protein, 71 aa, Artificial Sequence
  Synthetic polypeptide
GAVAHTCNPSTLGAQGGRIMRSRTLWAITLWATASSRKMGRRNATLLTTVLASLSSLEPSSPRTVTARCAR

SEQ ID NO: 19466 - protein, 775 aa, Artificial Sequence
  Synthetic polypeptide
SQHFGSPRRADHEIKDVVGYNSLGHCFFTEDGPEERNTFDHCLGLLVKSGTLLPSDRDSKMCKMITEDSYPGYIPKPRQDCNAVSTFWMANPNNNLINCAAAGSEETGFWFIFHHVPTGPSVGMYSPGYSEHIPLGKFYNNRAHSNYRAGMIIDNGVKTTEASAKDKRPFLSIISARYSPHQDADPLKPREPAIIRHFIAYKNQDHGAWLRGGDVWLDSCRFADNGIGLTLASGGTFPYDDGSKQEIKNSLFVGESGNVGTEMMDNRIWGPGGLDHSGRTLPIGQNFPIRGIQLYDGPINIQNCTFRKFVALEGRHTSALAFRLNNAWQSCPHNNVTGIAFEDVPITSRVFFGEPGPWFNQLDMDGDKTSVFHDVDGSVSEYPGSYLTKNDNWLVRHPDCINVPDWRGAICSGCYAQMYIQAYKTSNLRMKIIKNDFPSHPLYLEGALTRSTHYQQYQPVVTLQKGYTIHWDQTAPAELAIWLINFNKGDWIRVGLCYPRGTTFSILSDVHNRLLKQTSKTGVFVRTLQMDKVEQSYPGRSHYYWDEDSGLLFLKLKAQNEREKFAFCSMKGCERIKIKALIPKNAGVSDCTATAYPKFTERAVVDVPMPKKLFGSQLKTKDHFLEVKMESSKQHFFHLWNDFAYIEVDGKKYPSSEDGIQVVVIDGNQGRVVSHTSFRNSILQGIPWQLFNYVATIPDNSIVLMASKGRYVSRGPWTRVLEKLGADRGLKLKEQMAFVGFKGSFRPIWVTLDTEDHKAKIFQVVPIPVVKKKKL

SEQ ID NO: 19467 - protein, 69 aa, Artificial Sequence
  Synthetic polypeptide
GQTPEPLPVLPEVPSTCACLSSASLIWTCFSHLSPHALVKRVWPPAKQGLGGKESPASAWLPHRGGELK

SEQ ID NO: 19468 - protein, 24 aa, Artificial Sequence
  Synthetic polypeptide
GRPLSPFQCCLRCPLPVPASRLPV

SEQ ID NO: 19469 - protein, 3 aa, Artificial Sequence
  Synthetic polypeptide
ADP

SEQ ID NO: 19470 - protein, 642 aa, Artificial Sequence
  Synthetic polypeptide
VPQRGAMAQEARELLPLLLPQEDTAGRSPSASAGCPGPGIGPQTKSSTEGEPGWRRASPVTQTSPIKHPLLKRQARMDYSFDTTAEDPWVRISDCIKNLFSPIMSENHGHMPLQPNASLNEEEGTQGHPDGTPPKLDTANGTPKVYKSADSSTVKKGPPVAPKPAWFRQSLKGLRNRASDPRGLPDPALSTQPAPASREHLGSHIRASSSSSSIRQRISSFETFGSSQLPDKGAQRLSLQPSSGEAAKPLGKHEEGRFSGLLGRGAAPTLVPQQPEQVLSSGSPAASEARDPGVSESPPPGRQPNQKTLPPGPDPLLRLLSTQAEESQGPVLKMPSQRARSFPLTRSQSCETKLLDEKTSKLYSISSQVSSAVMKSLLCLPSSISCAQTPCIPKEGASPTSSSNEDSAANGSAETSALDTGFSLNLSELREYTEGLTEAKEDDDGDHSSLQSGQSVISLLSSEELKKLIEEVKVLDEATLKQLDGIHVTILHKEEGAGLGFSLAGGADLENKVITVHRVFPNGLASQEGTIQKGNEVLSINGKSLKGTTHHDALAILRQAREPRQAVIVTRKLTPEAMPDLNSSTDSAASASAASDVSVESTEATVCTVTLEKMSAGLGFSLEGGKGSLHGDKPLTINRIFK

SEQ ID NO: 19471 - protein, 64 aa, Artificial Sequence
  Synthetic polypeptide
GCHPRCHRGEQWHRKRESCCHCCYHRKTQQGEALVPLPAAQDLVSAHRPSPPQRASQGGEEPAQ

SEQ ID NO: 19472 - protein, 55 aa, Artificial Sequence
  Synthetic polypeptide
CFGRTPRLHPGSVVETILQQIEDVTLGATEGSNGTGSERAAATAATTGRHSREKP

SEQ ID NO: 19473 - protein, 706 aa, Artificial Sequence
  Synthetic polypeptide
VPQRGAMAQEARELLPLLLPQEDTAGRSPSASAGCPGPGIGPQTKSSTEGEPGWRRASPVTQTSPIKHPLLKRQARMDYSFDTTAEDPWVRISDCIKNLFSPIMSENHGHMPLQPNASLNEEEGTQGHPDGTPPKLDTANGTPKVYKSADSSTVKKGPPVAPKPAWFRQSLKGLRNRASDPRGLPDPALSTQPAPASREHLGSHIRASSSSSSIRQRISSFETFGSSQLPDKGAQRLSLQPSSGEAAKPLGKHEEGRFSGLLGRGAAPTLVPQQPEQVLSSGSPAASEARDPGVSESPPPGRQPNQKTLPPGPDPLLRLLSTQAEESQGPVLKMPSQRARSFPLTRSQSCETKLLDEKTSKLYSISSQVSSAVMKSLLCLPSSISCAQTPCIPKEGASPTSSSNEDSAANGSAETSALDTGFSLNLSELREYTEGLTEAKEDDDGDHSSLQSGQSVISLLSSEELKKLIEEVKVLDEATLKQLDGIHVTILHKEEGAGLGFSLAGGADLENKVITVHRVFPNGLASQEGTIQKGNEVLSINGKSLKGTTHHDALAILRQAREPRQAVIVTRKLTPEAMPDLNSSTDSAASASAASDVSVESTEATVCTVTLEKMSAGLGFSLEGGKGSLHGDKPLTINRIFKGAASEQSETVQPGDEILQLGGTAMQGLTRFEAWNIIKALPDGPVTIVIRRKSLQSKETTAAGDS

SEQ ID NO: 19474 - protein, 707 aa, Artificial Sequence
  Synthetic polypeptide
VPQRGAMAQEARELLPLLLPQEDTAGRSPSASAGCPGPGIGPQTKSSTEGEPGWRRASPVTQTSPIKHPLLKRQARMDYSFDTTAEDPWVRISDCIKNLFSPIMSENHGHMPLQPNASLNEEEGTQGHPDGTPPKLDTANGTPKVYKSADSSTVKKGPPVAPKPAWFRQSLKGLRNRASDPRGLPDPALSTQPAPASREHLGSHIRASSSSSSIRQRISSFETFGSSQLPDKGAQRLSLQPSSGEAAKPLGKHEEGRFSGLLGRGAAPTLVPQQPEQVLSSGSPAASEARDPGVSESPPPGRQPNQKTLPPGPDPLLRLLSTQAEESQGPVLKMPSQRARSFPLTRSQSCETKLLDEKTSKLYSISSQVSSAVMKSLLCLPSSISCAQTPCIPKEGASPTSSSNEDSAANGSAETSALDTGFSLNLSELREYTEGLTEAKEDDDGDHSSLQSGQSVISLLSSEELKKLIEEVKVLDEATLKQLDGIHVTILHKEEGAGLGFSLAGGADLENKVITVHRVFPNGLASQEGTIQKGNEVLSINGKSLKGTTHHDALAILRQAREPRQAVIVTRKLTPEAMPDLNSSTDSAASASAASDVSVESTAEATVCTVTLEKMSAGLGFSLEGGKGSLHGDKPLTINRIFKGAASEQSETVQPGDEILQLGGTAMQGLTRFEAWNIIKALPDGPVTIVIRRKSLQSKETTAAGDS

SEQ ID NO: 19475 - protein, 24 aa, Artificial Sequence
  Synthetic polypeptide
ETRPLPHDVFRNLFQVCKDSYQCI

SEQ ID NO: 19476 - protein, 458 aa, Artificial Sequence
  Synthetic polypeptide
KLDRYLMMYSEIYFRFAKIHISVSEPIIPFRETITKPPKVDMVNEEIGKQQKVAVIHQMKEDQSKIPEGIQVDSDGLITITTPNKLATLSVRAMPLPEEVTQILEENSDLIRSMEQLTSSLNEGENTHMIHQKTQEKIWEFKGKLEQHLTGRRWRNIVDQIWSFGPRKCGPNILVNKSEDFQNSVWTGPADKASKEASRYRDLGNSIVSGFQLATLSGPMCEEPLMGVCFVLEKWDLSKFEEQGASDLAKEGQEENETCSGGNENQELQDGCSEAFEKRTSQKGESPLTDCYGPFSGQLIATMKEACRYALQVKPQRLMAAMYTCDIMATGDVLGRVYAVLSKREGRVLQEEMKEGTDMFIIKAVLPVAESFGFADEIRKRTSGLASPQLVFSHWEIIPSDPFWVPTTEEEYLHFGEKADSENQARKYMNAVRKRKGLYVEEKIVEHAEKQRTLSKNK

SEQ ID NO: 19477 - protein, 39 aa, Artificial Sequence
  Synthetic polypeptide
CIQKFISGLQRFISVYLNLLFHSEKQSQNPQKLTWSMKK

SEQ ID NO: 19478 - protein, 21 aa, Artificial Sequence
  Synthetic polypeptide
GRGGKQSDVESPEQETGGEAT

SEQ ID NO: 19479 - protein, 263 aa, Artificial Sequence
  Synthetic polypeptide
EEVENNQMLSLLNRRQEERLREQEERLREQEERLCEQEERLCEQEERLREQEERLCEQEKLPGQERLLEEVEKLLKQERRQEEQERLLERERLLDEVEELLEQERLRQQDERLWQQETLRELERLRELERMLELGWEALYEQRAEPRSGFEELNNENKSTLQLEQQVKELEKSATTCPHAQGLPAGGAEEPRGSESAAAARPVPGAPVPQGAWMCGQAGWTPQEHPGLSGEAVGTGEAAGGAGEAACHSFRAAENRELNITII

SEQ ID NO: 19480 - protein, 8 aa, Artificial Sequence
  Synthetic polypeptide
KRWKTIRC

SEQ ID NO: 19481 - protein, 251 aa, Artificial Sequence
  Synthetic polypeptide
EEVENNQMLSLLNRRQEERLREQEERLREQEERLCEQEERLCEQEERLREQEERLCEQEKLPGQERLLEEVEKLLKQERRQEEQERLLERERLLDEVEELLEQERLRQQDERLWQQETLRELERLRELERMLELGWEALYEQRAEPRSGFEELNNENKSTLQLEQQVKELEKSGGAEEPRGSESAAAARPVPGAPVPQGAWMCGQAGWTPQEHPGLSGEAVGTGEAAGGAGEAACHSFRAAENRELNITII

SEQ ID NO: 19482 - protein, 7 aa, Artificial Sequence
  Synthetic polypeptide
GRGGEAV

SEQ ID NO: 19483 - protein, 214 aa, Artificial Sequence
  Synthetic polypeptide
EEEERLCEQEKLPGQERLLEEVEKLLKQERRQEEQERLLERERLLDEVEELLEQERLRQQDERLWQQETLRELERLRELERMLELGWEALYEQRAEPRSGFEELNNENKSTLQLEQQVKELEKSATTCPHAQGLPAGGAEEPRGSESAAAARPVPGAPVPQGAWMCGQAGWTPQEHPGLSGEAVGTGEAAGGAGEAACHSFRAAENRELNITII

SEQ ID NO: 19484 - protein, 25 aa, Artificial Sequence
  Synthetic polypeptide
KRRRGCVNRRSCQGRRGCWKRWRSC

SEQ ID NO: 19485 - protein, 202 aa, Artificial Sequence
  Synthetic polypeptide
EEEERLCEQEKLPGQERLLEEVEKLLKQERRQEEQERLLERERLLDEVEELLEQERLRQQDERLWQQETLRELERLRELERMLELGWEALYEQRAEPRSGFEELNNENKSTLQLEQQVKELEKSGGAEEPRGSESAAAARPVPGAPVPQGAWMCGQAGWTPQEHPGLSGEAVGTGEAAGGAGEAACHSFRAAENRELNITII

SEQ ID NO: 19486 - protein, 68 aa, Artificial Sequence
  Synthetic polypeptide
GRGGEAVRTGEAAGGAGEAAGEGEAAGRGGEAVKTGEAAGGAGEAAGEGEAAGRGGGAPGAGEASATG

SEQ ID NO: 19487 - protein, 221 aa, Artificial Sequence
  Synthetic polypeptide
EEVEKLLEQERRQEEQERLLERERLLEEVEKLLKQERRQEEQERLLERERLLDEVEELLEQERLRQQDERLWQQETLRELERLRELERMLELGWEALYEQRAEPRSGFEELNNENKSTLQLEQQVKELEKSATTCPHAQGLPAGGAEEPRGSESAAAARPVPGAPVPQGAWMCGQAGWTPQEHPGLSGEAVGTGEAAGGAGEAACHSFRAAENRELNITII

SEQ ID NO: 19488 - protein, 25 aa, Artificial Sequence
  Synthetic polypeptide
NRRGGRRSRRGCWRGRGCWKRWRSC

SEQ ID NO: 19489 - protein, 209 aa, Artificial Sequence
  Synthetic polypeptide
EEVEKLLEQERRQEEQERLLERERLLEEVEKLLKQERRQEEQERLLERERLLDEVEELLEQERLRQQDERLWQQETLRELERLRELERMLELGWEALYEQRAEPRSGFEELNNENKSTLQLEQQVKELEKSGGAEEPRGSESAAAARPVPGAPVPQGAWMCGQAGWTPQEHPGLSGEAVGTGEAAGGAGEAACHSFRAAENRELNITII

SEQ ID NO: 19490 - protein, 555 aa, Artificial Sequence
  Synthetic polypeptide
QRLVHEVFLFLFFSFLFFWFMRFKGRSCLRNINVQDEAASADGEAAASYPEDLAKIIDFQDSEETVTSRMLFPTSAQESSRGLPDANDLCLGLQSLSLTGWDRPWSTQDSDSSAQSSTHSVLSMLHNPLGNVLGKPPLSFLPLDPLGSDLVDKFPAPSVRGSRLDTRPILDSRSSSPSDSDTSGFSSGSDHLSDLISSLRISPPLPFLSLSGGGPRDPLKMGVGSRMDQEQAALAAVTPSPTSASKRWPGASVWPSWDLLEAPKDPFSIEREARLHRQAAAVNEATCTWSGQLPPRNYKNPIYSCKVFLGGVPWDITEAGLVNTFRVFGSLSVEWPGKDGKHPRCPPKGYVYLVFELEKSVRSLLQACSHDPLSPDGLSEYYFKMSSRRMRCKEVQVIPWVLADSNFVRSPSQRLDPSRTVFVGALHGMLNAEALAAILNDLFGGVVYAGIDTDKHKYPIGSGRVTFNNQRSYLKAVSAAFVEIKTTKFTKKVQIDPYLEDSLCHICSSQPGPFFCRDQVCFKYFCRSCWHWRHSMEGLRHHSPLMRNQKNRDSS

SEQ ID NO: 19491 - protein, 44 aa, Artificial Sequence
  Synthetic polypeptide
LRSLTSRTLKKQLQAGCFSQPLRKNLPVASQMQMTCALACSPSV

SEQ ID NO: 19492 - protein, 560 aa, Artificial Sequence
  Synthetic polypeptide
QRLVHEVFLFLFFSFLFFWFMRFKGRSCLRNINVQDEAASADGEAAASYPEDLAKIIDFQDSEETVTSRMLFPTSAQESSRGLPDANDLCLGLQSLSLTGWDRPWSTQDSDSSAQSSTHSVLSMLHNPLGNVLGKPPLSFLPLDPLGSDLVDKFPAPSVRGSRLDTRPILDSRSSSPSDSDTSGFSSGSDHLSDLISSLRISPPLPFLSLSGGGPRDPLKMGVGSRMDQEQAALAAVTPSPTSASKRWPGASVWPSWDLLEAPKDPFSIEREARLHRQAAAVNEATCTWSGQLPPRNYKNPIYSCKVFLGGVPWDITEAGLVNTFRVFGSLSVEWPGKDGKHPRCPPKGNMPKGYVYLVFELEKSVRSLLQACSHDPLSPDGLSEYYFKMSSRRMRCKEVQVIPWVLADSNFVRSPSQRLDPSRTVFVGALHGMLNAEALAAILNDLFGGVVYAGIDTDKHKYPIGSGRVTFNNQRSYLKAVSAAFVEIKTTKFTKKVQIDPYLEDSLCHICSSQPGPFFCRDQVCFKYFCRSCWHWRHSMEGLRHHSPLMRNQKNRDSS

SEQ ID NO: 19493 - protein, 58 aa, Artificial Sequence
  Synthetic polypeptide
EAVASTRNAERNGTGCEEIWSGCLGHSNSQVGKTSANASSRDSATHESERVVFKSQKS

SEQ ID NO: 19494 - protein, 553 aa, Artificial Sequence
  Synthetic polypeptide
VARVSDTLCRINKIESRMMILVLWSNYPYEPVCLARHRNNMEASVPKYKKQLPQLGMQKEMEQDAKRFGQAAWATAIPRLEKLQLMLARETLQLMRAKELCLNHKRAEIQGKMEDLPEQEKNTNVVDELEIQFYEIQLELYEVKFEILKNEEILLTTQLDSLKRLIKEKQDEVVYYDPCENPEELKVIDCVVGLQDDKNLEVKELRRQCQQLESKRGRICAKRASLRSRKDQCKENHRFRLQQAEESIRYSRQHHSIQMKRDKIKEEEQKKKEWINQERQKTLQRLRSFKDKRLAQSVRNTSGSEPVAPNLPSDLSQQMCLPASHAVSVIHPSSRKTRGVPLSEAGNVKSPKCQNCHGNIPVQVFVPVGDQTHSKSSEELSLPPPPPPPPPPPPPPPPPPPPLRALSSSSQAATHQNLGFRAPVKDDQPRPLVCESPAERPRDSLESFSCPGSMDEVLASLRHGRAPLRKVEVPAVRPPHASINEHILAAIRQGVKLKKVHPDLGPNPSSKPTSNRRTSDLERSIKAALQRIKRVSADSEEDSDEQDPGQWDG

SEQ ID NO: 19495 - protein, 55 aa, Artificial Sequence
  Synthetic polypeptide
QNENSPSSPPERMSSRLTPTPRRTGCLRASRRSPFPTSMMSQGTAIGSSVWTEPR

SEQ ID NO: 19496 - protein, 28 aa, Artificial Sequence
  Synthetic polypeptide
DCCSFKVESEPSRMRTAHLHHPSACLPD

SEQ ID NO: 19497 - protein, 67 aa, Artificial Sequence
  Synthetic polypeptide
EVRSPSARQLPHLRRSLTLSPRLEHSGTTSGHCSLDFPGSNNPPTSASQVAGTTGACHPHPANFRIF

SEQ ID NO: 19498 - protein, 63 aa, Artificial Sequence
  Synthetic polypeptide
EGLSLCHPGWSTAAQPRVTAALTSLAQTILPPQPPKLLELQVHATHTRLIFVFFEETGSRHVA

SEQ ID NO: 19499 - protein, 48 aa, Artificial Sequence
  Synthetic polypeptide
EVRRPSAWQPPRLRSEEPLRPAAAPSEKVSHFVTQAGAQRHNLGSLQP

SEQ ID NO: 19500 - protein, 31 aa, Artificial Sequence
  Synthetic polypeptide
EVRSPSARQLPHLRNRILLHCPGWPRTPGFK

SEQ ID NO: 19501 - protein, 46 aa, Artificial Sequence
  Synthetic polypeptide
ETGSCYIAQAGLELLASSDLPASASQSAGITGVSHHTQPALLLISL

SEQ ID NO: 19502 - protein, 56 aa, Artificial Sequence
  Synthetic polypeptide
EVRRPSAWQPPRLRSEEPLRPAAAPSEKQDLATLPRLASNSWLQVIFPPRPPRVLG

SEQ ID NO: 19503 - protein, 46 aa, Artificial Sequence; identical to SEQ ID NO: 19501
  Synthetic polypeptide

SEQ ID NO: 19504 - protein, 66 aa, Artificial Sequence
  Synthetic polypeptide
GAPLPGRDPVWEVRSVSARPPRLRSEETLCLATTPSEKQDLATLPRLASNSWLQVIFPPRPPRVLG

SEQ ID NO: 19505 - protein, 31 aa, Artificial Sequence
  Synthetic polypeptide
EVRRPSAWQPPRLRNRILLHCPGWPRTPGFK

SEQ ID NO: 19506 - protein, 116 aa, Artificial Sequence
  Synthetic polypeptide
FACGGKSQSKEPERPLPPLGPVAVDPKGCVTIAIHAKPGSKQNAVTDLTAEAVNVAIAAPPSEGEANAELCRYLSKVLELRKSDVVLDKLCYSIPQQLEETQEGVSGIPDTPCHFL

SEQ ID NO: 19507 - protein, 62 aa, Artificial Sequence
  Synthetic polypeptide
SHPFCQEYSTPISTIFVWPTPVRFSDSAQALPPAGSILQCPNADLPVGVKARARNQRDHFLP

SEQ ID NO: 19508 - protein, 87 aa, Artificial Sequence
  Synthetic polypeptide
MTFGLLPALPVQQFMFPQRHDLRFPRRLYSAFSSLALADRTPSVKNTALPFPPSLFGQPQSVSQTQLKHCLLLAAFSSAPMLICLWG

SEQ ID NO: 19509 - protein, 63 aa, Artificial Sequence
  Synthetic polypeptide
FACGGKSQSKEPERPLPPLGPVAVDPKGCVTIAIHAKPGSKQNAVTALLFHSSTIGGDSGGRF

SEQ ID NO: 19510 - protein, 19 aa, Artificial Sequence
  Synthetic polypeptide
FACGGKSQSKEPERPLPPL

SEQ ID NO: 19511 - protein, 134 aa, Artificial Sequence
  Synthetic polypeptide
FACGGKSQSKEPERPLPPLGPVAVDPKGCVTIAIHAKPGSKQNAVTDLTAEAVNVAIAAPPSEGEANAELCRYLSKVLELRKSDVVLDKTGSCYIAQAGLELLASSDLPASASQSAGITGVSHHTQPALLLISL

SEQ ID NO: 19512 - protein, 120 aa, Artificial Sequence
  Synthetic polypeptide
FACGGKSQSKEPERPLPPLGPVAVDPKGCVTIAIHAKPGSKQNAVTDLTAEAVNVAIAAPPSEGEANAELCRYLSKVLELRKSDVVLDKGGKSREKVVKLLASTTPEEILEKLKKEAKKT

SEQ ID NO: 19513 - protein, 120 aa, Artificial Sequence
  Synthetic polypeptide
FACGGKSQSKEPERPLPPLGPVAVDPKGCVTIAIHAKPGSKQNAVTDLTAEAVNVAIAAPPSEGEANAELCRYLSKVLELRKSDVVLDKKLRDLLKIVPCKLATRTQILGLLVECSFSRL

SEQ ID NO: 19514 - protein, 27 aa, Artificial Sequence
  Synthetic polypeptide
HLPPFLSSSCSGHVRCASFLFTFHHDY

SEQ ID NO: 19515 - protein, 187 aa, Artificial Sequence
  Synthetic polypeptide
DVPPSSSPSTMIIDELPEGAVKPPANKYPIFFFGTHETAFLGPKDLFPYKEYKDKFGKSNKRKGFNEGLWEIENNPGVKFTGYQAIQQQSSSETEGEGGNTADASSEEEGDRVEEDGKGKRKNEKAGSKRKKSYTSKKSSKQSRKSPGDEDDKDCKEEENKSSSEGGDAGNDTRNTTSDLQKTSEGT

SEQ ID NO: 19516 - protein, 156 aa, Artificial Sequence
  Synthetic polypeptide
DVPPSSSPSTMIIDELPEGAVKPPANKYPIFFFGTHETAFLGPKDLFPYKEYKDKFGKSNKRKGFNEGLWEIENNPGVKFTGYQAIQQQSSSETEGEGGNTADASSEEEGDRVEEDGKGKRKNEKAGSKRKKSYTSKVTKKLLIVINVICISIKHF

SEQ ID NO: 19517 - protein, 3 aa, Artificial Sequence
  Synthetic polypeptide
KQD

SEQ ID NO: 19518 - protein, 188 aa, Artificial Sequence
  Synthetic polypeptide
MQPFSKEKSTENKIDELPEGAVKPPANKYPIFFFGTHETAFLGPKDLFPYKEYKDKFGKSNKRKGFNEGLWEIENNPGVKFTGYQAIQQQSSSETEGEGGNTADASSEEEGDRVEEDGKGKRKNEKAGSKRKKSYTSKKSSKQSRKSPGDEDDKDCKEEENKSSSEGGDAGNDTRNTTSDLQKTSEGT

SEQ ID NO: 19519 - protein, 21 aa, Artificial Sequence
  Synthetic polypeptide
CSLFLRRKALKTRLMNSQRAL

SEQ ID NO: 19520 - protein, 157 aa, Artificial Sequence
  Synthetic polypeptide
MQPFSKEKSTENKIDELPEGAVKPPANKYPIFFFGTHETAFLGPKDLFPYKEYKDKFGKSNKRKGFNEGLWEIENNPGVKFTGYQAIQQQSSSETEGEGGNTADASSEEEGDRVEEDGKGKRKNEKAGSKRKKSYTSKVTKKLLIVINVICISIKHF

SEQ ID NO: 19521 - protein, 48 aa, Artificial Sequence
  Synthetic polypeptide
MERVWPLFSLYLMCSLLPSVFCHGIYPCQMLVPCCWTYWPPKLYLVKK

SEQ ID NO: 19522 - protein, 52 aa, Artificial Sequence
  Synthetic polypeptide
AMRSCSREWREFGLYFLSISCAPSSLLFSAMGFTLARCWCHAVGLTGLQNSI

SEQ ID NO: 19523 - protein, 380 aa, Artificial Sequence
  Synthetic polypeptide
GLAPVNGESLASIFSLSHVLPPPFCFLPWDLPLPDAGAMLLDLLASKTLFSEKISGAEGTKLDDEFLDMERKIDVTNKVVAEILSKTTEYLQPNPAYRAKLGMLNTVSKIRGQVKTTGYPQTEGLLGDCMLKYGKELGEDSTFGNALIEVGESMKLMAEVKDSLDINVKQTFIDPLQLLQDKDLKEIGHHLKKLEGRRLDYDYKKKRVGKIPDEEVRQAVEKFEESKELAERSMFNFLENDVEQVSQLAVFIEAALDYHRQSTEILQELQSKLQMRISAASSVPRREYKPRPVKRSSSELNGVSTTSVVKTTGSNIPMDQPCCRGLYDFEPENQGELGFKEGDIITLTNQIDENWYEGMIHGESGFFPINYVEVIVPLPQ

SEQ ID NO: 19524 - protein, 98 aa, Artificial Sequence
  Synthetic polypeptide
GLAPVNGESLASIFSLSHVLPPPFCFLPWDLPLPDAGAMLLDLLASKTLFSEKISGAEGTKLDDEFLDMERKIDVTNKVVAEILSKTTEYLQPNPELS

SEQ ID NO: 19525 - protein, 321 aa, Artificial Sequence
  Synthetic polypeptide
GLAPVNGESLASIFSLSHVLPPPFCFLPWDLPLPDAGAMLLDLLASKTLFSEKISGAEGTKLDDEFLDMERKIDVTNKVVAEILSKTTEYLQPNPAYRAKLGMLNTVSKIRGQVKTTGYPQTEGLLGDCMLKYGKELGEDSTFGNALIEVGESMKLMAEVKDSLDINVKQTFIDPLQLLQDKDLKEIGHHLKKLEGRRLDYDYKKKRVGKIPDEEVRQAVEKFEESKELAERSMFNFLENDVEQVSQLAVFIEAALDYHRQSTEILQELQSKLQMRISAASSVPRREYKPRPVKRSSSELNGVSTTSVVKTTAYSRLEPAD

SEQ ID NO: 19526 - protein, 177 aa, Artificial Sequence
  Synthetic polypeptide
SPQKSVWHMLYYQVLNFGMIVSSALMIWKGLMVITGSESPIVVVLSGSMEPAFHRGDLLFLTNRVEDPIRVGEIVVFRIEGREIPIVHRVLKIHEKQNGHIKFLTKGDNNAVDDRGLYKQGQHWLEKKDVVGRARGMQFSFCWVYSCWFIVSKKPALLFLGRCHSFRYWMFGVDTGL

SEQ ID NO: 19527 - protein, 19 aa, Artificial Sequence
  Synthetic polypeptide
VNSYKALRRVSGTCSIIKS

SEQ ID NO: 19528 - protein, 45 aa, Artificial Sequence
  Synthetic polypeptide
RLNELIHIKPSEECLAHALLSSPKFWNDCLIGTNDLEGVNGNNWK

SEQ ID NO: 19529 - protein, 156 aa, Artificial Sequence
  Synthetic polypeptide
SPQKSVWHMLYYQVLNFGMIVSSALMIWKGLMVITGSESPIVVVLSGSMEPAFHRGDLLFLTNRVEDPIRVGEIVVFRIEGREIPIVHRVLKIHEKQNGHIKFLTKGDNNAVDDRGLYKQGQHWLEKKDVVGRARGFYQENSSVEDRNYLFLILEL

SEQ ID NO: 19530 - protein, 171 aa, Artificial Sequence
  Synthetic polypeptide
SPQKSVWHMLYYQVLNFGMIVSSALMIWKGLMVITGSESPIVVVLSGSMEPAFHRGDLLFLTNRVEDPIRVGEIVVFRIEGREIPIVHRVLKIHEKQNGHIKFLTKGDNNAVDDRGLYKQGQHWLEKKDVVGRARGFVPYIGIVTILMNDYPKFKYAVLFLLGLFVLVHRE

SEQ ID NO: 19531 - protein, 131 aa, Artificial Sequence
  Synthetic polypeptide
SPQKSVWHMLYYQVLNFGMIVSSALMIWKGLMVITGSESPIVVVLSGSMEPAFHRGDLLFLTNRVEDPIRVGEIVVFRIEGREIPIVHRVLKIHEKFVPYIGIVTILMNDYPKFKYAVLFLLGLFVLVHRE

SEQ ID NO: 19532 - protein, 155 aa, Artificial Sequence
  Synthetic polypeptide
SPQKSVWHMLYYQVLNFGMIVSSALMIWKGLMVITGSESPIVVVLSGSMEPAFHRGDLLFLTNRVEDPIRVGEIVVFRIEGREIPIVHRVLKIHEKQNGHIKFLTKGDNNAVDDRGLYKQGQHWLEKKDVVGRARGSSVLLRNTSPHLPQFPRCC

SEQ ID NO: 19533 - protein, 121 aa, Artificial Sequence
  Synthetic polypeptide
SPQKSVWHMLYYQVLNFGMIVSSALMIWKGLMVITGSESPIVVVLRQNGHIKFLTKGDNNAVDDRGLYKQGQHWLEKKDVVGRARGFVPYIGIVTILMNDYPKFKYAVLFLLGLFVLVHRE

SEQ ID NO: 19534 - protein, 26 aa, Artificial Sequence
  Synthetic polypeptide
VFILYEESWNARQPRLLPCRPAAALM

SEQ ID NO: 19535 - protein, 31 aa, Artificial Sequence
  Synthetic polypeptide
NGADSPKYSYCMRSPGMPDNHGSYHVGQQQL

SEQ ID NO: 19536 - protein, 1155 aa, Artificial Sequence
  Synthetic polypeptide
GVLECQTTTAPTMSASSSSDVASIGVSTSGSQGIIEPMDMETQEDGRTSANQRTGSKKNVQADGKIQVDGRTRGDGTQTAQRTRADRKTQVDAGTQESKRPQSDRSAQKGMMTQGRAETQLETTQAGEKIQEDRKAQADKGTQEDRRMQGEKGMQGEKGTQSEGSAPTAMEGQSEQEVATSLGPPSRTPKLPPTAGPRAPLNIECFVQTPEGSCFPKKPGCLPRSEEAVVTASRNHEQTVLGPLSGNLMLPAQPPHEGSVEQVGGERCRGPQSSGPVEAKQEDSPFQCPKEERPGGVPCMDQGGCPLAGLSQEVPTMPSLPGTGLTASPKAGPCSTPTSQHGSTATFLPSEDQVLMSSAPTLHLGLGTPTQSHPPETMATSSEGACAQVPDVEGRTPGPRSCDPGLIDSLKNYLLLLLKLSSTETSGAGGESQVGAATGGLVPSATLTPTVEVAGLSPRTSRRILERVENNHLVQSAQTLLLSPCTSRRLTGLLDREVQAGRQALAAARGSWGPGPSSLTVPAIVVDEEDPGLASEGASEGEGEVSPEGPGLLGASQESSMAGRLGEAGGQAAPGQGPSAESIAQEPSQEEKFPGEALTGLPAATPEELALGARRKRFLPKVRAAGDGEATTPEERESPTVSPRGPRKSLVPGSPGTPGRERRSPTQGRKASMLEVPRAEEELAAGDLGPSPKAGGLDTEVALDEGKQETLAKPRKAKDLLKAPQVIRKIRVEQFPDASGSLKLWCQFFNILSDSVLTWAKDQRPVGEVGRSAGDEGPAALAIVQASPVDCGVYRCTIHNEHGSASTDFCLSPEVLSGFISREEGEVGEEIEMTPMVFAKGLADSGCWGDKLFGRLVSEELRGGGYGCGLRKASQAKVIYGLEPIFESGRTCIIKVSSLLVFGPSSETSLVGRNYDVTIQGCKIQNMSREYCKIFAAEARAAPGFGEVPEIIPLYLIYRPANNIPYATLEEDLGKPLESYCSREWGCAEAPTASGSSEAMQKCQTFQHWLYQWTNGSFLVTDLAGVDWKMTDVQIATKLRGYQGLKESCFPALLDRFASSHQCNAYCELLGLTPLKGPEAAHPQAKAKGSKSPSAGRKGSQLSPQPQKKGLPSPQGTRKSAPSSKATPQASEPVTTQLLGQPPTQEEGSKAQGMR

SEQ ID NO: 19537 - protein, 212 aa, Artificial Sequence
  Synthetic polypeptide
FHLSELKYTIEIERSLYSDHELRALDENQRLAKKKADLHDEEDEQDILLAQDLEDMWEQKFLQFKLGARITEADEKNDRTSLNRKLDRNLVLLVREKFGDQDVWILPQAEWQPGETLRGTAERTLATLSENNMEAKFLGNAPCGHYTFKFPQAMRTESNLGAKVFFFKALLLTGDFSQAGNKGHHVWVTKDELGDYLKPKYLAQVRRFVSDL

SEQ ID NO: 19538 - protein, 14 aa, Artificial Sequence
  Synthetic polypeptide
ASNFTSLNLSIRLR

SEQ ID NO: 19539 - protein, 3 aa, Artificial Sequence
  Synthetic polypeptide
VYD

SEQ ID NO: 19540 - protein, 9 aa, Artificial Sequence
  Synthetic polypeptide
MHTDPGSLC

SEQ ID NO: 19541 - protein, 96 aa, Artificial Sequence
  Synthetic polypeptide
SPVLPSGYSSLKAGTPSSLSLLSSQLREQRLARRRQVSRSELLSKRFALGPQPGPGHPGMRRWACCSWSRCSCCPAPTDCPSTTASTTPTAPTTRT

SEQ ID NO: 19542 - protein, 16 aa, Artificial Sequence
  Synthetic polypeptide
ASDLPWGPSLARVTLA

SEQ ID NO: 19543 - protein, 381 aa, Artificial Sequence
  Synthetic polypeptide
AVEQAICPGAPAWPGSPWHEEMGLLLLVPLLLLPGSYGLPFYNGFYYSNSANDQNLGNGHGKDLLNGVKLVVETPEETLFTYQGASVILPCRYRYEPALVSPRRVRVKWWKLSENGAPEKDVLVAIGLRHRSFGDYQGRVHLRQDKEHDVSLEIQDLRLEDYGRYRCEVIDGLEDESGLVELELRGVVFPYQSPNGRYQFNFHEGQQVCAEQAAVVASFEQLFRAWEEGLDWCNAGWLQDATVQYPIMLPRQPCGGPGLAPGVRSYGPRHRRLHRYDVFCFATALKGRVYYLEHPEKLTLTEAREACQEDDATIAKVGQLFAAWKFHGLDRCDAGWLADGSVRYPVVHPHPNCGPPEPGVRSFGFPDPQSRLYGVYCYRQH

SEQ ID NO: 19544 - protein, 222 aa, Artificial Sequence
  Synthetic polypeptide
SQLLGRLKQENRLNAGGRGCGYVNFRLQYPELFDSLSPEAVRCTIEAGYPGVLSSRDKYGRVVMLFNIENWQSQEITFDEILQAYCFILEKLLENEETQINGFCIIENFKGFTMQQAASLRTSDLRKMVDMLQDSFPARFKAIHFIHQPWYFTTTYNVVKPFLKSKLLERVFVHGDDLSGFYQEIDENILPSDFGGTLPKYDGKAVAEQLFGPQAQAENTAF

SEQ ID NO: 19545 - protein, 9 aa, Artificial Sequence
  Synthetic polypeptide
TQEAEVAAM

SEQ ID NO: 19546 - protein, 43 aa, Artificial Sequence
  Synthetic polypeptide
KYKTSRAWWRMPVISATGEAEAGESLERRRQRLRLCEFPAAVP

SEQ ID NO: 19547 - protein, 114 aa, Artificial Sequence
  Synthetic polypeptide
EAENKSKSLNYTGEKKEKPAAVATAMARVLRETKPIPNLIFAIEQYEKFLIHLSKKSKVNLMQHMKLSTSRDFKIKGNILDMVLREDGEDENEEGTASEHGGQNKEPAKKKRKK

SEQ ID NO: 19548 - protein, 8 aa, Artificial Sequence
  Synthetic polypeptide
RLRIRVRA

SEQ ID NO: 19549 - protein, 4 aa, Artificial Sequence
  Synthetic polypeptide
EAEN

SEQ ID NO: 19550 - protein, 4 aa, Artificial Sequence
  Synthetic polypeptide
RLRI

SEQ ID NO: 19551 - protein, 110 aa, Artificial Sequence
  Synthetic polypeptide
EAENKSKSLNYTGEKKEKPAAVATAMARVLRETKPIPNLIFAIEQYEKFLIHLSKKSKVNLMQHMKLSTSRDFKIKGNILDMVLREDGEDENEEGTASEHGGQNKEPAKK

SEQ ID NO: 19552 - protein, 92 aa, Artificial Sequence
  Synthetic polypeptide
HRIFTVRFLCLDTQILTMVNNCLQYSVQSHAVQACSLGVWWAIPSRFVRSGRCSSWMRPSRPWMLPLSIRMRPSHAASGCFGPQPRCCPSAR

SEQ ID NO: 19553 - protein, 308 aa, Artificial Sequence
  Synthetic polypeptide
VCEERTLFQLDEAIEALDAAIEYKNEAITCRQRVLRASASLLSQCEMNLMAKLSYLSSSETRALLCKYFDKVVTLREEQHQQQIAFSELEMQLEEQQRLVYWLEVALERQRLEMDRQLTLQQKEHEQNMQLLLQQSRDHLGEGLADSRRQYEARIQALEKELGRYMWINQELKQKLGGVNAVGHSRGGEKRSLCSEGRQAPGNEDELHLAPELLWLSPLTEGAPRTREETRDLVHAPLPLTWKRSSLCGEEQGSPEELRQREAAEPLVGRVLPVGEAGLPWNFGPLSKPRRELRRASPGMIDVRKNPL

SEQ ID NO: 19554 - protein, 46 aa, Artificial Sequence
  Synthetic polypeptide
HRIFTVRFLCLDTQILTMVNNCLQYSVQSHAVQACSLGGADAVPVG

SEQ ID NO: 19555 - protein, 46 aa, Artificial Sequence
  Synthetic polypeptide
PRRSGRCSSWMRPSRPWMLPLSIRMRPSHAASGCFGPQPRCCPSAR

SEQ ID NO: 19556 - protein, 626 aa, Artificial Sequence
  Synthetic polypeptide
FPWVAAVDEAYLKGKAAQALNRQHSQRIRELEQEAEQVRAELSEGQRQLRELEGKELQDAGERSRLQEFRRRVAAAQSQVQVLKEKKQATERLVSLSAQSEKRLQELERNVQLMRQQQGQLQRRLREETEQKRRLEAEMSKRQHRVKELELKHEQQQKILKIKTEEIAAFQRKRRSGSNGSVVSLEQQQKIEEQKKWLDQEMEKVLQQRRALEELGEELHKREAILAKKEALMQEKTGLESKRLRSSQALNEDIVRVSSRLEHLEKELSEKSGQLRQGSAQSQQQIRGEIDSLRQEKDSLLKQRLEIDGKLRQGSLLSPEEERTLFQLDEAIEALDAAIEYKNEAITCRQRVLRASASLLSQCEMNLMAKLSYLSSSETRALLCKYFDKVVTLREEQHQQQIAFSELEMQLEEQQRLVYWLEVALERQRLEMDRQLTLQQKEHEQNMQLLLQQSRDHLGEGLADSRRQYEARIQALEKELGRYMWINQELKQKLGGVNAVGHSRGGEKRSLCSEGRQAPGNEDELHLAPELLWLSPLTEGAPRTREETRDLVHAPLPLTWKRSSLCGEEQGSPEELRQREAAEPLVGRVLPVGEAGLPWNFGPLSKPRRELRRASPGMIDVRKNPL

SEQ ID NO: 19557 - protein, 7 aa, Artificial Sequence
  Synthetic polypeptide
KERQLRP

SEQ ID NO: 19558 - protein, 34 aa, Artificial Sequence
  Synthetic polypeptide
GLFKRKGSSGPEPPAQPAYPGAGAGGRAGAGRAE

SEQ ID NO: 19559 - protein, 17 aa, Artificial Sequence
  Synthetic polypeptide
HLSHFAYQRCTTSSRRW

SEQ ID NO: 19560 - protein, 26 aa, Artificial Sequence
  Synthetic polypeptide
VILLTKGALHPPGGGDGWDGVGNKHE

SEQ ID NO: 19561 - protein, 86 aa, Artificial Sequence
  Synthetic polypeptide
LESFCLPKVHYILQEVVMGGMVLETNMNEIVAQIEAQNRLEKSEGGLSAAPARAVSAVKNINLPEIPRNINIGDLNIKVPNLSQFV

SEQ ID NO: 19562 - protein, 49 aa, Artificial Sequence
  Synthetic polypeptide
LESFCLPKVHYILQEVVMGGMVLETNMNEIVAQIEAQNRLEKSEDQVLA

SEQ ID NO: 19563 - protein, 41 aa, Artificial Sequence
  Synthetic polypeptide
LESFCLPKVHYILQEVVMGGMVLETNMNEIVAQIEAQNRLE

SEQ ID NO: 19564 - protein, 64 aa, Artificial Sequence
  Synthetic polypeptide
DQALWFTPVIPALWEAEAGGSLEGKWCPAGGRTDRCISAQHLGHSWQEGALLRAVYPAQSHPSP

SEQ ID NO: 19565 - protein, 377 aa, Artificial Sequence
  Synthetic polypeptide
SQHFGRPRRVDHLRGNGVLLEGELIDVSRHSILDTHGRKERYYVLYIRPSHIHRRKFDAKGNEIEPNFSATRKVNTGFLMSSYKVEAKGDTDRLTPEALKGLVNKPELLALTESLTPDHTVAFWMPESEMEVMELELGAGVRLKTRGDGPFLDSLAKLEAGTVTKCNFTGDGKTGASWTDNIMAQKCSKGAAAEIREQGDGAEDEEWPEEIQQQIVRETFHLVLKRDDNICNFLEGGSLIGGSDYKLIYRHYATLYFVFCVDSSESELGILDLIQVFVETLDKCFENVCELDLIFHMDKVHYILQEVVMGGMVLETNMNEIVAQIEAQNRLEKSEGGLSAAPARAVSAVKNINLPEIPRNINIGDLNIKVPNLSQFV

SEQ ID NO: 19566 - protein, 209 aa, Artificial Sequence
  Synthetic polypeptide
SQHFGRPRRVDHLRGNGVLLEGELIDVSRHSILDTHGRKERYYVLYIRPSHIHRRKFDAKGNEIEPNFSATRKVNTGFLMSSYKVEAKGDTDRLTPEALKGLVNKPELLALTESLTPDHTVAFWMPESEMEVMELELGAGVRLKTRGDGPFLDSLAKLEAGTVTKCNFTGDGKTGASWTDNIMAQKCSKGAAAEIREQGDGAEDEEWDD

SEQ ID NO: 19567 - protein, 56 aa, Artificial Sequence
  Synthetic polypeptide
DPSIPERVLPRTQKEGMLQRKVKKNLHGQDLLGFPTQMPTKGSRWRSPWWRWMVMR

SEQ ID NO: 19568 - protein, 107 aa, Artificial Sequence
  Synthetic polypeptide
KLESFFLKAGHRNQSPSPPKPDIEPKNITLSPTHFWVKTGHKLSDLPCLLAGPKTPPSQRESCPVLRRKECCRERSRRIYTDRTCWVSPLRCRQKDQGGEARGGDGW

SEQ ID NO: 19569 - protein, 467 aa, Artificial Sequence
  Synthetic polypeptide
KLAINYLTYLVCLQVLRPLHPRESPAPYSEGRNAAEKGQEESTRTGLAGFPHSDADKRIKVAKPVVEMDGDEMTRIIWQFIKEKLILPHVDIQLKYFDLGLPNRDQTDDQVTIDSALATQKYSVAVKCATITPDEARVEEFKLKKMWKSPNGTIRNILGGTVFREPIICKNIPRLVPGWTKPITIGRHAHGDQYKATDFVADRAGTFKMVFTPKDGSGVKEWEVYNFPAGGVGMGMYNTDESISGFAHSCFQYAIQKKWPLYMSTKNTILKAYDGRFKDIFQEIFDKHYKTDFDKNKIWYEHRLIDDMVAQVLKSSGGFVWACKNYDGDVQSDILAQGFGSLGLMTSVLVCPDGKTIEAEAAHGTVTRHYREHQKGRPTSTNPIASIFAWTRGLEHRGKLDGNQDLIRFAQMLEKVCVETVESGAMTKDLAGCIHGLSNVKLNEHFLNTTDFLDTIKSNLDRALGRQ

SEQ ID NO: 19570 - protein, 327 aa, Artificial Sequence
  Synthetic polypeptide
KLAINYLTYLVCLQVLRPLHPRESPAPYSEGRNAAEKGQEESTRTGLAGFPHSDADKRIKVAKPVVEMDGDEMTRIIWQFIKEKYKATDFVADRAGTFKMVFTPKDGSGVKEWEVYNFPAGGVGMGMYNTDESISGFAHSCFQYAIQKKWPLYMSTKNTILKAYDGRFKDIFQEIFDKHYKTDFDKNKIWYEHRLIDDMVAQVLKSSGGFVWACKNYDGDVQSDILAQGFGSLGLMTSVLVCPDGKTIEAEAAHGTVTRHYREHQKGRPTSTNPIASIFAWTRGLEHRGKLDGNQDLISVKLNEHFLNTTDFLDTIKSNLDRALGRQ

SEQ ID NO: 19571 - protein, 24 aa, Artificial Sequence
  Synthetic polypeptide
FSLSKLSVLQLHLEWGLTNRTCDL

SEQ ID NO: 19572 - protein, 16 aa, Artificial Sequence
  Synthetic polypeptide
SAYPSYLCYNCIWNGD

SEQ ID NO: 19573 - protein, 480 aa, Artificial Sequence
  Synthetic polypeptide
QLIQVICATIAFGMGIDKPDVRFVIHASLPKSVEGYYQESGRAGRDGEISHCLLFYTYHDVTRLKRLIMMEKDGNHHTRETHFNNLYSMVHYCENITECRRIQLLAYFGENGFNPDFCKKHPDVSCDNCCKTKDYKTRDVTDDVKSIVRFVQEHSSSQGMRNIKHVGPSGRFTMNMLVDIFLGSKSAKIQSGIFGKGSAYSRHNAERLFKKLILDKILDEDLYINANDQAIAYVMLGNKAQTVLNGNLKVDFMETENSSSVKKQKALVAKVSQREEMVKKCLGELTEVCKSLGKVFGVHYFNIFNTVTLKKLAESLSSDPEVLLQIDGVTEDKLEKYGAEVISVLQKYSEWTSPAEDSSPGISLSSSRGPGRSAAEELDEEIPVSSHYFASKTRNERKRKKMPASQRSKRRKTASSGSKAKGGSATCRKISSKTKSSSIIGSSSASHTSQATSGANSKLGIMAPPKPINRPFLKPSYAFS

SEQ ID NO: 19574 - protein, 349 aa, Artificial Sequence
  Synthetic polypeptide
QLIQVICATIAFGMGIDKPDVRFVIHASLPKSVEGYYQESGRAGRDGEISHCLLFYTYHDVTRLKRLIMMEKDGNHHTRETHFNNLYSMVHYCENITECRRIQLLAYFGENGFNPDFCKKHPDVSCDNCCKTKDYKTRDVTDDVKSIVRFVQEHSSSQGMRNIKHVGPSGRFTMNMLVDIFLESLSSDPEVLLQIDGVTEDKLEKYGAEVISVLQKYSEWTSPAEDSSPGISLSSSRGPGRSAAEELDEEIPVSSHYFASKTRNERKRKKMPASQRSKRRKTASSGSKAKGGSATCRKISSKTKSSSIIGSSSASHTSQATSGANSKLGIMAPPKPINRPFLKPSYAFS

SEQ ID NO: 19575 - protein, 27 aa, Artificial Sequence
  Synthetic polypeptide
KGSPASGPIPEEVPAVPKQRPPGASWR

SEQ ID NO: 19576 - protein, 551 aa, Artificial Sequence
  Synthetic polypeptide
GWPRFTRTGPERAALLLDQYRKKSQLFRSNVLLVPLGDDFRYDKPQEWDAQFFNYQRLFDFFNSRPNLHVQAQFGTLSDYFDALYKRTGVEPGARPPGFPVLSGDFFSYADREDHYWTGYYTSRPFYKSLDRVLEAHLRGAEVLYSLAAAHARRSGLAGRYPLSDFTLLTEARRTLGLFQHHDAITGTAKEAVVVDYGVRLLRSLVNLKQVIIHAAHYLVLGDKETYHFDPEAPFLQVDDTRLSHDALPERTVIQLDSSPRFVVLFNPLEQERFSMVSLLVNSPRVRVLSEEGQPLAVQISAHWSSATEAVPDVYQVSVPVRLPALGLGVLQLQLGLDGHRTLPSSVRIYLHGRQLSVSRHEAFPLRVIDSGTSDFALSNRYMQVWFSGLTGLLKSIRRVDEEHEQQVDMQVLVYGTRTSKDKSGAYLFLPDGEAKPYVPKEPPVLRVTEGPFFSEVVAYYEHIHQAVRLYNLPGVEGLSLDISSLVDIRDYVNKELALHIHTDIDSQGAAPTVSEEAPPPGQLLPHASHGLYPGRTEAPHAAHCPGPGCL

SEQ ID NO: 19577 - protein, 117 aa, Artificial Sequence
  Synthetic polypeptide
GYEGVTFLKAAVVISEAGLGLQEQALKGQPCFWTNTGRSPSCSEATSSWCLLEMTSDMTSPRSGMPSSSTTNGSLTSSTAGLTSMCRPSLALFLTILMPCTRGQGWSQGPGLQGFLC

SEQ ID NO: 19578 - protein, 409 aa, Artificial Sequence
  Synthetic polypeptide
GWPRFTRTGPERAALLLDQYRKKSQLFRSNVLLVPLGDDFRYDKPQEWDAQFFNYQRLFDFFNSRPNLHVQAQFGTLSDYFDALYKRTGVEPGARPPGFPVLSGDFFSYADREDHYWTGYYTSRPFYKSLDRVLEAHLRGAEVLYSLAAAHARRSGLAGRYPLSDFTLLTEARRTLGLFQHHDAITGTAKEAVVVDYGVRLLRSLVNLKQVIIHAAHYLVLGDKETYHFDPEAPFLQVDDTRLSHDALPERTVIQLDSSPRFVVLFNPLEQERFSMVSLLVNSPRVRVLSEEGQPLAVQISAHWSSATEAVPDVYQVSVPVRLPALGLGVLQLQLGLDGHRTLPSSVRIYLHGRQLSVSRHEAFPLRVIDSGTSDFALSNRYMQVWFSGLTGLLKGSGLCFLAEHPKGG

SEQ ID NO: 19579 - protein, 763 aa, Artificial Sequence
  Synthetic polypeptide
GWPRFTRTGPERAALLLDQYRKKSQLFRSNVLLVPLGDDFRYDKPQEWDAQFFNYQRLFDFFNSRPNLHVQAQFGTLSDYFDALYKRTGVEPGARPPGFPVLSGDFFSYADREDHYWTGYYTSRPFYKSLDRVLEAHLRGAEVLYSLAAAHARRSGLAGRYPLSDFTLLTEARRTLGLFQHHDAITGTAKEAVVVDYGVRLLRSLVNLKQVIIHAAHYLVLGDKETYHFDPEAPFLQVDDTRLSHDALPERTVIQLDSSPRFVVLFNPLEQERFSMVSLLVNSPRVRVLSEEGQPLAVQISAHWSSATEAVPDVYQVSVPVRLPALGLGVLQLQLGLDGHRTLPSSVRIYLHGRQLSVSRHEAFPLRVIDSGTSDFALSNRYMQVWFSGLTGLLKSIRRVDEEHEQQVDMQVLVYGTRTSKDKSGAYLFLPDGEAKPYVPKEPPVLRVTEGPFFSEVVAYYEHIHQAVRLYNLPGVEGLSLDISSLVDIRDYVNKELALHIHTDIDSQGIFFTDLNGFQVQPRRYLKKLPLQANFYPMPVMAYIQDAQKRLTLHTAQALGVSSLKDGQLEVILDRRLMQDDNRGLGQGLKDNKRTCNRFRLLLERRTVGSEVQDSHSTSYPSLLSHLTSMYLNAPALALPVARMQLPGPGLRSFHPLASSLPCDFHLLNLRTLQAEEDTLPSAETALILHRKGFDCGLEAKNLGFNCTTSQGKVALGSLFHGLDVVFLQPTSLTLLYPLASPSNSTDVYLEPMEIATFRLRLG

SEQ ID NO: 19580 - protein, 721 aa, Artificial Sequence
  Synthetic polypeptide
GWPRFTRTGPERAALLLDQYRKKSQLFRSNVLLVPLGDDFRYDKPQEWDAQFFNYQRLFDFFNSRPNLHVQDHYWTGYYTSRPFYKSLDRVLEAHLRGAEVLYSLAAAHARRSGLAGRYPLSDFTLLTEARRTLGLFQHHDAITGTAKEAVVVDYGVRLLRSLVNLKQVIIHAAHYLVLGDKETYHFDPEAPFLQVDDTRLSHDALPERTVIQLDSSPRFVVLFNPLEQERFSMVSLLVNSPRVRVLSEEGQPLAVQISAHWSSATEAVPDVYQVSVPVRLPALGLGVLQLQLGLDGHRTLPSSVRIYLHGRQLSVSRHEAFPLRVIDSGTSDFALSNRYMQVWFSGLTGLLKSIRRVDEEHEQQVDMQVLVYGTRTSKDKSGAYLFLPDGEAKPYVPKEPPVLRVTEGPFFSEVVAYYEHIHQAVRLYNLPGVEGLSLDISSLVDIRDYVNKELALHIHTDIDSQGIFFTDLNGFQVQPRRYLKKLPLQANFYPMPVMAYIQDAQKRLTLHTAQALGVSSLKDGQLEVILDRRLMQDDNRGLGQGLKDNKRTCNRFRLLLERRTVGSEVQDSHSTSYPSLLSHLTSMYLNAPALALPVARMQLPGPGLRSFHPLASSLPCDFHLLNLRTLQAEEDTLPSAETALILHRKGFDCGLEAKNLGFNCTTSQGKVALGSLFHGLDVVFLQPTSLTLLYPLASPSNSTDVYLEPMEIATFRLRLG

SEQ ID NO: 19581 - protein, 103 aa, Artificial Sequence
  Synthetic polypeptide
GYEGVTFLKAAVVISEAGLGLQEQALKGQPCFWTNTGRSPSCSEATSSWCLLEMTSDMTSPRSGMPSSSTTNGSLTSSTAGLTSMCRIITGQAITLPGPSTRA

SEQ ID NO: 19582 - protein, 96 aa, Artificial Sequence
  Synthetic polypeptide
GWPRFTRTGPERAALLLDQYRKKSQLFRSNVLLVPLGDDFRYDKPQEWDAQFFNYQRLFDFFNSRPNLHVQGGRGSVQPGCSSRSPLWSGWPVPTV

SEQ ID NO: 19583 - protein, 320 aa, Artificial Sequence
  Synthetic polypeptide
GYEGVTFLKAAVVISEAGLGLQEQALKGQPCFWTNTGRSPSCSEATSSWCLLEMTSDMTSPRSGMPSSSTTNGSLTSSTAGLTSMCRGAEVLYSLAAAHARRSGLAGRYPLSDFTLLTEARRTLGLFQHHDAITGTAKEAVVVDYGVRLLRSLVNLKQVIIHAAHYLVLGDKETYHFDPEAPFLQVDDTRLSHDALPERTVIQLDSSPRFVVLFNPLEQERFSMVSLLVNSPRVRVLSEEGQPLAVQISAHWSSATEAVPDVYQVSVPVRLPALGLGVLQLQLGLDGHRTLPSSVRIYLHGRQLSVSRHEAFPLRVIDSG

SEQ ID NO: 19584 - protein, 94 aa, Artificial Sequence
  Synthetic polypeptide
INGCDTCPRRMPKWNRCFRYCWTQKRRALRKSKRLLRTWWCWPGRMLERRRSSGVMGFSSCNVYWTWERLTSCWRLCVRWLAFALSISHGQWQP

SEQ ID NO: 19585 - protein, 27 aa, Artificial Sequence
  Synthetic polypeptide
MGAIHVLDGCQSGTDVSDTVGPRREGH

SEQ ID NO: 19586 - protein, 857 aa, Artificial Sequence
  Synthetic polypeptide
AYLVIPYVYFLLFLSEKPCPRAQVDMCMFISAFFVVRKTWNLPECPAIEEWLNKWVRYMSSTDAKVEQMFQILLDPEEKGTEKKQKASQNLVVLAREDAGAEKIFRSNGVQLLQRLLDMGETDLMLAALRTLVGICSEHQSRTVATLSILGTRRVVSILGVESQAVSLAACHLLQVMFDALKEGVKKGFRGKEGAIIVDPARELKVLISNLLDLLTEVGVSGQGRDNALTLLIKAVPRKSLKDPNNSLTLWVIDQGLKKILEVGGSLQDPPGELAVTANSRMSASILLSKLFDDLKCDAERENFHRLCENYIKSWFEGQGLAGKLRAIQTVSCLLQGPCDAGNRALELSGVMESVIALCASEQEEEQLVAVEALIHAAGKAKRASFITANGVSLLKDLYKCSEKDSIRIRALVGLCKLGSAGGTDFSMKQFAEGSTLKLAKQCRKWLCNDQIDAGTRRWAVEGLAYLTFDADVKEEFVEDAAALKALFQLSRLEERSVLFAVASALVNCTNSYDYEEPDPKMVELAKYAKQHVPEQHPKDKPSFVRARVKKLLAAGVVSAMVCMVKTESPVLTSSCRELLSRVFLALVEEVEDRGTVVAQGGGRALIPLALEGTDVGQTKAAQALAKLTITSNPEMTFPGERIYEVVRPLVSLLHLNCSGLQNFEALMALTNLAGISERLRQKILKEKAVPMIEGYMFEEHEMIRRAATECMCNLAMSKEVQDLFEAQGNDRLKLLVLYSGEDDELLQRAAAGGLAMLTSMRPTLCSRIPQVTTHWLEILQALLLSSNQELQHRGAVVVLNMVEASREIASTLMESEMMEILSVLAKGDHSPVTRAAAACLDKAVEYGLIQPNQDGE

SEQ ID NO: 19587 - protein, 451 aa, Artificial Sequence
  Synthetic polypeptide
AQEVEAVGLCKLGSAGGTDFSMKQFAEGSTLKLAKQCRKWLCNDQIDAGTRRWAVEGLAYLTFDADVKEEFVEDAAALKALFQLSRLEERSVLFAVASALVNCTNSYDYEEPDPKMVELAKYAKQHVPEQHPKDKPSFVRARVKKLLAAGVVSAMVCMVKTESPVLTSSCRELLSRVFLALVEEVEDRGTVVAQGGGRALIPLALEGTDVGQTKAAQALAKLTITSNPEMTFPGERIYEVVRPLVSLLHLNCSGLQNFEALMALTNLAGISERLRQKILKEKAVPMIEGYMFEEHEMIRRAATECMCNLAMSKEVQDLFEAQGNDRLKLLVLYSGEDDELLQRAAAGGLAMLTSMRPTLCSRIPQVTTHWLEILQALLLSSNQELQHRGAVVVLNMVEASREIASTLMESEMMEILSVLAKGDHSPVTRAAAACLDKAVEYGLIQPNQDGE

SEQ ID NO: 19588 - protein, 42 aa, Artificial Sequence
  Synthetic polypeptide
AWWCMPIGPATWEAEAGGSLELRRLRLWDSVSSVRLEGLTSA

SEQ ID NO: 19589 - protein, 5 aa, Artificial Sequence
  Synthetic polypeptide
GCGTL

SEQ ID NO: 19590 - protein, 507 aa, Artificial Sequence
  Synthetic polypeptide
PHRVLLPSPDSPPSSQRDFTHAFPDVSCDEWAFSLLPLDVDLLSMELPEFFRDYFLEGDQRWINTVAQALHLLSTLYGPFPNCYGIGRCAKMAYELWRNLEEEEDGETKGRRPEIGHIFLLDRDVDFVTALCSQVVYEGLVDDTFRIKCGSVDFGPEVTSSDKSLKVLLNAEDKVFNEIRNEHFSNVFGFLSQKARNLQAQYDRRRGMDIKQMKNFVSQELKGLKQEHRLLSLHIGACESIMKKKTKQDFQELIKTEHALLEGFNIRESTSYIEEHIDRQVSPIESLRLMCLLSITENGLIPKDYRSLKTQYLQSYGPEHLLTFSNLRRAGLLTEQAPGDTLTAVESKVSKLVTDKAAGKITDAFSSLAKRSNFRAISKKLNLIPRVDGEYDLKVPRDMAYVFGGAYVPLSCRIIEQVLERRSWQGLDEVVRLLNCSDFAFTDMTKEDKASSESLRLILVVFLGGCTFSEISALRFLGREKGYRFIFLTTAVTNSARLMEAMSEVKA

SEQ ID NO: 19591 - protein, 46 aa, Artificial Sequence
  Synthetic polypeptide
SPESPTCLLSLAQSGPSCPISLIVCCFLLLTRHPPARETLPMLFQM

SEQ ID NO: 19592 - protein, 18 aa, Artificial Sequence
  Synthetic polypeptide
LATLQPERLYPCFSRCEL

SEQ ID NO: 19593 - protein, 8 aa, Artificial Sequence
  Synthetic polypeptide
GLPSHVEL

SEQ ID NO: 19594 - protein, 59 aa, Artificial Sequence
  Synthetic polypeptide
IFMRSARFINGNFSCVLPGLPSLTCCHVRCACFTFRHDCQFPEASPAMWNCERPDHPGA

SEQ ID NO: 19595 - protein, 672 aa, Artificial Sequence
  Synthetic polypeptide
DVPASPSAMIVSFLRPPQPCGTVSVLTTLERRFNLQSADVGVIASSFEIGNLALILFVSYFGARGHRPRLIGCGGIVMALGALLSALPEFLTHQYKYEAGEIRWGAEGRDVCAANGSGGDEGPDPDLICRNRTATNMMYLLLIGAQVLLGIGATPVQPLGVSYIDDHVRRKDSSLYIGILFTMLVFGPACGFILGSFCTKIYVDAVFIDTSNLDITPDDPRWIGAWWGGFLLCGALLFFSSLLMFGFPQSLPPHSEPAMESEQAMLSEREYERPKPSNGVLRHPLEPDSSASCFQQLRVIPKVTKHLLSNPVFTCIILAACMEIAVVAGFAAFLGKYLEQQFNLTTSSANQLLGMTAIPCACLGIFLGGLLVKKLSLSALGAIRMAMLVNLVSTACYVSFLFLGCDTGPVAGVTVPYGNSTAPGSALDPYSPCNNNCECQTDSFTPVCGADGITYLSACFAGCNSTNLTGCACLTTVPAENATVVPGKCPSPGCQEAFLTFLCVMCICSLIGAMAQTPSVIILIRTVSPELKSYALGVLFLLLRLLGFIPPPLIFGAGIDSTCLFWSTFCGEQGACVLYDNVVYRYLYVSIAIALKSFAFILYTTTWQCLRKNYKRYIKNHEGGLSTSEFFASTLTLDNLGRDPVPANQTHRTKFIYNLEDHEWCENMESVL

SEQ ID NO: 19596 - protein, 654 aa, Artificial Sequence
  Synthetic polypeptide
DVPASPSAMIVSFLRPPQPCGTVSVLTTLERRFNLQSADVGVIASSFEIGNLALILFVSYFGARGHRPRLIGCGGIVMALGALLSALPEFLTHQYKYEAGEIRWGAEGRDVCAANGSGGDEGPDPDLICRNRTATNMMYLLLIGAQVLLGIGATPVQPLGVSYIDDHVRRKDSSLYIGILFTMLVFGPACGFILGSFCTKIYVDAVFIDTSNLDITPDDPRWIGAWWGGFLLCGALLFFSSLLMFGFPQSLPPHSEPAMESEQAMLSEREYERPKPSNGVLRHPLEPDSSASCFQQLRVIPKVTKHLLSNPVFTCIILAACMEIAVVAGFAAFLGKYLEQQFNLTTSSANQLLGMTAIPCACLGIFLGGLLVKKLSLSALGAIRMAMLVNLVSTACYVSFLFLGCDTGPVAGVTVPYGNSTAPGSALDPYSPCNNNCECQTDSFTPVCGADGITYLSACFAGCNSTNLTGCACLTTVPAENATVVPGKCPSPGCQEAFLTFLCVMCICSLIGAMAQTPSVIILIRTVSPELKSYALGVLFLLLRLLGFIPPPLIFGAGIDSTCLFWSTFCGEQGACVLYDNVVYRYLYVSIAIALKSFAFILYTTTWQCLRKNYKRYIKNHEGGLSTSTEYQDIETEKTCPESHSPSEDSFVRS

SEQ ID NO: 19597 - protein, 150 aa, Artificial Sequence
  Synthetic polypeptide
DVPASPSAMIVSFLRPPQPCGTVSVLTTLERRFNLQSADVGVIASSFEIGNLALILFVSYFGARGHRPRLIGCGGIVMALGALLSALPEFLTHQYKYEAGEIRWGAEGRDVCAANGSGGDEGPDPDLICRNRTATNMMYLLLIGAQVLLG

SEQ ID NO: 19598 - protein, 8 aa, Artificial Sequence
  Synthetic polypeptide
GLPSHVEL

SEQ ID NO: 19599 - protein, 45 aa, Artificial Sequence
  Synthetic polypeptide
RANLLCTLSCLLPCKTCLCFSATFHHDCEASPAMWNCERPDHPGA

SEQ ID NO: 19600 - protein, 690 aa, Artificial Sequence
  Synthetic polypeptide
WFYKGQIFCAHCLACCHVRHAFASLPPSTMIVRPPQPCGTVSVLTTLERRFNLQSADVGVIASSFEIGNLALILFVSYFGARGHRPRLIGCGGIVMALGALLSALPEFLTHQYKYEAGEIRWGAEGRDVCAANGSGGDEGPDPDLICRNRTATNMMYLLLIGAQVLLGIGATPVQPLGVSYIDDHVRRKDSSLYIGILFTMLVFGPACGFILGSFCTKIYVDAVFIDTSNLDITPDDPRWIGAWWGGFLLCGALLFFSSLLMFGFPQSLPPHSEPAMESEQAMLSEREYERPKPSNGVLRHPLEPDSSASCFQQLRVIPKVTKHLLSNPVFTCIILAACMEIAVVAGFAAFLGKYLEQQFNLTTSSANQLLGMTAIPCACLGIFLGGLLVKKLSLSALGAIRMAMLVNLVSTACYVSFLFLGCDTGPVAGVTVPYGNSTAPGSALDPYSPCNNNCECQTDSFTPVCGADGITYLSACFAGCNSTNLTGCACLTTVPAENATVVPGKCPSPGCQEAFLTFLCVMCICSLIGAMAQTPSVIILIRTVSPELKSYALGVLFLLLRLLGFIPPPLIFGAGIDSTCLFWSTFCGEQGACVLYDNVVYRYLYVSIAIALKSFAFILYTTTWQCLRKNYKRYIKNHEGGLSTSEFFASTLTLDNLGRDPVPANQTHRTKFIYNLEDHEWCENMESVL

SEQ ID NO: 19601 - protein, 672 aa, Artificial Sequence
  Synthetic polypeptide
WFYKGQIFCAHCLACCHVRHAFASLPPSTMIVRPPQPCGTVSVLTTLERRFNLQSADVGVIASSFEIGNLALILFVSYFGARGHRPRLIGCGGIVMALGALLSALPEFLTHQYKYEAGEIRWGAEGRDVCAANGSGGDEGPDPDLICRNRTATNMMYLLLIGAQVLLGIGATPVQPLGVSYIDDHVRRKDSSLYIGILFTMLVFGPACGFILGSFCTKIYVDAVFIDTSNLDITPDDPRWIGAWWGGFLLCGALLFFSSLLMFGFPQSLPPHSEPAMESEQAMLSEREYERPKPSNGVLRHPLEPDSSASCFQQLRVIPKVTKHLLSNPVFTCIILAACMEIAVVAGFAAFLGKYLEQQFNLTTSSANQLLGMTAIPCACLGIFLGGLLVKKLSLSALGAIRMAMLVNLVSTACYVSFLFLGCDTGPVAGVTVPYGNSTAPGSALDPYSPCNNNCECQTDSFTPVCGADGITYLSACFAGCNSTNLTGCACLTTVPAENATVVPGKCPSPGCQEAFLTFLCVMCICSLIGAMAQTPSVIILIRTVSPELKSYALGVLFLLLRLLGFIPPPLIFGAGIDSTCLFWSTFCGEQGACVLYDNVVYRYLYVSIAIALKSFAFILYTTTWQCLRKNYKRYIKNHEGGLSTSTEYQDIETEKTCPESHSPSEDSFVRS

SEQ ID NO: 19602 - protein, 168 aa, Artificial Sequence
  Synthetic polypeptide
WFYKGQIFCAHCLACCHVRHAFASLPPSTMIVRPPQPCGTVSVLTTLERRFNLQSADVGVIASSFEIGNLALILFVSYFGARGHRPRLIGCGGIVMALGALLSALPEFLTHQYKYEAGEIRWGAEGRDVCAANGSGGDEGPDPDLICRNRTATNMMYLLLIGAQVLLG

SEQ ID NO: 19603 - protein, 74 aa, Artificial Sequence
  Synthetic polypeptide
MPPLPFPSRESCSRCWYLDQPAGLSWALSVPKSTWMRSSLTQVTWTSLRTTPAGSEPGGVAFCSAVPYSSSLPS

SEQ ID NO: 19604 - protein, 56 aa, Artificial Sequence
  Synthetic polypeptide
DVMEQRWALDLGSPAFECRLSHFPVGNPVHDAGIWTSLRVYPGLFLYQNLRGCGLH

SEQ ID NO: 19605 - protein, 520 aa, Artificial Sequence
  Synthetic polypeptide
MSWSKDGHWIWAAPRLNAASPISQSGILFTMLVFGPACGFILGSFCTKIYVDAVFIDTSNLDITPDDPRWIGAWWGGFLLCGALLFFSSLLMFGFPQSLPPHSEPAMESEQAMLSEREYERPKPSNGVLRHPLEPDSSASCFQQLRVIPKVTKHLLSNPVFTCIILAACMEIAVVAGFAAFLGKYLEQQFNLTTSSANQLLGMTAIPCACLGIFLGGLLVKKLSLSALGAIRMAMLVNLVSTACYVSFLFLGCDTGPVAGVTVPYGNSTAPGSALDPYSPCNNNCECQTDSFTPVCGADGITYLSACFAGCNSTNLTGCACLTTVPAENATVVPGKCPSPGCQEAFLTFLCVMCICSLIGAMAQTPSVIILIRTVSPELKSYALGVLFLLLRLLGFIPPPLIFGAGIDSTCLFWSTFCGEQGACVLYDNVVYRYLYVSIAIALKSFAFILYTTTWQCLRKNYKRYIKNHEGGLSTSEFFASTLTLDNLGRDPVPANQTHRTKFIYNLEDHEWCENMESVL

SEQ ID NO: 19606 - protein, 502 aa, Artificial Sequence
  Synthetic polypeptide
MSWSKDGHWIWAAPRLNAASPISQSGILFTMLVFGPACGFILGSFCTKIYVDAVFIDTSNLDITPDDPRWIGAWWGGFLLCGALLFFSSLLMFGFPQSLPPHSEPAMESEQAMLSEREYERPKPSNGVLRHPLEPDSSASCFQQLRVIPKVTKHLLSNPVFTCIILAACMEIAVVAGFAAFLGKYLEQQFNLTTSSANQLLGMTAIPCACLGIFLGGLLVKKLSLSALGAIRMAMLVNLVSTACYVSFLFLGCDTGPVAGVTVPYGNSTAPGSALDPYSPCNNNCECQTDSFTPVCGADGITYLSACFAGCNSTNLTGCACLTTVPAENATVVPGKCPSPGCQEAFLTFLCVMCICSLIGAMAQTPSVIILIRTVSPELKSYALGVLFLLLRLLGFIPPPLIFGAGIDSTCLFWSTFCGEQGACVLYDNVVYRYLYVSIAIALKSFAFILYTTTWQCLRKNYKRYIKNHEGGLSTSTEYQDIETEKTCPESHSPSEDSFVRS

SEQ ID NO: 19607 - protein, 47 aa, Artificial Sequence
  Synthetic polypeptide
LSLEADPSPVEPSEETPAPADTLIAPLGEALKQRTQVGKEVKEDTQV

SEQ ID NO: 19608 - protein, 49 aa, Artificial Sequence
  Synthetic polypeptide
SREPRSGKRLKKTRKYDIITTPAERVEMAPLNEEDDEDEDSTVFDIKYR

SEQ ID NO: 19609 - protein, 20 aa, Artificial Sequence
  Synthetic polypeptide
HLDCTFGRGSEAENPGRERG

SEQ ID NO: 19610 - protein, 1018 aa, Artificial Sequence
  Synthetic polypeptide
VRSGGQSSGYVGPSTESAASQVTFQRLDGSIKGEIRKQALDHFNADGSEDFCFLLSTRAGGLGINLASADTVVIFDSDWNPQNDLQAQARAHRIGQKKQVNIYRLVTKGTVEEEIIERAKKKMVLDHLVIQRMDTTGRTILENNSGRSNSNPFNKEELTAILKFGAEDLFKELEGEESEPQEMDIDEILRLAETRENEVSTSATDELLSQFKVANFATMEDEEELEERPHKDWDEIIPEEQRKKVEEEERQKELEEIYMLPRIRSSTKKAQTNDSDSDTESKRQAQRSSASESETEDSDDDKKPKRRGRPRSVRKDLVEGFTDAEIRRFIKAYKKFGLPLERLECIARDAELVDKSVADLKRLGELIHNSCVSAMQEYEEQLKENASEGKGPGKRRGPTIKISGVQVNVKSIIQHEEEFEMLHKSIPVDPEEKKKYCLTCRVKAAHFDVEWGVEDDSRLLLGIYEHGYGNWELIKTDPELKLTDKILPVETDKKPQGKQLQTRADYLLKLLRKGLEKKGAVTGGEEAKLKKRKPRVKKENKVPRLKEEHGIELSSPRHSDNPSEEGEVKDDGLEKSPMKKKQKKKENKENKEKQMSSRKDKEGDKERKKSKDKKEKPKSGDAKSSSKSKRSQGPVHITAGSEPVPIGEDEDDDLDQETFSICKERMRPVKKALKQLDKPDKGLNVQEQLEHTRNCLLKIGDRIAECLKAYSDQEHIKLWRRNLWIFVSKFTEFDARKLHKLYKMAHKKRSQEEEEQKKKDDVTGGKKPFRPEASGSSRDSLISQSHTSHNLHPQKPHLPASHGPQMHGHPRDNYNHPNKRHFSNADRGDWQRERKFNYGGGNNNPPWGSDRHHQYEQHWYKDHHYGDRRHMDAHRSGSYRPNNMSRKRPYDQYSSDRDHRGHRDYYDRHHHDSKRRRSDEFRPQNYHQQDFRRMSDHRPAMGYHGQGPSDHYRSFHTDKLGEYKQPLPPLHPAVSDPRSPPSQKSPHDSKSPLDHRSPLERSLEQKNNPDYNWNVRKT

SEQ ID NO: 19611 - protein, 88 aa, Artificial Sequence
  Synthetic polypeptide
ALPQSLLPAKSPFSVWMVPSREKSENRHWTTSMQMGLRTSVSCSRQGLVAWESIWLQRTQSSSLTLTGTPRMTCRHKPERIELVKRSR

SEQ ID NO: 19612 - protein, 46 aa, Artificial Sequence
  Synthetic polypeptide
VWWAEFWVCRPFHRVCCQPSHLSASGWFHQGRNPKTGTGPLQCRWV

SEQ ID NO: 19613 - protein, 929 aa, Artificial Sequence
  Synthetic polypeptide
VRSGGQSSGYVGPSTESAASQVTFQRLDGSIKGEIRKQALDHFNADGSEDFCFLLSTRAGGLGINLASADTVVIFDSDWNPQNDLQAQARAHRIGQKKQVNIYRLVTKGTVEEEIIERAKKKMVLDHLVIQRMDTTGRTILENNSGRSNSNPFNKEELTAILKFGAEDLFKELEGEESEPQEMDIDEILRLAETRENEVSTSATDELLSQFKVANFATMEDEEELEERPHKDWDEIIPEEQRKKVEEEERQKELEEIYMLPRIRSSTKKAQTNDSDSDTESKRQAQRSSASESETEDSDDDKKPKRRGRPRSVRKDLVEGFTDAEIRRFIKAYKKFGLPLERLECIARDAELVDKSVADLKRLGELIHNSCVSAMQEYEEQLKENASEGKGPGKRRGPTIKISGVQVNVKSIIQHEEEFEMLHKSIPVDPEEKKKYCLTCRVKAAHFDVEWGVEDDSRLLLGIYEHGYGNWELIKTDPELKLTDKILPVETDKKPQGKQLQTRADYLLKLLRKGLEKKGAVTGGEEAKLKKRKPRVKKENKVPRLKEEHGIELSSPRHSDNPSEEGEVKDDGLEKSPMKKKQKKKENKENKEKQMSSRKDKEGDKERKKSKDKKEKPKSGDAKSSSKSKRSQGPVHITAGSEPVPIGEDEDDDLDQETFSICKERMRPVKKALKQLDKPDKGLNVQEQLEHTRNCLLKIGDRIAECLKAYSDQEHIKLWRRNLWIFVSKFTEFDARKLHKLYKMAHKKRSQEEEEQKKKDDVTGGKKPFRPEASGSSRDSLISQSHTSHNLHPQKPHLPASHGPQMHGHPRDNYNHPNKRHFSNADRGDWQRERKFNYGGGNNNPPWGSDRHHQYEQHWYKDHHYGDRRHMDAHRSGSYRPNNMSRKRPYDQYSSDRDHRGHRDYYDRYAKGCETPGANLCQELFLGRK

SEQ ID NO: 19614 - protein, 123 aa, Artificial Sequence
  Synthetic polypeptide
VRSGGQSSGYVGPSTESAASQVTFQRLDGSIKGEIRKQALDHFNADGSEDFCFLLSTRAGGLGINLASADTVVIFDSDWNPQNDLQAQARAHRIGQKKQVNIYRLVTKGTVEEEIIERAKKKM

SEQ ID NO: 19615 - protein, 31 aa, Artificial Sequence
  Synthetic polypeptide
KSKENRNQFEGLQGGLLAQLSINTYEAMWKQ

SEQ ID NO: 19616 - protein, 270 aa, Artificial Sequence
  Synthetic polypeptide
NLNRRAKKIGTNLKDYKVDCLLSSVSTLMKLCGSSDLNASMTSQHFEEQSVPGEASDGLSNLPSPFAYLLTIHLKEGRNLVVRDRCGTSDPYVKFKLNGKTLYKSKVIYKNLNPVWDEIVVLPIQSLDQKLRVKVYDRDLTTSDFMGSAFVILSDLELNRTTEHILKLEDPNSLEDDMGVIVLNLNLVVKQGDFKRHRWSNRKRLSASKSSLIRNLRLSESLKKNQLWNGIISITLLEGKNVSGGSMTEMFVQLKLGDQRYKSKDGHFGH

SEQ ID NO: 19617 - protein, 73 aa, Artificial Sequence
  Synthetic polypeptide
NLNRRAKKIGTNLKDYKVDCLLSSVSTLMKLCGSSDLNASMTSQHFEEQSDSQKFEMTQKFNWAHVIHIQKQT

SEQ ID NO: 19618 - protein, 697 aa, Artificial Sequence
  Synthetic polypeptide
NLNRRAKKIGTNLKDYKVDCLLSSVSTLMKLCGSSDLNASMTSQHFEEQSVPGEASDGLSNLPSPFAYLLTIHLKEGRNLVVRDRCGTSDPYVKFKLNGKTLYKSKVIYKNLNPVWDEIVVLPIQSLDQKLRVKVYDRDLTTSDFMGSAFVILSDLELNRTTEHILKLEDPNSLEDDMGVIVLNLNLVVKQGDFKRHRWSNRKRLSASKSSLIRNLRLSESLKKNQLWNGIISITLLEGKNVSGGSMTEMFVQLKLGDQRYKSKTLCKSANPQWQEQFDFHYFSDRMGILDIEVWGKDNKKHEERLGTCKVDISALPLKQANCLELPLDSCLGALLMLVTLTPCAGVSVSDLCVCPLADLSERKQITQRYCLQNSLKDVKDVGILQVKVLKAADLLAADFSGKSDPFCLLELGNDRLQTHTVYKNLNPEWNKVFTFPIKDIHDVLEVTVFDEDGDKPPDFLGKVAIPLLSIRDGQPNCYVLKNKDLEQAFKGVIYLEMDLIYNPVKASIRTFTPREKRFVEDSRKLSKKILSRDVDRVKRITMAIWNTMQFLKSCFQWESTLRSTIAFAESEKKGLIERIYMVQDIVSTVQNVLEEIASFGERIKNTFNWTVPFLSSLACLILAAATIILYFIPLRYIILIWGINKFTKKLRNPYSIDNNELLDFLSRVPSDVQKVQYAELKLCSSHSPLRKKRSAL

SEQ ID NO: 19619 - protein, 752 aa, Artificial Sequence
  Synthetic polypeptide
NLNRRAKKIGTNLKDYKVDCLLSSVSTLMKLCGSSDLNASMTSQHFEEQSVPGEASDGLSNLPSPFAYLLTIHLKEGRNLVVRDRCGTSDPYVKFKLNGKTLYKSKVIYKNLNPVWDEIVVLPIQSLDQKLRVKVYDRDLTTSDFMGSAFVILSDLELNRTTEHILKLEDPNSLEDDMGVIVLNLNLVVKQGDFKRHRWSNRKRLSASKSSLIRNLRLSESLKKNQLWNGIISITLLEGKNVSGGSMTEMFVQLKLGDQRYKSKTLCKSANPQWQEQFDFHYFSDRMGILDIEVWGKDNKKHEERLGTCKVDISALPLKQANCLELPLDSCLGALLMLVTLTPCAGVSVSDLCVCPLADLSERKQITQRYCLQNSLKDVKDVGILQVKVLKAADLLAADFSGKSDPFCLLELGNDRLQTHTVYKNLNPEWNKVFTFPIKDIHDVLEVTVFDEDGDKPPDFLGKVAIPLLSIRDGQPNCYVLKNKDLEQAFKGVIYLEMDLIYNPVKASIRTFTPREKRFVEDSRKLSKKILSRDVDRVKRITMAIWNTMQFLKSCFQWESTLRSTIAFAVFLITVWNFELYMIPLALLLIFVYNFIRPVKGKVSSIQDSQESTDIDDEEDEDDKESEKKGLIERIYMVQDIVSTVQNVLEEIASFGERIKNTFNWTVPFLSSLACLILAAATIILYFIPLRYIILIWGINKFTKKLRNPYSIDNNELLDFLSRVPSDVQKVQYAELKLCSSHSPLRKKRSAL

SEQ ID NO: 19620 - protein, 45 aa, Artificial Sequence
  Synthetic polypeptide
SSSLLHSHQRHECLHVIATSGSYPIWSKMESVPKHVWEAGVHREQ

SEQ ID NO: 19621 - protein, 1167 aa, Artificial Sequence
  Synthetic polypeptide
QHQEVTLYGLKWRVCPSTCGKRACTENNECCHPECLGSCSAPDNDTACVACRHYYYAGVCVPACPPNTYRFEGWRCVDRDFCANILSAESSDSEGFVIHDGECMQECPSGFIRNGSQSMYCIPCEGPCPKVCEEEKKTKTIDSVTSAQMLQGCTIFKGNLLINIRRGNNIASELENFMGLIEVVTGYVKIRHSHALVSLSFLKNLRLILGEEQLEGNYSFYVLDNQNLQQLWDWDHRNLTIKAGKMYFAFNPKLCVSEIYRMEEVTGTKGRQSKGDINTRNNGERASCESDVLHFTSTTTSKNRIIITWHRYRPPDYRDLISFTVYYKEAPFKNVTEYDGQDACGSNSWNMVDVDLPPNKDVEPGILLHGLKPWTQYAVYVKAVTLTMVENDHIRGAKSEILYIRTNASVPSIPLDVLSASNSSSQLIVKWNPPSLPNGNLSYYIVRWQRQPQDGYLYRHNYCSKDKIPIRKYADGTIDIEEVTENPKTEVCGGEKGPCCACPKTEAEKQAEKEEAEYRKVFENFLHNSIFVPRPERKRRDVMQVANTTMSSRSRNTTAADTYNITDPEELETEYPFFESRVDNKERTVISNLRPFTLYRIDIHSCNHEAEKLGCSASNFVFARTMPAEGADDIPGPVTWEPRPENSIFLKWPEPENPNGLILMYEIKYGSQVEDQRECVSRQEYRKYGGAKLNRLNPGNYTARIQATSLSGNGSWTDPVFFYVQAKTGYENFIHLIIALPVAVLLIVGGLVIMLYVFHRKRNNSRLGNGVLYASVNPEYFSAADVYVPDEWEVAREKITMSRELGQGSFGMVYEGVAKGVVKDEPETRVAIKTVNEAASMRERIEFLNEASVMKEFNCHHVVRLLGVVSQGQPTLVIMELMTRGDLKSYLRSLRPEMENNPVLAPPSLSKMIQMAGEIADGMAYLNANKFVHRDLAARNCMVAEDFTVKIGDFGMTRDIYETDYYRKGGKGLLPVRWMSPESLKDGVFTTYSDVWSFGVVLWEIATLAEQPYQGLSNEQVLRFVMEGGLLDKPDNCPDMLFELMRMCWQYNPKMRPSFLEIISSIKEEMEPGFREVSFYYSEENKLPEPEELDLEPENMESVPLDPSASSSSLPLPDRHSGHKAENGPGPGVLVLRASFDERQPYAHMNGGRKNERALPLPQSSTC

SEQ ID NO: 19622 - protein, 38 aa, Artificial Sequence
  Synthetic polypeptide
NGECAQARVGSGRAPRTMSAATPSAWAAAARLTTTRPV

SEQ ID NO: 19623 - protein, 1166 aa, Artificial Sequence
  Synthetic polypeptide
QHQEVTLYGLKWRVCPSTCGKRACTENNECCHPECLGSCSAPDNDTACVACRHYYYAGVCVPACPPNTYRFEGWRCVDRDFCANILSAESSDSEGFVIHDGECMQECPSGFIRNGSQSMYCIPCEGPCPKVCEEEKKTKTIDSVTSAQMLQGCTIFKGNLLINIRRGNNIASELENFMGLIEVVTGYVKIRHSHALVSLSFLKNLRLILGEEQLEGNYSFYVLDNQNLQQLWDWDHRNLTIKAGKMYFAFNPKLCVSEIYRMEEVTGTKGRQSKGDINTRNNGERASCESDVLHFTSTTTSKNRIIITWHRYRPPDYRDLISFTVYYKEAPFKNVTEYDGQDACGSNSWNMVDVDLPPNKDVEPGILLHGLKPWTQYAVYVKAVTLTMVENDHIRGAKSEILYIRTNASVPSIPLDVLSASNSSSQLIVKWNPPSLPNGNLSYYIVRWQRQPQDGYLYRHNYCSKDKIPIRKYADGTIDIEEVTENPKTEVCGGEKGPCCACPKTEAEKQAEKEEAEYRKVFENFLHNSIFVPRPERKRRDVMQVANTTMSSRSRNTTAADTYNITDPEELETEYPFFESRVDNKERTVISNLRPFTLYRIDIHSCNHEAEKLGCSASNFVFARTMPAEGADDIPGPVTWEPRPENSIFLKWPEPENPNGLILMYEIKYGSQVEDQRECVSRQEYRKYGGAKLNRLNPGNYTARIQATSLSGNGSWTDPVFFYVQAKRYENFIHLIIALPVAVLLIVGGLVIMLYVFHRKRNNSRLGNGVLYASVNPEYFSAADVYVPDEWEVAREKITMSRELGQGSFGMVYEGVAKGVVKDEPETRVAIKTVNEAASMRERIEFLNEASVMKEFNCHHVVRLLGVVSQGQPTLVIMELMTRGDLKSYLRSLRPEMENNPVLAPPSLSKMIQMAGEIADGMAYLNANKFVHRDLAARNCMVAEDFTVKIGDFGMTRDIYETDYYRKGGKGLLPVRWMSPESLKDGVFTTYSDVWSFGVVLWEIATLAEQPYQGLSNEQVLRFVMEGGLLDKPDNCPDMLFELMRMCWQYNPKMRPSFLEIISSIKEEMEPGFREVSFYYSEENKLPEPEELDLEPENMESVPLDPSASSSSLPLPDRHSGHKAENGPGPGVLVLRASFDERQPYAHMNGGRKNERALPLPQSSTC

SEQ ID NO: 19624 - protein, 111 aa, Artificial Sequence
  Synthetic polypeptide
QHQEVTLYGLKWRVCPSTCGKRACTENNECCHPECLGSCSAPDNDTACVACRHYYYAGVCVPACPPNTYRFEGWRCVDRDFCANILSAESSDSEGFVIHDGECMQECPSGF

SEQ ID NO: 19625 - protein, 63 aa, Artificial Sequence
  Synthetic polypeptide
KVMMMDCHCKQNNMQKKPDKSSPTPLCLPIVRIQMFSSFPLSFSIPWAELYSPFKNLRKLQRI

SEQ ID NO: 19626 - protein, 316 aa, Artificial Sequence
  Synthetic polypeptide
LCSLRQDGQEHLCAQLLQLKSDDDGLSLQAKQHAEKARQILANSIVPPYSENTDVFKFSIELFHTMGRALLSLQKFKEAAENLTKAERLSKELLQCGRIIKEEWIEIEARIRLSFAQVYQGQKKSKEALSHYQAALEYVEISKGETSRECVPILRELAGVEQALGLHDVSINHFLQAHLIILSRSPSQVEAADSAHIVAHAAVASGRHEHHDVAEQYFQESMAHLKDSEGMGRTKFLSIQDEFCHFLQMTGQKERATSILRESLEAKVEAFGDFSPEVAETYRLLGGADLAQGNHSGARKKLKKGDLSFLLSATLP

SEQ ID NO: 19627 - protein, 370 aa, Artificial Sequence
  Synthetic polypeptide
LCSLRQDGQEHLCAQLLQLKSDDDGLSLQAKQHAEKARQILANSIVPPYSENTDVFKFSIELFHTMGRALLSLQKFKEAAENLTKAERLSKELLQCGRIIKEEWIEIEARIRLSFAQVYQGQKKSKEALSHYQAALEYVEISKGETSRECVPILRELAGVEQALGLHDVSINHFLQAHLIILSRSPSQVEAADSAHIVAHAAVASGRHEHHDVAEQYFQESMAHLKDSEGMGRTKFLSIQDEFCHFLQMTGQKERATSILRESLEAKVEAFGDFSPEVAETYRLLGGADLAQGNHSGARKKLKKCLQIQTLLYGPQDKRTLATQQAMGMLSTAPKVASKPRQASKAKVAFCTSIPQDTLLGKARPGTTAD

SEQ ID NO: 19628 - protein, 314 aa, Artificial Sequence
  Synthetic polypeptide
LCSLRQDGQEHLCAQLLQLKSDDDGLSLQAKQHAEKARQILANSIVPPYSENTDVFKFSIELFHTMGRALLSLQKFKEAAENLTKAERLSKELLQCGRIIKEEWIEIEARIRLSFAQVYQGQKKSKEALSHYQAALEYVEISKGETSRECVPILRELAGVEQALGLHDVSINHFLQAHLIILSRSPSQVEAADSAHIVAHAAVASGRHEHHDVAEQYFQESMAHLKDSEGMGRTKFLSIQDEFCHFLQMTGQKERATSILRESLEAKVEAFGDFSPEVAETYRLLGGADLAQGNHSGARKKLKKVKLEPVLTRD

SEQ ID NO: 19629 - protein, 60 aa, Artificial Sequence
  Synthetic polypeptide
KVMMMDCHCKQNNMQKKPDKSSPTPLCLPIVRIQMFSSFPLSFSIPWAELYSPFKNLRKL

SEQ ID NO: 19630 - protein, 80 aa, Artificial Sequence
  Synthetic polypeptide
LCSLRQDGQEHLCAQLLQLKSDDDGLSLQAKQHAEKARQILANSIVPPYSENTDVFKFSIELFHTMGRALLSLQKFKEAA

SEQ ID NO: 19631 - protein, 55 aa, Artificial Sequence
  Synthetic polypeptide
KVMMMDCHCKQNNMQKKPDKSSPTPLCLPIVRIQMFSSFPLSFSIPWAELYSPFK

SEQ ID NO: 19632 - protein, 74 aa, Artificial Sequence
  Synthetic polypeptide
LCSLRQDGQEHLCAQLLQLKSDDDGLSLQAKQHAEKARQILANSIVPPYSENTDVFKFSIELFHTMGRALLSLQ

SEQ ID NO: 19633 - protein, 18 aa, Artificial Sequence
  Synthetic polypeptide
KVMMMDCHCKQNNMQKKP

SEQ ID NO: 19634 - protein, 38 aa, Artificial Sequence
  Synthetic polypeptide
LCSLRQDGQEHLCAQLLQLKSDDDGLSLQAKQHAEKAR

SEQ ID NO: 19635 - protein, 16 aa, Artificial Sequence
  Synthetic polypeptide
TEGTSTNRPSMSLCVA

SEQ ID NO: 19636 - protein, 14 aa, Artificial Sequence
  Synthetic polypeptide
FIFKLRGPVQTGRP

SEQ ID NO: 19637 - protein, 336 aa, Artificial Sequence
  Synthetic polypeptide
GDQYKQAVHELVRCVALTRICYGDSHWKLAEAHVNLAQGYLQLKGLSLQAKQHAEKARQILANSIVPPYSENTDVFKFSIELFHTMGRALLSLQKFKEAAENLTKAERLSKELLQCGRIIKEEWIEIEARIRLSFAQVYQGQKKSKEALSHYQAALEYVEISKGETSRECVPILRELAGVEQALGLHDVSINHFLQAHLIILSRSPSQVEAADSAHIVAHAAVASGRHEHHDVAEQYFQESMAHLKDSEGMGRTKFLSIQDEFCHFLQMTGQKERATSILRESLEAKVEAFGDFSPEVAETYRLLGGADLAQGNHSGARKKLKKGDLSFLLSATLP

SEQ ID NO: 19638 - protein, 390 aa, Artificial Sequence
  Synthetic polypeptide
GDQYKQAVHELVRCVALTRICYGDSHWKLAEAHVNLAQGYLQLKGLSLQAKQHAEKARQILANSIVPPYSENTDVFKFSIELFHTMGRALLSLQKFKEAAENLTKAERLSKELLQCGRIIKEEWIEIEARIRLSFAQVYQGQKKSKEALSHYQAALEYVEISKGETSRECVPILRELAGVEQALGLHDVSINHFLQAHLIILSRSPSQVEAADSAHIVAHAAVASGRHEHHDVAEQYFQESMAHLKDSEGMGRTKFLSIQDEFCHFLQMTGQKERATSILRESLEAKVEAFGDFSPEVAETYRLLGGADLAQGNHSGARKKLKKCLQIQTLLYGPQDKRTLATQQAMGMLSTAPKVASKPRQASKAKVAFCTSIPQDTLLGKARPGTTAD

SEQ ID NO: 19639 - protein, 334 aa, Artificial Sequence
  Synthetic polypeptide
GDQYKQAVHELVRCVALTRICYGDSHWKLAEAHVNLAQGYLQLKGLSLQAKQHAEKARQILANSIVPPYSENTDVFKFSIELFHTMGRALLSLQKFKEAAENLTKAERLSKELLQCGRIIKEEWIEIEARIRLSFAQVYQGQKKSKEALSHYQAALEYVEISKGETSRECVPILRELAGVEQALGLHDVSINHFLQAHLIILSRSPSQVEAADSAHIVAHAAVASGRHEHHDVAEQYFQESMAHLKDSEGMGRTKFLSIQDEFCHFLQMTGQKERATSILRESLEAKVEAFGDFSPEVAETYRLLGGADLAQGNHSGARKKLKKVKLEPVLTRD

SEQ ID NO: 19640 - protein, 100 aa, Artificial Sequence
  Synthetic polypeptide
GDQYKQAVHELVRCVALTRICYGDSHWKLAEAHVNLAQGYLQLKGLSLQAKQHAEKARQILANSIVPPYSENTDVFKFSIELFHTMGRALLSLQKFKEAA

SEQ ID NO: 19641 - protein, 94 aa, Artificial Sequence
  Synthetic polypeptide
GDQYKQAVHELVRCVALTRICYGDSHWKLAEAHVNLAQGYLQLKGLSLQAKQHAEKARQILANSIVPPYSENTDVFKFSIELFHTMGRALLSLQ

SEQ ID NO: 19642 - protein, 58 aa, Artificial Sequence
  Synthetic polypeptide
GDQYKQAVHELVRCVALTRICYGDSHWKLAEAHVNLAQGYLQLKGLSLQAKQHAEKAR

SEQ ID NO: 19643 - protein, 26 aa, Artificial Sequence
  Synthetic polypeptide
GDQYKQAVHELVRCVALTRICYGDSH

SEQ ID NO: 19644 - protein, 142 aa, Artificial Sequence
  Synthetic polypeptide
HISIYSSCGAPIQVSEVKLLSFSSGQRTVFLPAEVKAIGTEHDHVLPLQELAMRGLYHTYHSLLKDLNFLSPISLPRSLLELLHCPLGHCHRCSEPMFTIVYPKLFPLRETPMAGLHQWKTTVSFVAYCCSTQCLQTFDLLS

SEQ ID NO: 19645 - protein, 62 aa, Artificial Sequence
  Synthetic polypeptide
YSWPPSPVHPYPASLFPALLKPRRSHILSGFCTAAHAVPSAWNAHNTFPFIPAVVLPFKFPR

SEQ ID NO: 19646 - protein, 58 aa, Artificial Sequence
  Synthetic polypeptide
NQDVAIFFQASVLLHMLFPLLGMLITHFHLFQLWCSHSSFRGEAAFLFIRAANRFPPS

SEQ ID NO: 19647 - protein, 87 aa, Artificial Sequence
  Synthetic polypeptide
HISIYSSCGAPIQVSEVKLLSFSSGQRTVFLPAEVKAIGTEHDHVLPLQELAMRGLYHTYHSLLKGRQLLVLWLTAAPPSVCRLLTC

SEQ ID NO: 19648 - protein, 64 aa, Artificial Sequence
  Synthetic polypeptide
HISIYSSCGAPIQVSEVKLLSFSSGQRTVFLPAEVKAIGTEHDHVLPLQELAMRGLYHTYHSLL

SEQ ID NO: 19649 - protein, 120 aa, Artificial Sequence
  Synthetic polypeptide
HISIYSSCGAPIQVSEVKLLSFSSGQRTVFLPAEVKAIGTEHDHVLPLQELAMRGLYHTYHSLLKDLNFLSPISLPRSLLELLHCPLGHCHRCSEPMFTIVYPKLFPLRETPMAGLHQWK

SEQ ID NO: 19650 - protein, 71 aa, Artificial Sequence
  Synthetic polypeptide
VSSHKIRSFYKRLRFPCSHSFCLLLLCEEVPFAMIVGFLRHPQPRRTSRVPNANILVLTSCSFRPALQMSR

SEQ ID NO: 19651 - protein, 29 aa, Artificial Sequence
  Synthetic polypeptide
GIPSHAELVVSQMRTSSCLLHAASDPLCR

SEQ ID NO: 19652 - protein, 75 aa, Artificial Sequence
  Synthetic polypeptide
RPPTAAPSPPAPASASVRSFSRPFLVCSRSVGSTFQYTQKAPPFPTALGSCSHARALLCVHSGGHGDFLKAEARR

SEQ ID NO: 19653 - protein, 87 aa, Artificial Sequence
  Synthetic polypeptide
VLRLLLHRRQPRRLPLSALSRAPFWSAADLWALLSNTLRKPHRFPPPWVPAPTLAPFSAFTAAATVISLKLRHAGNKSEVPKTERSG

SEQ ID NO: 19654 - protein, 74 aa, Artificial Sequence
  Synthetic polypeptide
GTQVTNRKYPKLKEVDDVLGGAAAWENVDSTAESCPKCEHPRAYFMQLQTRSADEPMTTFYKCCNAQCGHRWRD

SEQ ID NO: 19655 - protein, 41 aa, Artificial Sequence
  Synthetic polypeptide
YGRWKKWSLQDVHDLIPRTCEYVTLHGEKSLCCKFRGYDFG

SEQ ID NO: 19656 - protein, 161 aa, Artificial Sequence
  Synthetic polypeptide
FPELVNMLPYMVKRVFVANSEAMILDKNLESVNSPIEKSSVNYEPSNPSEKGSKKINLSSDQNKSVSESNNDDVMLISVESPNLTTPITSNPTDTRKITSGNSSNSPNAEVMKVQYPPWSHIRKLLQTQRKQPHWHKMQSRFLSPLSTCHLSQNHQHHYLN

SEQ ID NO: 19657 - protein, 10 aa, Artificial Sequence
  Synthetic polypeptide
KESLLQIQRL

SEQ ID NO: 19658 - protein, 300 aa, Artificial Sequence
  Synthetic polypeptide
FPELVNMLPYMVKRVFVANSEAMILDKNLESVNSPIEKSSVNYEPSNPSEKGSKKINLSSDQNKSVSESNNDDVMLISVESPNLTTPITSNPTDTRKITSGNSSNSPNAEVMAVQKKLDSIIDLTKEGLSNCNTESPVSPLESHSKAASNSKETTPLAQNAVQVPESFEHLPPLPEPPAPLPELVDKTRDTLPPQKPELKVKRVFRPNGIALTWNITKINPKCAPVESYHLFLCHENSNNKLIWKKIGEIKALPLPMACTLSQFLASNRYYFTVQSKDIFGRYGPFCDIKSIPGFSENLT

SEQ ID NO: 19659 - protein, 111 aa, Artificial Sequence
  Synthetic polypeptide
QFSCVFTCLPVLPLPSPGGPSLACLACCCLSVPGTVPSAQLVNEVFTIDDTLQTLKLRLRETQDTLQLLVMTKCRLEHELAIKANTLCIDKEKCMGMRKTFPCTPRLVGHT

SEQ ID NO: 19660 - protein, 54 aa, Artificial Sequence
  Synthetic polypeptide
SCLISSFVYITLDSSLVYLLVYLFCLCLPLEGRALPVLLAAVSQCQAQFPVHSW

SEQ ID NO: 19661 - protein, 110 aa, Artificial Sequence
  Synthetic polypeptide
PVLFLPLCTLPLTVLLCIYLSTCSASAFPWRAEPCLSCLLLSLSARHSSQCTAGERGVHHRRHPADPQAAAAGDTGHAAAAGHDQVPAGARARHQGQHPLHRQGEVHGHA

SEQ ID NO: 19662 - protein, 127 aa, Artificial Sequence
  Synthetic polypeptide
SCGTTLQEIFQAENTIMLLERSIMAKEGPLKVAQTRLECRTRRPNMELCRDIPQLKLVNEVFTIDDTLQTLKLRLRETQDTLQLLVMTKCRLEHELAIKANTLCIDKEKCMGMRKTFPCTPRLVGHT

SEQ ID NO: 19663 - protein, 33 aa, Artificial Sequence
  Synthetic polypeptide
GLPSHVELRCRRSSRPRTPSCCWKGPSWPRRAR

SEQ ID NO: 19664 - protein, 131 aa, Artificial Sequence
  Synthetic polypeptide
TCVCSSSAFHHDCKAFLVMWNYAAGDLPGREHHHAAGKVHHGQGGPAEGGPDKAGVPDPAPQHGAVQGHPAVEAGERGVHHRRHPADPQAAAAGDTGHAAAAGHDQVPAGARARHQGQHPLHRQGEVHGHA

SEQ ID NO: 19665 - protein, 55 aa, Artificial Sequence
  Synthetic polypeptide
SCGTTLQEIFQAENTIMLLERSIMAKEGPLKVAQTRLECRTRRPNMELCRDIPQL

SEQ ID NO: 19666 - protein, 73 aa, Artificial Sequence
  Synthetic polypeptide
TCVCSSSAFHHDCKAFLVMWNYAAGDLPGREHHHAAGKVHHGQGGPAEGGPDKAGVPDPAPQHGAVQGHPAVE

SEQ ID NO: 19667 - protein, 19 aa, Artificial Sequence
  Synthetic polypeptide
LFPQHLVQCLPSQRSFRQT

SEQ ID NO: 19668 - protein, 19 aa, Artificial Sequence
  Synthetic polypeptide
CSACLPRGASGRPEALEAS

SEQ ID NO: 19669 - protein, 1035 aa, Artificial Sequence
  Synthetic polypeptide
LSYSHLVCLFPCSLALITIWTYFTPCSPTVRTGTLSFLLVTVSPASSAVPAFPEELPADLKHWKPAEPPTVVTGSLLVRPVSDCSTLPCLPLPALFNQEPASGQMRLEKTDQIPMPFSSSSLSCLNLPEGPIQFVPTISTLPHGLWQISEAGTGVSSIFIYHGEVPQASQVPPPSGFTVHGLPTSPDRPGSTSPFAPSATDLPSMPEPALTSRANMTEHKTSPTQCPAAGEVSNKLPKWPEPVEQFYRSLQDTYGAEPAGPDGILVEVDLVQARLERSSSKSLERELATPDWAERQLAQGGLAEVLLAAKEHRRPRETRVIAVLGKAGQGKSYWAGAVSRAWACGRLPQYDFVFSVPCHCLNRPGDAYGLQDLLFSLGPQPLVAADEVFSHILKRPDRVLLILDGFEELEAQDGFLHSTCGPAPAEPCSLRGLLAGLFQKKLLRGCTLLLTARPRGRLVQSLSKADALFELSGFSMEQAQAYVMRYFESSGMTEHQDRALTLLRDRPLLLSHSHSPTLCRAVCQLSEALLELGEDAKLPSTLTGLYVGLLGRAALDSPPGALAELAKLAWELGRRHQSTLQEDQFPSADVRTWAMAKGLVQHPPRAAESELAFPSFLLQCFLGALWLALSGEIKDKELPQYLALTPRKKRPYDNWLEGVPRFLAGLIFQPPARCLGALLGPSAAASVDRKQKVLARYLKRLQPGTLRARQLLELLHCAHEAEEAGIWQHVVQELPGRLSFLGTRLTPPDAHVLGKALEAAGQDFSLDLRSTGICPSGLGSLVGLSCVTRFRAALSDTVALWESLQQHGETKLLQAAEEKFTIEPFKAKSLKDVEDLGKLVQTQRTRSSSEDTAGELPAVRDLKKLEFALGPVSGPQAFPKLVRILTAFSSLQHLDLDALSENKIGDEGVSQLSATFPQLKSLETLNLSQNNITDLGAYKLAEALPSLAASLLRLSLYNNCICDVGAESLARVLPDMVSLRVMDVQYNKFTAAGAQQLAASLRRCPHVETLAMWTPTIPFSVQEHLQQQDSRISLR

SEQ ID NO: 19670 - protein, 32 aa, Artificial Sequence
  Synthetic polypeptide
CSACLPRGASGRPEALEASAFLQFLVELPESP

SEQ ID NO: 19671 - protein, 451 aa, Artificial Sequence
  Synthetic polypeptide
LSYSHLVCLFPCSLALITIWTYFTPCSPTVRTGTLSFLLVTVSPASSAVPAFPEELPADLKHWKPVPFSSSSLSCLNLPEGPIQFVPTISTLPHGLWQISEAGTGVSSIFIYHGEVPQASQVPPPSGFTVHGLPTSPDRPGSTSPFAPSATDLPSMPEPALTSRANMTEHKTSPTQCPAAGEVSNKLPKWPGLAWSPCLGLRPSLHRAALSDTVALWESLQQHGETKLLQAAEEKFTIEPFKAKSLKDVEDLGKLVQTQRTRSSSEDTAGELPAVRDLKKLEFALGPVSGPQAFPKLVRILTAFSSLQHLDLDALSENKIGDEGVSQLSATFPQLKSLETLNLSQNNITDLGAYKLAEALPSLAASLLRLSLYNNCICDVGAESLARVLPDMVSLRVMDVQYNKFTAAGAQQLAASLRRCPHVETLAMWTPTIPFSVQEHLQQQDSRISLR

SEQ ID NO: 19672 - protein, 31 aa, Artificial Sequence
  Synthetic polypeptide
CSACLPRGASGRPEALEASSPCGGPRVLLSI

SEQ ID NO: 19673 - protein, 77 aa, Artificial Sequence
  Synthetic polypeptide
LSYSHLVCLFPCSLALITIWTYFTPCSPTVRTGTLSFLLVTVSPASSAVPAFPEELPADLKHWKPALRVEALGSCSA

SEQ ID NO: 19674 - protein, 106 aa, Artificial Sequence
  Synthetic polypeptide
LSYSHLVCLFPCSLALITIWTYFTPCSPTVRTGTLSFLLVTVSPASSAVPAFPEELPADLKHWKPAEPPTVVTGSLLVRPVSDCSTLPCLPLPALFNQEPASGQMR

SEQ ID NO: 19675 - protein, 38 aa, Artificial Sequence
  Synthetic polypeptide
PELKSCSSLHQSATLGCGRPPSHSVSRNTCNNRIHGSA

SEQ ID NO: 19676 - protein, 40 aa, Artificial Sequence
  Synthetic polypeptide
RSSNHALPFTNLQPWDVDAHHPIQCPGTPATTGFTDQPEM

SEQ ID NO: 19677 - protein, 39 aa, Artificial Sequence
  Synthetic polypeptide
GAQIMLFPSPICNPGMWTPTIPFSVQEHLQQQDSRISLR

SEQ ID NO: 19678 - protein, 725 aa, Artificial Sequence
  Synthetic polypeptide
GWAWWFMPVIPPLWEAGVGRSLEASLDNMAKPSIRCFIKPTETLERSLEMNKHKGKRRVQKRPNYKNVGEEEDEEKGPTEDAQEDAEKAKGTEGGSKGIKTSGESEEIEMVIMERSKLSELAASTSVQEQNTTDEEKSAAATCSESTQWSRPFLDMVYHALDSPDDDYHALFVLCLLYAMSHNKGMDPEKLERIQLPVPNAAEKTTYNHPLAERLIRIMNNAAQPDGKIRLATLELSCLLLKQQVLMSAGCIMKDVHLACLEGAREESVHLVRHFYKGEDIFLDMFEDEYRSMTMKPMNVEYLMMDASILLPPTGTPLTGIDFVKRLPCGDVEKTRRAIRVFFMLRSLSLQLRGEPETQLPLTREEDLIKTDDVLDLNNSDLIACTVITKDGGMVQRFLAVDIYQMSLVEPDVSRLGWGVVKFAGLLQDMQVTGVEDDSRALNITIHKPASSPHSKPFPILQATFIFSDHIRCIIAKQRLAKGRIQARRMKMQRIAALLDLPIQPTTEVLGFGLGSSTSTQHLPFRFYDQGRRGSSDPTVQRSVFASVDKVPGFAVAQCINQHSSPSLSSQSPPSASGSPSGSGSTSHCDSGGTSSSSTPSTAQSPADAPMSPELPKPHLPDQLVIVNETEADSKPSKNVARSAAVETASLSPSLVPARQPTISLLCEDTADTLSVESLTLVPPVDPHSLRSLTGMPPLSTPAAACTEPVGEEAACAEPVGTAED

SEQ ID NO: 19679 - protein, 23 aa, Artificial Sequence
  Synthetic polypeptide
TTWPSPAFGASLNPPRHSSGPLR

SEQ ID NO: 19680 - protein, 15 aa, Artificial Sequence
  Synthetic polypeptide
GQPRQHGQAQHSVLH

SEQ ID NO: 19681 - protein, 580 aa, Artificial Sequence
  Synthetic polypeptide
GWAWWFMPVIPPLWEAGVGRSLEASLDNMAKPSIRCFIKPTETLERSLEMNKHKGKRRVQKRPNYKNVGEEEDEEKGPTEDAQEDAEKAKEIEMVIMERSKLSELAASTSVQEQNTTDEEKSAAATCSESTQWSRPFLDMVYHALDSPDDDYHALFVLCLLYAMSHNKGMDPEKLERIQLPVPNAAEKTTYNHPLAERLIRIMNNAAQPDGKIRLATLELSCLLLKQQVLMSAGCIMKDVHLACLEGAREESVHLVRHFYKGEDIFLDMFEDEYRSMTMKPMNVEYLMMDASILLPPTGTPLTGIDFVKRLPCGDVEKTRRAIRVFFMLRSLSLQLRGEPETQLPLTREEDLIKTDDVLDLNNSDLIACTVITKDGGMVQRFLAVDIYQMSLVEPDVSRLGWGVVKFAGLLQDMQVTGVEDDSRALNITIHKPASSPHSKPFPILQATFIFSDHIRCIIAKQRLAKGRIQARRMKMQRIAALLDLPIQPTTEVLGFGLGSSTSTQHLPFRFYDQGRRGSSDPTVQRSVFASVDKVPGEPAPRPAPQLVHHGGRSRSFSLWSLCELPFLSQKPRRLAAPAS

SEQ ID NO: 19682 - protein, 33 aa, Artificial Sequence
  Synthetic polypeptide
GWAWWFMPVIPPLWEAGVGRSLEASLDNMRSRW

SEQ ID NO: 19683 - protein, 625 aa, Artificial Sequence
  Synthetic polypeptide
GQPRQHEIEMVIMERSKLSELAASTSVQEQNTTDEEKSAAATCSESTQWSRPFLDMVYHALDSPDDDYHALFVLCLLYAMSHNKGMDPEKLERIQLPVPNAAEKTTYNHPLAERLIRIMNNAAQPDGKIRLATLELSCLLLKQQVLMSAGCIMKDVHLACLEGAREESVHLVRHFYKGEDIFLDMFEDEYRSMTMKPMNVEYLMMDASILLPPTGTPLTGIDFVKRLPCGDVEKTRRAIRVFFMLRSLSLQLRGEPETQLPLTREEDLIKTDDVLDLNNSDLIACTVITKDGGMVQRFLAVDIYQMSLVEPDVSRLGWGVVKFAGLLQDMQVTGVEDDSRALNITIHKPASSPHSKPFPILQATFIFSDHIRCIIAKQRLAKGRIQARRMKMQRIAALLDLPIQPTTEVLGFGLGSSTSTQHLPFRFYDQGRRGSSDPTVQRSVFASVDKVPGFAVAQCINQHSSPSLSSQSPPSASGSPSGSGSTSHCDSGGTSSSSTPSTAQSPADAPMSPELPKPHLPDQLVIVNETEADSKPSKNVARSAAVETASLSPSLVPARQPTISLLCEDTADTLSVESLTLVPPVDPHSLRSLTGMPPLSTPAAACTEPVGEEAACAEPVGTAED

SEQ ID NO: 19684 - protein, 496 aa, Artificial Sequence
  Synthetic polypeptide
GQPRQHEIEMVIMERSKLSELAASTSVQEQNTTDEEKSAAATCSESTQWSRPFLDMVYHALDSPDDDYHALFVLCLLYAMSHNKGMDPEKLERIQLPVPNAAEKTTYNHPLAERLIRIMNNAAQPDGKIRLATLELSCLLLKQQVLMSAGCIMKDVHLACLEGAREESVHLVRHFYKGEDIFLDMFEDEYRSMTMKPMNVEYLMMDASILLPPTGTPLTGIDFVKRLPCGDVEKTRRAIRVFFMLRSLSLQLRGEPETQLPLTREEDLIKTDDVLDLNNSDLIACTVITKDGGMVQRFLAVDIYQMSLVEPDVSRLGWGVVKFAGLLQDMQVTGVEDDSRALNITIHKPASSPHSKPFPILQATFIFSDHIRCIIAKQRLAKGRIQARRMKMQRIAALLDLPIQPTTEVLGFGLGSSTSTQHLPFRFYDQGRRGSSDPTVQRSVFASVDKVPGEPAPRPAPQLVHHGGRSRSFSLWSLCELPFLSQKPRRLAAPAS

SEQ ID NO: 19685 - protein, 181 aa, Artificial Sequence
  Synthetic polypeptide
WQNQNLPSGFAVAQCINQHSSPSLSSQSPPSASGSPSGSGSTSHCDSGGTSSSSTPSTAQSPADAPMSPELPKPHLPDQLVIVNETEADSKPSKNVARSAAVETASLSPSLVPARQPTISLLCEDTADTLSVESLTLVPPVDPHSLRSLTGMPPLSTPAAACTEPVGEEAACAEPVGTAED

SEQ ID NO: 19686 - protein, 31 aa, Artificial Sequence
  Synthetic polypeptide
NPNSSENQNIFPNSYDGKTKTCLQASPWPSA

SEQ ID NO: 19687 - protein, 97 aa, Artificial Sequence
  Synthetic polypeptide
EPPPLLCNSETQTALKIKIFFLTRMMAKPKPAFRLRRGPVHKPAQLPVPVLTVATLRQREPQRQREHQPLRLWRHQLVLHPLHSPESSRCPHESRTA

SEQ ID NO: 19688 - protein, 88 aa, Artificial Sequence
  Synthetic polypeptide
WQNQNLPSGFAVAQCINQHSSPSLSSQSPPSASGSPSGSGSTSHCDSGGTSSSSTPSTAQSPAVRSGRKGRRRVFSLSEADSHGGHWV

SEQ ID NO: 19689 - protein, 114 aa, Artificial Sequence
  Synthetic polypeptide
EPPPLLCNSETQTALKIKIFFLTRMMAKPKPAFRLRRGPVHKPAQLPVPVLTVATLRQREPQRQREHQPLRLWRHQLVLHPLHSPESSSQEWQERTPTSVQPVGGRQSWRPLGL

SEQ ID NO: 19690 - protein, 20 aa, Artificial Sequence
  Synthetic polypeptide
GWVQWLMPIIPALWDTKESM

SEQ ID NO: 19691 - protein, 22 aa, Artificial Sequence
  Synthetic polypeptide
SQHFGIPRKVCDGDGSGSGLQP

SEQ ID NO: 19692 - protein, 65 aa, Artificial Sequence
  Synthetic polypeptide
MGTVAHAYNPSTLGYQGKYVMVMGVVQACSPEPCLQAVKMTDLSDNPIHESMWELEVEDLHRNIP

SEQ ID NO: 19693 - protein, 11 aa, Artificial Sequence
  Synthetic polypeptide
SQHFGIPRKVC

SEQ ID NO: 19694 - protein, 20 aa, Artificial Sequence
  Synthetic polypeptide
MGTVAHAYNPSTLGYQGKYV

SEQ ID NO: 19695 - protein, 284 aa, Artificial Sequence
  Synthetic polypeptide
SQLLRRLRQENHLNPAAGGYRELRLHHCIPAWATEQDCVSEKKKIDVSQNDLPWEFMVDRLPTVLFFPCNRKDLSVKYPEDVPITLPNLLRFILHHSDPASSPQNVANSPTKECLQSEAVLQRGHISHLEREIQKLRAEISSLQRAQVQVESQLSSARRDEHRLRQQQRALEEQHSLLHAHSEQLQALYEQKTRELQELARKLQELADASENLLTENTWLKILVATMERKLEGRDGAESLAAQREVHPKQPEPSATPQLPGSSPPPANVSATLVSERNKENRTD

SEQ ID NO: 19696 - protein, 50 aa, Artificial Sequence
  Synthetic polypeptide
DCTTAFQPGRQSKTVSQKKKRLTCLRMTFLGNLWSIVFLLSCFFPATERT

SEQ ID NO: 19697 - protein, 56 aa, Artificial Sequence
  Synthetic polypeptide
KISQVWRHVPVVPTTQEAEAGESLESSSRRLQGAEIAPLHSSLGDRARLCLRKKKD

SEQ ID NO: 19698 - protein, 15 aa, Artificial Sequence
  Synthetic polypeptide
SQHFGRPRRADHEIT

SEQ ID NO: 19699 - protein, 34 aa, Artificial Sequence
  Synthetic polypeptide
PGAVAHACNPSTLGGRGGRITRLPRNSTIWGYHK

SEQ ID NO: 19700 - protein, 715 aa, Artificial Sequence
  Synthetic polypeptide
QARWLTPVIPALWEAEAGGSRDYLGTVRFGVITNKHLAKLVSLVHSGSVYLHRHFNTSLVFPREVLNYTAENICKWALENQETLFRWLRPHGGKSLLLNNELKKGPALFLFIPFNPLAESHPLIDEITEVALEYNNCHGDQVVERLLQHLRRVDAPVLESLALEVPAQLPDPPTITASPCCNTVVLPQWHSFSRTHNVCELCVNQTSGGMKPSSVSVPQCSFFEMAAALDSFYLKEQTFYHVASDSIECSNFLTSYSPFSYYTACCRTISRGVSGFIDSEQGVFEAPTVAFSSLEKKCEVDAPSSVPHIEENRYLFPEVDMTSTNFTGLSCRTNKTLNIYLLDSNLFWLYAERLGAPSSTQVKEFAAIVDVKEESHYILDPKQALMKLTLESFIQNFSVLYSPLKRHLIGSGSAQFPSQHLITEVTTDTFWEVVLQKQDVLLLYYAPWCGFCPSLNHIFIQLARNLPMDTFTVARIDVSQNDLPWEFMVDRLPTVLFFPCNRKDLSVKYPEDVPITLPNLLRFILHHSDPASSPQNVANSPTKECLQSEAVLQRGHISHLEREIQKLRAEISSLQRAQVQVESQLSSARRDEHRLRQQQRALEEQHSLLHAHSEQLQALYEQKTRELQELARKLQELADASENLLTENTWLKILVATMERKLEGRDGAESLAAQREVHPKQPEPSATPQLPGSSPPPANVSATLVSERNKENRTD

SEQ ID NO: 19701 - protein, 157 aa, Artificial Sequence
  Synthetic polypeptide
QARWLTPVIPALWEAEAGGSRDYLGTVRFGVITNKHLAKLVSLVHSGSVYLHRHFNTSLVFPREVLNYTAENICKWALENQETLFRWLRPHGGKSLLLNNELKKGPALFLFIPFNPLAESHPLIDEITEVALEYNNCHGDQVVERLLQHLRRVDAPV

SEQ ID NO: 19702 - protein, 290 aa, Artificial Sequence
  Synthetic polypeptide
SWTSQLPELENEVLKVQLKKYVGAVQMLKREGQTAEVPNLWSVDGEVTVAEQKPGEIAEELASSYERKLIEVAEMHGELIEFNERLHRALVAKEALVSQMRQELIDLRGPVPGDLSQTSEDQSLSDFEISNRALINVWIPSVFLRGKAANAFHVYQVYIRIKDDEWNIYRRYTEFRSLHHKLQNKYPQVRAYNFPPKKAIGNKDAKFVEERRKQLQNYLRSVMNKVIQMVPEFAASPKKETLIQLMPFFVDITPPGEPVNSRPKAASRFPKLSRGQPRETRNVEPQSGDL

SEQ ID NO: 19703 - protein, 50 aa, Artificial Sequence
  Synthetic polypeptide
PMMTQQRSSPDASPLIVDFPASRTRERGAQSPTEEICRSCPDAEKRRSNS

SEQ ID NO: 19704 - protein, 270 aa, Artificial Sequence
  Synthetic polypeptide
SWTSQLPELENEVLKVQLKKYVGAVQMLKREGQTAEVPNLWSVDGEVTVAEQKPGEIAEELASSYERKLIEVAEMHGELIEFNERLHRALVAKEALVSQMRQELIDLRGPVPGDLSQTSEDQSLSDFEISNRALINVWIPSVFLRGKAANAFHVYQVYIRIKDDEWNIYRRYTEFRSLHHKLQNKYPQVRAYNFPPKKAIGNKDAKFVEERRKQLQNYLRSVMNKVIQMVPEFAASPKKETLIQLMPFFVDWISLFGNGRDSSREEFSSS

SEQ ID NO: 19705 - protein, 34 aa, Artificial Sequence
  Synthetic polypeptide
EAEQEDHLRPAWTRARPHLYKKLHSATSPRPESL

SEQ ID NO: 19706 - protein, 55 aa, Artificial Sequence
  Synthetic polypeptide
DQPGQEQDPISTKNYTQRHHPARRACEQPAQSSFPLPQTVPGSAPGDPQRGAPER

SEQ ID NO: 19707 - protein, 63 aa, Artificial Sequence
  Synthetic polypeptide
ARGSLETSLDKSKTPSLQKITLSDITPPGEPVNSRPKAASRFPKLSRGQPRETRNVEPQSGDL

SEQ ID NO: 19708 - protein, 64 aa, Artificial Sequence
  Synthetic polypeptide
TPFPSQSEVSKSCSQATTTGMPGVPTRTSTWWCHLPLDASWAETPTGSESWWSPPRKLFTDTTV

SEQ ID NO: 19709 - protein, 81 aa, Artificial Sequence
  Synthetic polypeptide
ETPSASQPREAVSPIKPLFLHSLRCQSRVLRPLPQECRGYLPEPRHGGVICHWMPAGQRPPRAPSRGGHRRENCSPILQSR

SEQ ID NO: 19710 - protein, 19 aa, Artificial Sequence
  Synthetic polypeptide
TPFPSQSEGSRGGRSRRRT

SEQ ID NO: 19711 - protein, 39 aa, Artificial Sequence
  Synthetic polypeptide
ETPSASQPREAVSPIKPLFLHSLREAVADGADGGPEASA

SEQ ID NO: 19712 - protein, 77 aa, Artificial Sequence
  Synthetic polypeptide
SCVKVVFSGHYHRNAGGTYQNLDMVVSSAIGCQLGRDPHGLRVVVVTAEKIVHRYYSLDELSEKGIEDDLMDLIKKK

SEQ ID NO: 19713 - protein, 67 aa, Artificial Sequence
  Synthetic polypeptide
ETPSASQPREAVSKSCSQATTTGMPGVPTRTSTWWCHLPLDASWAETPTGSESWWSPPRKLFTDTTV

SEQ ID NO: 19714 - protein, 103 aa, Artificial Sequence
  Synthetic polypeptide
LTYGSGFPHTTRSDGFIRGFCFCIFLIFLLLPSCKKRLLPPSHVKLCQSRVLRPLPQECRGYLPEPRHGGVICHWMPAGQRPPRAPSRGGHRRENCSPILQSR

SEQ ID NO: 19715 - protein, 219 aa, Artificial Sequence
  Synthetic polypeptide
SWKPWRTEQTEDLKRVLRAVDRAIPLVLVSGNHDIGNTPTAETVEEFCRTWGDDYFSFWVGGVLFLVLNSQFYENPSKCPSLKQAQDQWLDEQLSIARQRHCQHAIVFQHIPLFLESIDEDDDYYFNLSKSTRKKLADKFIHAGVKVVFSGHYHRNAGGTYQNLDMVVSSAIGCQLGRDPHGLRVVVVTAEKIVHRYYSLDELSEKGIEDDLMDLIKKK

SEQ ID NO: 19716 - protein, 22 aa, Artificial Sequence
  Synthetic polypeptide
ETPSASQPREAGSRGGRSRRRT

SEQ ID NO: 19717 - protein, 61 aa, Artificial Sequence
  Synthetic polypeptide
LTYGSGFPHTTRSDGFIRGFCFCIFLIFLLLPSCKKRLLPPSHVKLEAVADGADGGPEASA

SEQ ID NO: 19718 - protein, 50 aa, Artificial Sequence
  Synthetic polypeptide
HARNTPPQGLCPHCPLSLAAWNSLGPDGHKAPSSLYSDTTLASWCIEPTE

SEQ ID NO: 19719 - protein, 48 aa, Artificial Sequence
  Synthetic polypeptide
SSDMPETPHPRACALTVPSAWQPGTLLAQMVTRLHPAFIQIPPWHLGV

SEQ ID NO: 19720 - protein, 286 aa, Artificial Sequence
  Synthetic polypeptide
PLTCQKHPTPGPVPSLSPQPGSLELSWPRWSQGSIQPLFRYHLGILVYRAHRIIESCQEAFILRLFRQKNKRGFIKAFTDNAVAFDTGFCHVERVMRNLFVRKLYLWPRFHVAVNSFLEQHKPEVVEIHVSMTPTMLAIQTAILDILNACLKELKCHNPSLEVEDLSLENAIGKPFDKTIRHYLDPLWHQLGAKTKSLVQDLKILRTLLQYLSQYDCVTFLNLLESLRATEKAFGQNSGWLFLDSSTSMFINARARVYHLPDAKMSKKEKISEKMEIKEGEGILWG

SEQ ID NO: 19721 - protein, 830 aa, Artificial Sequence
  Synthetic polypeptide
PLTCQKHPTPGPVPSLSPQPGSLELSWPRWSQGSIQPLFRYHLGILVYRAHRIIESCQEAFILRLFRQKNKRGFIKAFTDNAVAFDTGFCHVERVMRNLFVRKLYLWPRFHVAVNSFLEQHKPEVVEIHVSMTPTMLAIQTAILDILNACLKELKCHNPSLEVEDLSLENAIGKPFDKTIRHYLDPLWHQLGAKTKSLVQDLKILRTLLQYLSQYDCVTFLNLLESLRATEKAFGQNSGWLFLDSSTSMFINARARVYHLPDAKMSKKEKISEKMEIKEGEETKKELVLESNPKWEALTEVLKEIEAENKESEALGGPGQVLICASDDRTCSQLRDYITLGAEAFLLRLYRKTFEKDSKAEEVWMKFRKEDSSKRIRKSHKRPKDPQNKERASTKERTLKKKKRKLTLTQMVGKPEELEEEGDVEEGYRREISSSPESCPEEIKHEEFDVNLSSDAAFGILKEPLTIIHPLLGCSDPYALTRVLHEVEPRYVVLYDAELTFVRQLEIYRASRPGKPLRVYFLIYGGSTEEQRYLTALRKEKEAFEKLIREKASMVVPEEREGRDETNLDLVRGTASADVSTDTRKAGGQEQNGTQQSIVVDMREFRSELPSLIHRRGIDIEPVTLEVGDYILTPEMCVERKSISDLIGSLNNGRLYSQCISMSRYYKRPVLLIEFDPSKPFSLTSRGALFQEISSNDISSKLTLLTLHFPRLRILWCPSPHATAELFEELKQSKPQPDAATALAITADSETLPESEKYNPGPQDFLLKMPGVNAKNCRSLMHHVKNIAELAALSQDELTSILGNAANAKQLYDFIHTSFAEVVSKGKGKK

SEQ ID NO: 19722 - protein, 115 aa, Artificial Sequence
  Synthetic polypeptide
PLTCQKHPTPGPVPSLSPQPGSLELSWPRWSQGSIQPLFRYHLGILVYRAHRIIESCQEAFILRLFRQKNKRGFIKAFTDNAVAFDTGFCHVERVMRNLFVRKLYLWPRLLYWTF

SEQ ID NO: 19723 - protein, 147 aa, Artificial Sequence
  Synthetic polypeptide
DAVNTSKYAESYRIQTYAEYMGRKQEEKQIKRKWTEDSWKEADSKRLNPQCIPYTLQNHYYRNNSFTAPSTVGKRNLSPSQEEAGLEDGVSGEISDTELEQTDSCAEPLSEGRKKAKKLKRMKKELSPAGSISKNSPATLFEVPDTW

SEQ ID NO: 19724 - protein, 58 aa, Artificial Sequence
  Synthetic polypeptide
VKIVPLYSRLGEMLSIPANMQKAIGSKPMLNIWGENRKRSRSKESGLKIAGRRLTANG

SEQ ID NO: 19725 - protein, 28 aa, Artificial Sequence
  Synthetic polypeptide
RSCHSTPDWVRCCQYQQICRKLSDPNLC

SEQ ID NO: 19726 - protein, 35 aa, Artificial Sequence
  Synthetic polypeptide
GQEFEAAVSEDRATLLQTGCQYQQICRKLSDPNLC

SEQ ID NO: 19727 - protein, 156 aa, Artificial Sequence
  Synthetic polypeptide
VKIVPLYSRLAVNTSKYAESYRIQTYAEYMGRKQEEKQIKRKWTEDSWKEADSKRLNPQCIPYTLQNHYYRNNSFTAPSTVGKRNLSPSQEEAGLEDGVSGEISDTELEQTDSCAEPLSEGRKKAKKLKRMKKELSPAGSISKNSPATLFEVPDTW

SEQ ID NO: 19728 - protein, 54 aa, Artificial Sequence
  Synthetic polypeptide
RSCHSTPDWLSIPANMQKAIGSKPMLNIWGENRKRSRSKESGLKIAGRRLTANG

SEQ ID NO: 19729 - protein, 12 aa, Artificial Sequence
  Synthetic polypeptide
SQLLGRLRRSDI

SEQ ID NO: 19730 - protein, 436 aa, Artificial Sequence
  Synthetic polypeptide
PTWRNSVSTKNTKISRVWWHKPVIPATREAKKERYIVISKVDEEERKRREQQKHAKEQEELNDAVGFSRVIHAIANSGKLVIGHNMLLDVMHTVHQFYCPLPADLSEFKEMTTCVFPRLLDTKLMASTQPFKDIINNTSLAELEKRLKETPFNPPKVESAEGFPSYDTASEQLHEAGYDAYITGLCFISMANYLGSFLSPPKIHVSARSKLIEPFFNKLFLMRVMDIPYLNLEGPDLQPKRDHVLHVTFPKEWKTSDLYQLFSAFGNIQISWIDDTSAFVSLSQPEQVKIAVNTSKYAESYRIQTYAEYMGRKQEEKQIKRKWTEDSWKEADSKRLNPQCIPYTLQNHYYRNNSFTAPSTVGKRNLSPSQEEAGLEDGVSGEISDTELEQTDSCAEPLSEGRKKAKKLKRMKKELSPAGSISKNSPATLFEVPDTW

SEQ ID NO: 19731 - protein, 36 aa, Artificial Sequence
  Synthetic polypeptide
PTWRNSVSTKNTKISRVWWHKPVIPATREAKKERYI

SEQ ID NO: 19732 - protein, 418 aa, Artificial Sequence
  Synthetic polypeptide
WYMPVVPATQEAEKERYIVISKVDEEERKRREQQKHAKEQEELNDAVGFSRVIHAIANSGKLVIGHNMLLDVMHTVHQFYCPLPADLSEFKEMTTCVFPRLLDTKLMASTQPFKDIINNTSLAELEKRLKETPFNPPKVESAEGFPSYDTASEQLHEAGYDAYITGLCFISMANYLGSFLSPPKIHVSARSKLIEPFFNKLFLMRVMDIPYLNLEGPDLQPKRDHVLHVTFPKEWKTSDLYQLFSAFGNIQISWIDDTSAFVSLSQPEQVKIAVNTSKYAESYRIQTYAEYMGRKQEEKQIKRKWTEDSWKEADSKRLNPQCIPYTLQNHYYRNNSFTAPSTVGKRNLSPSQEEAGLEDGVSGEISDTELEQTDSCAEPLSEGRKKAKKLKRMKKELSPAGSISKNSPATLFEVPDTW

SEQ ID NO: 19733 - protein, 12 aa, Artificial Sequence
  Synthetic polypeptide
SQLLRRLRRSDI

SEQ ID NO: 19734 - protein, 18 aa, Artificial Sequence
  Synthetic polypeptide
WYMPVVPATQEAEKERYI

SEQ ID NO: 19735 - protein, 20 aa, Artificial Sequence
  Synthetic polypeptide
ESQNLYLVCACYELGNLGRS

SEQ ID NO: 19736 - protein, 380 aa, Artificial Sequence
  Synthetic polypeptide
PREELNDAVGFSRVIHAIANSGKLVIGHNMLLDVMHTVHQFYCPLPADLSEFKEMTTCVFPRLLDTKLMASTQPFKDIINNTSLAELEKRLKETPFNPPKVESAEGFPSYDTASEQLHEAGYDAYITGLCFISMANYLGSFLSPPKIHVSARSKLIEPFFNKLFLMRVMDIPYLNLEGPDLQPKRDHVLHVTFPKEWKTSDLYQLFSAFGNIQISWIDDTSAFVSLSQPEQVKIAVNTSKYAESYRIQTYAEYMGRKQEEKQIKRKWTEDSWKEADSKRLNPQCIPYTLQNHYYRNNSFTAPSTVGKRNLSPSQEEAGLEDGVSGEISDTELEQTDSCAEPLSEGRKKAKKLKRMKKELSPAGSISKNSPATLFEVPDTW

SEQ ID NO: 19737 - protein, 180 aa, Artificial Sequence
  Synthetic polypeptide
PREELNDAVGFSRVIHAIANSGKLVIGHNMLLDVMHTVHQFYCPLPADLSEFKEMTTCVFPRLLDTKLMASTQPFKDIINNTSLAELEKRLKETPFNPPKVESAEGFPSYDTASEQLHEAGYDAYITGLCFISMANYLGSFLSPPKIHVSARSKLIEPFFNKLFLMRVMDIPYLNLEGPD

SEQ ID NO: 19738 - protein, 11 aa, Artificial Sequence
  Synthetic polypeptide
VTEFLLECSGV

SEQ ID NO: 19739 - protein, 36 aa, Artificial Sequence
  Synthetic polypeptide
AEALLGQETLGWNPGPHLPSSVTLDELPNSCWSAVV

SEQ ID NO: 19740 - protein, 14 aa, Artificial Sequence
  Synthetic polypeptide
PWMSYRIPAGVQWC

SEQ ID NO: 19741 - protein, 17 aa, Artificial Sequence
  Synthetic polypeptide
VTEFLLALSPRLECSGV

SEQ ID NO: 19742 - protein, 42 aa, Artificial Sequence
  Synthetic polypeptide
AEALLGQETLGWNPGPHLPSSVTLDELPNSFLLCHPGWSAVV

SEQ ID NO: 19743 - protein, 20 aa, Artificial Sequence
  Synthetic polypeptide
PWMSYRIPSCSVTQAGVQWC

SEQ ID NO: 19744 - protein, 11 aa, Artificial Sequence
  Synthetic polypeptide
EGYNRDPMRPR

SEQ ID NO: 19745 - protein, 482 aa, Artificial Sequence
  Synthetic polypeptide
MLVFVNKVLLAHRNIFYMLSMSTVGAVTAMLRGLQQRSHEAQVTKLGEEVSLRFLKREAKLCGFLQKSFLALEKRMKASESSRLKLEGSLRGELESRWEKLRGLMEERLRALQGQHEESHLLEQCQGLDAAVAQLTKFVQQNQASLNRVLLAEEKAWDAKGRLEESRAGELAAYVQENLEAAQLAGELARQEMHGELVLLREKSRALEASVAQLAGQLKELSGHLPALSSRLDLQEQMLGLRLSEAKTEWEGAERKSLEDLARWRKEVTEHLRGVREKVDGLPQQIESVSDKCLLHKSDSDLRISAEGKAREFKVGALRQELATLLSSVQLLKEDNPGRKIAEMQGKLATFQNQIMKLENCVQANKTIQNLRFNTEARLRTQEMATLWESVLRLWSEEGPRTPLGSWKALPSLVRPRVFIKDMAPGKVVPMNCWGVYQAVRWLRWKASLIKLRALRRPGGVLEKPHSQEQVQQLTPSLFIQK

SEQ ID NO: 19746 - protein, 489 aa, Artificial Sequence
  Synthetic polypeptide
MLVFVNKVLLAHRNIFYMLSMSTVGAVTAMLRGLQQRSHEAQVTKLGEEVSLRFLKREAKLCGFLQKSFLALEKRMKASESSRLKLEGSLRGELESRWEKLRGLMEERLRALQGQHEVGPGGRRAEESHLLEQCQGLDAAVAQLTKFVQQNQASLNRVLLAEEKAWDAKGRLEESRAGELAAYVQENLEAAQLAGELARQEMHGELVLLREKSRALEASVAQLAGQLKELSGHLPALSSRLDLQEQMLGLRLSEAKTEWEGAERKSLEDLARWRKEVTEHLRGVREKVDGLPQQIESVSDKCLLHKSDSDLRISAEGKAREFKVGALRQELATLLSSVQLLKEDNPGRKIAEMQGKLATNQIMKLENCVQANKTIQNLRFNTEARLRTQEMATLWESVLRLWSEEGPRTPLGSWKALPSLVRPRVFIKDMAPGKVVPMNCWGVYQAVRWLRWKASLIKLRALRRPGGVLEKPHSQEQVQQLTPSLFIQK

SEQ ID NO: 19747 - protein, 6 aa, Artificial Sequence
  Synthetic polypeptide
ASKHHA

SEQ ID NO: 19748 - protein, 667 aa, Artificial Sequence
  Synthetic polypeptide
QVSIMHEDWCWKNKSLEVEVLEDDMSAVEFRQTGYMLRCSLSHAITLEFYQDGNGRENVGIYNLSKGVNRFCLSKPGVYKVTPRSCHRFEQAFYTYDTSSPSILTLTAIRHHVLGTITTDKMMDVTVTIKSSIDSEPALVLGPLKSVQELRREQQLAEIEARRQEREKNGNEEGEERMTKPPVQEMVDELQGPFSYDFSYWARSGEKITVTPSSKELLFYPPSMEAVVSGESCPGKLIEIHGKAGLFLEGQIHPELEGVEIVISEKGASSPLITVFTDDKGAYSVGPLHSDLEYTVTSQKEGYVLTAVEGTIGDFKAYALAGVSFEIKAEDDQPLPGVLLSLSGGLFRSNLLTQDNGILTFSNLSPGQYYFKPMMKEFRFEPSSQMIEVQEGQNLKITITGYRTAYSCYGTVSSLNGEPEQGVAMEAVGQNDCSIYGEDTVTDEEGKFRLRGLLPGCVYHVQLKAEGNDHIERALPHHRVIEVGNNDIDDVNIIVFRQINQFDLSGNVITSSEYLPTLWVKLYKSENLDNPIQTVSLGQSLFFHFPPLLRDGENYVVLLDSTLPRSQYDYILPQVSFTAVGYHKHITLIFNPTRKLPEQDIAQGSYIALPLTLLVLLAGYNHDKLIPLLLQLTSRLQGVRALGQAASDNSGPEDAKRQAKKQKTRRT

SEQ ID NO: 19749 - protein, 90 aa, Artificial Sequence
  Synthetic polypeptide
GSARREGPSGVVRGLSPRLYHVSSFTKAKTSTIQSRQFPLASPCSSISPHCSETARTMLCFWTPHSPDPSMTTSCLKFLSPQWATINTSP

SEQ ID NO: 19750 - protein, 55 aa, Artificial Sequence
  Synthetic polypeptide
VPGSTMCQALQKRKPRQSNPDSFPWPVPVLPFPPTAQRRRELCCASGLHTPQIPV

SEQ ID NO: 19751 - protein, 170 aa, Artificial Sequence
  Synthetic polypeptide
RQCKAGRTLRSRQGVESQALPCVKLYKSENLDNPIQTVSLGQSLFFHFPPLLRDGENYVVLLDSTLPRSQYDYILPQVSFTAVGYHKHITLIFNPTRKLPEQDIAQGSYIALPLTLLVLLAGYNHDKLIPLLLQLTSRLQGVRALGQAASDNSGPEDAKRQAKKQKTRRT

SEQ ID NO: 19752 - protein, 34 aa, Artificial Sequence
  Synthetic polypeptide
QINCKEKKTNNRWTEYLGSCLNRTSHKDPTLPCH

SEQ ID NO: 19753 - protein, 114 aa, Artificial Sequence
  Synthetic polypeptide
GGPRSTQMTPQGCRTTTWSLICLTNKLQGKKNQQQMDRIPRKLPEQDIAQGSYIALPLTLLVLLAGYNHDKLIPLLLQLTSRLQGVRALGQAASDNSGPEDAKRQAKKQKTRRT

SEQ ID NO: 19754 - protein, 329 aa, Artificial Sequence
  Synthetic polypeptide
VWWRAPVVPATAKEAEAGGSPEARSSRPAWATQGDPISTNSTKTSQERARLLRGQSVQQVGPQGLLYVQQRELAVTSPKDGSISILGSDDATTCHIVVLRHTGNGATCLTHCDGTDTKAEVPLIMNSIKSFSDHAQCGRLEVHLVGGFSDDRQLSQKLTHQLLSEFDRQEDDIHLVTLCVTELNDREENENHFPVIYGIAVNIKTAEIYRASFQDRGPEEQLRAARTLAGGPMISIYDAETEQLRIGPYSWTPFPHVDFWLHQDDKQILENLSTSPLAEPPHFVEHIRSTLMFLKKHPSPAHTLFSGNKALLYKKNEDGLWEKISSPGS

SEQ ID NO: 19755 - protein, 74 aa, Artificial Sequence
  Synthetic polypeptide
CGGVRLWFQLLQRRLKQEDHLRPGVRDQPGQHRETPSLQTVQKLARKEPDFSEVSLFNKWDPRAFCMFSKESLQ

SEQ ID NO: 19756 - protein, 43 aa, Artificial Sequence
  Synthetic polypeptide
PGKSQTSQRSVCSTSGTPGPSVCSAKRACSDLPKGWLHLHSGF

SEQ ID NO: 19757 - protein, 242 aa, Artificial Sequence
  Synthetic polypeptide
VWWRAPVVPATAKEAEAGGSPEARSSRPAWATQGDPISTNSTKTSQERARLLRGSISILGSDDATTCHIVVLRHTGNGATCLTHCDGTDTKAEVPLIMNSIKSFSDHAQCGRLEVHLVGGFSDDRQLSQKLTHQLLSEFDRQEDDIHLVTLCVTELNDREENENHFPVIYGIAVNIKTAEIYRASFQDRGPEEQLRAARTLAGGPMISIYDAETEQLRIGPYSWTPFPHVDFWLHQDDKQIL

SEQ ID NO: 19758 - protein, 71 aa, Artificial Sequence
  Synthetic polypeptide
CGGVRLWFQLLQRRLKQEDHLRPGVRDQPGQHRETPSLQTVQKLARKEPDFSEAPSPFWVLMMPLLVTLWS

SEQ ID NO: 19759 - protein, 16 aa, Artificial Sequence
  Synthetic polypeptide
PGKSQTSQRLHLHSGF

SEQ ID NO: 19760 - protein, 419 aa, Artificial Sequence
  Synthetic polypeptide
GQARWLMPVIPALWEAEAGGSPEVNASRQGIEDAEETATQTCGGTDSTEGLFNMDEDEETEHETKAGPERLDQMVHPVAERLDILMSLVLSYMKDVCYVDGKVDNGKTKDLYRDLINIFDKLLLPTHASCHVQFFMFYLCSFKLGFAEAFLEHLWKKLQDPSNPAIIRQAAGNYIGSFLARAKFIPLITVKSCLDLLVNWLHIYLNNQDSGTKAFCDVALHGPFYSACQAVFYTFVFRHKQLLSGNLKEGLQYLQSLNFERIVMSQLNPLKICLPSVVNFFAAITNKYQLVFCYTIIERNNRQMLPVIRSTAGGDSVQICTNPLDTFFPFDPCVLKRSKKFIDPIYQVWEDMSAEELQEFKKPMKKDIVEDEDDDFLKGEVPQNDTVIGITPSSFDTHFRSPSSSVGSPPVLYMQPSPL

SEQ ID NO: 19761 - protein, 14 aa, Artificial Sequence
  Synthetic polypeptide
FQHFGKLRPVDHLR

SEQ ID NO: 19762 - protein, 406 aa, Artificial Sequence
  Synthetic polypeptide
GQARWLMPVIPALWEAEAGGSPEVNASRQGIEDAEETATQTCGGTDSTEGLFNMDEDEETEHETKAGPERLDQMVHPVAERLDILMSLVLSYMKDVCYVDGKVDNGKTKDLYRDLINIFDKLLLPTHASCHVQFFMFYLCSFKLGFAEAFLEHLWKKLQDPSNPAIIRQAAGNYIGSFLARAKFIPLITVKSCLDLLVNWLHIYLNNQDSGTKAFCDVALHGPFYSACQAVFYTFVFRHKQLLSGNLKEGLQYLQSLNFERIVMSQLNPLKICLPSVVNFFAAITNKYQLVFCYTIIERNNRQMLPVIRSTAGGDSVQICTNPLDTFFPFDPCVLKRSKKFIDPIYQVWEDMSAEELQEFKKPMKKDIVEDEDDDFLKGEVPQNDTVIGITPSSFDTHFRSPSSSF

SEQ ID NO: 19763 - protein, 73 aa, Artificial Sequence
  Synthetic polypeptide
GQARWLMPVIPALWEAEAGGSPEVNASRQGIEDAEETATQTCGGTDSTEGLFNMVSSLLMKVEMKFIIKGGNS

SEQ ID NO: 19764 - protein, 736 aa, Artificial Sequence
  Synthetic polypeptide
RNDMDPPHPFPKEIPHNEKLLSLKYESLDYDNSENQLFLEEERRINHTAFRTVEIKRWVICALIGILTGLVACFIDIVVENLAGLKYRVIKGNIDKFTEKGGLSFSLLLWATLNAAFVLVGSVIVAFIEPVAAGSGIPQIKCFLNGVKIPHVVRLKTLVIKVSGVILSVVGGLAVGKEGPMIHSGSVIAAGISQGRSTSLKRDFKIFEYFRRDTEKRDFVSAGAAAGVSAAFGAPVGGVLFSLEEGASFWNQFLTWRIFFASMISTFTLNFVLSIYHGNMWDLSSPGLINFGRFDSEKMAYTIHEIPVFIAMGVVGGVLGAVFNALNYWLTMFRIRYIHRPCLQVIEAVLVAAVTATVAFVLIYSSRDCQPLQGGSMSYPLQLFCADGEYNSMAAAFFNTPEKSVVSLFHDPPGSYNPLTLGLFTLVYFFLACWTYGLTVSAGVFIPSLLIGAAWGRLFGISLSYLTGAAIWADPGKYALMGAAAQLGGIVRMTLSLTVIMMEATSNVTYGFPIMLVLMTAKIVGDVFIEGLYDMHIQLQSVPFLHWEAPVTSHSLTAREVMSTPVTCLRRREKVGVIVDVLSDTASNHNGFPVVEHADDTQPARLQGLILRSQLIVLLKHKVFVERSNLGLVQRRLRLKDFRDAYPRFPPIQSIHVSQDERECTMDLSEFMNPSPYTVPQEASLPRVFKLFRALGLRHLVVVDNRNQVVGLVTRKDLARYRLGKRGLEELSLAQT

SEQ ID NO: 19765 - protein, 128 aa, Artificial Sequence
  Synthetic polypeptide
RMHSAEHGACHKLRSEETIWTLHIPSPRRSHTTRSSCPSSMRAWTMTTVRTSCSWRRSGGSITRPSGRWRSSAGSSAPSLGSSRASWPASLTSWWKTWLASSTGSSRAISTSSQRRADCPSPCCCGPR

SEQ ID NO: 19766 - protein, 43 aa, Artificial Sequence
  Synthetic polypeptide
KVNACIALSTVPVTNYALKKRYGPSTSLPQGDPTQREAPVPQV

SEQ ID NO: 19767 - protein, 856 aa, Artificial Sequence
  Synthetic polypeptide
RNDMDPPHPFPKEIPHNEKLLSLKYESLDYDNSENQLFLEEERRINHTAFRTVEIKRWVICALIGILTGLVACFIDIVVENLAGLKYRVIKGNIDKFTEKGGLSFSLLLWATLNAAFVLVGSVIVAFIEPVAAGSGIPQIKCFLNGVKIPHVVRLKTLVIKVSGVILSVVGGLAVGKEGPMIHSGSVIAAGISQGRSTSLKRDFKIFEYFRRDTEKRDFVSAGAAAGVSAAFGAPVGGVLFSLEEGASFWNQFLTWRIFFASMISTFTLNFVLSIYHGNMWDLSSPGLINFGRFDSEKMAYTIHEIPVFIAMGVVGGVLGAVFNALNYWLTMFRIRYIHRPCLQVIEAVLVAAVTATVAFVLIYSSRDCQPLQGGSMSYPLQLFCADGEYNSMAAAFFNTPEKSVVSLFHDPPGSYNPLTLGLFTLVYFFLACWTYGLTVSAGVFIPSLLIGAAWGRLFGISLSYLTGAAIWADPGKYALMGAAAQLGGIVRMTLSLTVIMMEATSNVTYGFPIMLVLMTAKIVGDVFIEGLYDMHIQLQSVPFLHWEAPVTSHSLTAREVMSTPVTCLRRREKVGVIVDVLSDTASNHNGFPVVEHADDTQPARLQGLILRSQLIVLLKHKVFVERSNLGLVQRRLRLKDFRDAYPRFPPIQSIHVSQDERECTMDLSEFMNPSPYTVPQACVAPTGVQAVPGPGPAAPGGGGQPQSGCRVGDQEGPRQVPPGKERLGGALAGPDVRPSPAHNGHWRWHPGPSAFPPGVTGFSAQTMLPSSGNGEHPAAGRAGGRRGTDPLAGLTLLWAVVSPLGASLRRPSLHSPRLGFFTSRDQLCVCDLPTGLSASWEPAAGPAPACLCPCA

SEQ ID NO: 19768 - protein, 205 aa, Artificial Sequence
  Synthetic polypeptide
RNDMDPPHPFPKEIPHNEKLLSLKYESLDYDNSENQLFLEEERRINHTAFRTVEIKRWVICALIGILTGLVACFIDIVVENLAGLKYRVIKGNIDKFTEKGGLSFSLLLWATLNAAFVLVGSVIVAFIEPVAAGSGIPQIKCFLNGVKIPHVVRLKTLVIKVSGVILSVVGGLAVGKEGPMIHSGSVIAAGISQGRSTSLKRDFK

SEQ ID NO: 19769 - protein, 84 aa, Artificial Sequence
  Synthetic polypeptide
RNDMDPPHPFPKEIPHNEKLLSLKYESLDYDNSENQLFLEEERRINHTAFRTVEIKRWVICALIGILTGLVACFIDIVVENLAG

SEQ ID NO: 19770 - protein, 100 aa, Artificial Sequence
  Synthetic polypeptide
RMHSAEHGACHKLRSEETIWTLHIPSPRRSHTTRSSCPSSMRAWTMTTVRTSCSWRRSGGSITRPSGRWRSSAGSSAPSLGSSRASWPASLTSWWKTWLA

SEQ ID NO: 19771 - protein, 136 aa, Artificial Sequence
  Synthetic polypeptide
VLSPVPATTMDDIQLCKDIMDLKQELQNLVAIPEKEKTKLQKQREDELIQKIHKLVQKRDFLVDDAEVERLREQEEDKEMADFLRIKLKPLDKVTKSPASSRAEKKAEPPPSKPTVAKTGLALIKDCCGATQCNIM

SEQ ID NO: 19772 - protein, 30 aa, Artificial Sequence
  Synthetic polypeptide
GVKEIKHIKCSVQCLLPRWMTSSSARTSWT

SEQ ID NO: 19773 - protein, 17 aa, Artificial Sequence
  Synthetic polypeptide
KRSSILSAQSSACYHDG

SEQ ID NO: 19774 - protein, 83 aa, Artificial Sequence
  Synthetic polypeptide
VLSPVPATTMDDIQLCKDIMDLKQELQNLVAIPEKEKTKLQKQREDELIQKIHKLVQKRDFLVDDAEVERLRLPGREESRAPT

SEQ ID NO: 19775 - protein, 142 aa, Artificial Sequence
  Synthetic polypeptide
VLSPVPATTMDDIQLCKDIMDLKQELQNLVAIPEKEKTKLQKQREDELIQKIHKLVQKRDFLVDDAEVERLREQEEDKEMADFLRIKLKPLDKVTKSPAICLRCVPGGGLDWHGSSVQKSQQGTGSSDVKARAVENGTQSRC

SEQ ID NO: 19776 - protein, 114 aa, Artificial Sequence
  Synthetic polypeptide
VLSPVPATTMDDIQLCKDIMDLKQELQNLVAIPEKEKTKLQKQREDELIQKIHKLVQKRDFLVDDAEVERLREQEEDKEMADFLRIKLKPLDKVTKSPASLESLEKPEAYVSEY

SEQ ID NO: 19777 - protein, 123 aa, Artificial Sequence
  Synthetic polypeptide
VLSPVPATTMDDIQLCKDIMDLKQELQNLVAIPEKEKTKLQKQREDELIQKIHKLVQKRDFLVDDAEVERLREQEEDKEMADFLRIKLKPLDKVTKSPANEEVAVNPLPFSSGGCKRLQAEAE

SEQ ID NO: 19778 - protein, 20 aa, Artificial Sequence
  Synthetic polypeptide
GLPSHVELKRKNQTAEAERG

SEQ ID NO: 19779 - protein, 54 aa, Artificial Sequence
  Synthetic polypeptide
WFYKGFPLSLDSHFLCCLLPSKTCLLPSAVIVRPPQPRGTKKKKPNCRSRERMS

SEQ ID NO: 19780 - protein, 37 aa, Artificial Sequence
  Synthetic polypeptide
RFQLHYGLILLFWATYLMTIYNFVERPLASAFEESCR

SEQ ID NO: 19781 - protein, 665 aa, Artificial Sequence
  Synthetic polypeptide
PFITLWKDPWLLRSKSPVGNPQLIQFSREVIDLLKSQPSCVIPISHFIPSYHHHFAKQCRVSDYGYSKLIELLEAVPHVLQILGMGSKRLLTLTHRAQVKRFTQDLLKLLKSQASKQVIVREFSQAYHWCFSKDWDVTEYGVCELIDIVSEIPDTTICLSQQDNEMVICIPKRERTQDEIERTKQFSKDVVDLLRHQPHFRMPFNKFIPSYHHHFGRQCKLAYYGFTKLLELFEAIPDTLQVLECGEEKILTLTEVERFKALAAQFVKLLRSQKDNCLMMTDLLTEYAKTFGYTFRLQDYDVSSISALTQKLCHVVKVADIESGRQIQLINRKSLRSLTAQLLVLLMSWEGTTHLSVEELKRHYESTHNTPLNPCEYGFMTLTELLKSLPYLVEVFTNDKMEECVKLTSLYLFAKNVRSLLHTYHYQQIFLHEFSMAYTKYVGETLQPKTYGHSSVEELLGAIPQVVWIKGHGHKRIVVLKNDMKSRLSSLSLSPANHENQPSEGERILEVPESHTASELKLGADGSGPSHTEQELLRLTDDSPVDLLCAPVPSCLPSPQLRPDPVILQSADLIQFEERPQEPSEIMILNQEEKMEIPIPGKSKTLTSDSSSSCISAAVPVPPCPSSETSESLLSKDPVESPAKKQPKNRVKLAANFSLAPITKL

SEQ ID NO: 19782 - protein, 14 aa, Artificial Sequence
  Synthetic polypeptide
LCGKTLGFCVRRVL

SEQ ID NO: 19783 - protein, 751 aa, Artificial Sequence
  Synthetic polypeptide
PFITLWKDPWLLRSKSPVGNPQLIQFSREVIDLLKSQPSCVIPISHFIPSYHHHFAKQCRVSDYGYSKLIELLEAVPHVLQILGMGSKRLLTLTHRAQVKRFTQDLLKLLKSQASKQVIVREFSQAYHWCFSKDWDVTEYGVCELIDIVSEIPDTTICLSQQDNEMVICIPKRERTQDEIERTKQFSKDVVDLLRHQPHFRMPFNKFIPSYHHHFGRQCKLAYYGFTKLLELFEAIPDTLQVLECGEEKILTLTEVERFKALAAQFVKLLRSQKDNCLMMTDLLTEYAKTFGYTFRLQDYDVSSISALTQKLCHVVKVADIESGRQIQLINRKSLRSLTAQLLVLLMSWEGTTHLSVEELKRHYESTHNTPLNPCEYGFMTLTELLKSLPYLVETAAAFDLQIELKFAGGYSLLLEEILEYIPPPFLSPLPSFLPPPPFFFFVFFVIFIFFIFVFVQFVVFVFFIVVFVFFIVVFVFTNDKMEECVKLTSLYLFAKNVRSLLHTYHYQQIFLHEFSMAYTKYVGETLQPKTYGHSSVEELLGAIPQVVVQFLQKNGKELSCENYLNLYAKAGRLSSLSLSPANHENQPSEGERILEVPESHTASELKLGADGSGPSHTEQELLRLTDDSPVDLLCAPVPSCLPSPQLRPDPVILQSADLIQFEERPQEPSEIMILNQEEKMEIPIPGKSKTLTSDSSSSCISAAVPVPPCPSSETSESLLSKDPVESPAKKQPKNRVKLAANFSLAPITKL

SEQ ID NO: 19784 - protein, 19 aa, Artificial Sequence
  Synthetic polypeptide
PFITLWKDPWLLRSKSPVG

SEQ ID NO: 19785 - protein, 54 aa, Artificial Sequence
  Synthetic polypeptide
AGRGGSCLYSHHFGRLRRVDHLRSRVRDQPGQHSATSSLLKIQKLARRVSPSNA

SEQ ID NO: 19786 - protein, 15 aa, Artificial Sequence
  Synthetic polypeptide
PGECLPQTPEDLSLP

SEQ ID NO: 19787 - protein, 936 aa, Artificial Sequence
  Synthetic polypeptide
CNLISTKNTKISQASVSLKRLRIFLSHEELEPDSIERRPVKDGGGTNSITVRNATFTWARSDPPTLNGITFSIPEGALVAVVGQVGCGKSSLLSALLAEMDKVEGHVAIKGSVAYVPQQAWIQNDSLRENILFGCQLEEPYYRSVIQACALLPDLEILPSGDRTEIGEKGVNLSGGQKQRVSLARAVYSNADIYLFDDPLSAVDAHVGKHIFENVIGPKGMLKNKTRILVTHSMSYLPQVDVIIVMSGGKISEMGSYQELLARDGAFAEFLRTYASTEQEQDAEENGVTGVSGPGKEAKQMENGMLVTDSAGKQLQRQLSSSSSYSGDISRHHNSTAELQKAEAKKEETWKLMEADKAQTGQVKLSVYWDYMKAIGLFISFLSIFLFMCNHVSALASNYWLSLWTDDPIVNGTQEHTKVRLSVYGALGISQGIAVFGYSMAVSIGGILASRCLHVDLLHSILRSPMSFFERTPSGNLVNRFSKELDTVDSMIPEVIKMFMGSLFNVIGACIVILLATPIAAIIIPPLGLIYFFVQRFYVASSRQLKRLESVSRSPVYSHFNETLLGVSVIRAFEEQERFIHQSDLKVDENQKAYYPSIVANRWLAVRLECVGNCIVLFAALFAVISRHSLSAGLVGLSVSYSLQVTTYLNWLVRMSSEMETNIVAVERLKEYSETEKEAPWQIQETAPPSSWPQVGRVEFRNYCLRYREDLDFVLRHINVTINGGEKVGIVGRTGAGKSSLTLGLFRINESAEGEIIIDGINIAKIGLHDLRFKITIIPQDPVLFSGSLRMNLDPFSQYSDEEVWTSLELAHLKDFVSALPDKLDHECAEGGENLSVGQRQLVCLARALLRKTKILVLDEATAAVDLETDDLIQSTIRTQFEDCTVLTIAHRLNTIMDYTRVIVLDKGEIQEYGAPSDLLQQRGLFYSMAKDAGLV

SEQ ID NO: 19788 - protein, 871 aa, Artificial Sequence
  Synthetic polypeptide
CNLISTKNTKISQASVSLKRLRIFLSHEELEPDSIERRPVKDGGGTNSITVRNATFTWARSDPPTLNGITFSIPEGALVAVVGQVGCGKSSLLSALLAEMDKVEGHVAIKGSVAYVPQQAWIQNDSLRENILFGCQLEEPYYRSVIQACALLPDLEILPSGDRTEIGEKGVNLSGGQKQRVSLARAVYSNADIYLFDDPLSAVDAHVGKHIFENVIGPKGMLKNKTRILVTHSMSYLPQVDVIIVMSGGKISEMGSYQELLARDGAFAEFLRTYASTEQEQDAEENGVTGVSGPGKEAKQMENGMLVTDSAGKQLQRQLSSSSSYSGDISRHHNSTAELQKAEAKKEETWKLMEADKAQTGQVKLSVYWDYMKAIGLFISFLSIFLFMCNHVSALASNYWLSLWTDDPIVNGTQEHTKVRLSVYGALGISQGIAVFGYSMAVSIGGILASRCLHVDLLHSILRSPMSFFERTPSGNLVNRFSKELDTVDSMIPEVIKMFMGSLFNVIGACIVILLATPIAAIIIPPLGLIYFFVQRFYVASSRQLKRLESVSRSPVYSHFNETLLGVSVIRAFEEQERFIHQSDLKVDENQKAYYPSIVANRWLAVRLECVGNCIVLFAALFAVISRHSLSAGLVGLSVSYSLQVTTYLNWLVRMSSEMETNIVAVERLKEYSETEKEAPWQIQETAPPSSWPQVGRVEFRNYCLRYREDLDFVLRHINVTINGGEKVGIVGRTGAGKSSLTLGLFRINESAEGEIIIDGINIAKIGLHDLRFKITIIPQDPVLFSGSLRMNLDPFSQYSDEEVWTSLELAHLKDFVSALPDKLDHECAEGGENLRVIVLDKGEIQEYGAPSDLLQQRGLFYSMAKDAGLV

SEQ ID NO: 19789 - protein, 880 aa, Artificial Sequence
  Synthetic polypeptide
CNLISTKNTKISQASVSLKRLRIFLSHEELEPDSIERRPVKDGGGTNSITVRNATFTWARSDPPTLNGITFSIPEGALVAVVGQVGCGKSSLLSALLAEMDKVEGHVAIKGSVAYVPQQAWIQNDSLRENILFGCQLEEPYYRSVIQACALLPDLEILPSGDRTEIGEKTRILVTHSMSYLPQVDVIIVMSGGKISEMGSYQELLARDGAFAEFLRTYASTEQEQDAEENGVTGVSGPGKEAKQMENGMLVTDSAGKQLQRQLSSSSSYSGDISRHHNSTAELQKAEAKKEETWKLMEADKAQTGQVKLSVYWDYMKAIGLFISFLSIFLFMCNHVSALASNYWLSLWTDDPIVNGTQEHTKVRLSVYGALGISQGIAVFGYSMAVSIGGILASRCLHVDLLHSILRSPMSFFERTPSGNLVNRFSKELDTVDSMIPEVIKMFMGSLFNVIGACIVILLATPIAAIIIPPLGLIYFFVQRFYVASSRQLKRLESVSRSPVYSHFNETLLGVSVIRAFEEQERFIHQSDLKVDENQKAYYPSIVANRWLAVRLECVGNCIVLFAALFAVISRHSLSAGLVGLSVSYSLQVTTYLNWLVRMSSEMETNIVAVERLKEYSETEKEAPWQIQETAPPSSWPQVGRVEFRNYCLRYREDLDFVLRHINVTINGGEKVGIVGRTGAGKSSLTLGLFRINESAEGEIIIDGINIAKIGLHDLRFKITIIPQDPVLFSGSLRMNLDPFSQYSDEEVWTSLELAHLKDFVSALPDKLDHECAEGGENLSVGQRQLVCLARALLRKTKILVLDEATAAVDLETDDLIQSTIRTQFEDCTVLTIAHRLNTIMDYTRVIVLDKGEIQEYGAPSDLLQQRGLFYSMAKDAGLV

SEQ ID NO: 19790 - protein, 821 aa, Artificial Sequence
  Synthetic polypeptide
CNLISTKNTKISQASVSLKRLRIFLSHEELEPDSIERRPVKDGGGTNSITVRNATFTWARSDPPTLNGITFSIPEGALVAVVGQVGCGKSSLLSALLAEMDKVEGHVAIKTRILVTHSMSYLPQVDVIIVMSGGKISEMGSYQELLARDGAFAEFLRTYASTEQEQDAEENGVTGVSGPGKEAKQMENGMLVTDSAGKQLQRQLSSSSSYSGDISRHHNSTAELQKAEAKKEETWKLMEADKAQTGQVKLSVYWDYMKAIGLFISFLSIFLFMCNHVSALASNYWLSLWTDDPIVNGTQEHTKVRLSVYGALGISQGIAVFGYSMAVSIGGILASRCLHVDLLHSILRSPMSFFERTPSGNLVNRFSKELDTVDSMIPEVIKMFMGSLFNVIGACIVILLATPIAAIIIPPLGLIYFFVQRFYVASSRQLKRLESVSRSPVYSHFNETLLGVSVIRAFEEQERFIHQSDLKVDENQKAYYPSIVANRWLAVRLECVGNCIVLFAALFAVISRHSLSAGLVGLSVSYSLQVTTYLNWLVRMSSEMETNIVAVERLKEYSETEKEAPWQIQETAPPSSWPQVGRVEFRNYCLRYREDLDFVLRHINVTINGGEKVGIVGRTGAGKSSLTLGLFRINESAEGEIIIDGINIAKIGLHDLRFKITIIPQDPVLFSGSLRMNLDPFSQYSDEEVWTSLELAHLKDFVSALPDKLDHECAEGGENLSVGQRQLVCLARALLRKTKILVLDEATAAVDLETDDLIQSTIRTQFEDCTVLTIAHRLNTIMDYTRVIVLDKGEIQEYGAPSDLLQQRGLFYSMAKDAGLV

SEQ ID NO: 19791 - protein, 877 aa, Artificial Sequence
  Synthetic polypeptide
CNLISTKNTKISQASVSLKRLRIFLSHEELEPDSIERRPVKDGGGTNSITVRNATFTWARSDPPTLNGITFSIPEGALVAVVGQVGCGKSSLLSALLAEMDKVEGHVAIKGVNLSGGQKQRVSLARAVYSNADIYLFDDPLSAVDAHVGKHIFENVIGPKGMLKNKTRILVTHSMSYLPQVDVIIVMSGGKISEMGSYQELLARDGAFAEFLRTYASTEQEQDAEENGVTGVSGPGKEAKQMENGMLVTDSAGKQLQRQLSSSSSYSGDISRHHNSTAELQKAEAKKEETWKLMEADKAQTGQVKLSVYWDYMKAIGLFISFLSIFLFMCNHVSALASNYWLSLWTDDPIVNGTQEHTKVRLSVYGALGISQGIAVFGYSMAVSIGGILASRCLHVDLLHSILRSPMSFFERTPSGNLVNRFSKELDTVDSMIPEVIKMFMGSLFNVIGACIVILLATPIAAIIIPPLGLIYFFVQRFYVASSRQLKRLESVSRSPVYSHFNETLLGVSVIRAFEEQERFIHQSDLKVDENQKAYYPSIVANRWLAVRLECVGNCIVLFAALFAVISRHSLSAGLVGLSVSYSLQVTTYLNWLVRMSSEMETNIVAVERLKEYSETEKEAPWQIQETAPPSSWPQVGRVEFRNYCLRYREDLDFVLRHINVTINGGEKVGIVGRTGAGKSSLTLGLFRINESAEGEIIIDGINIAKIGLHDLRFKITIIPQDPVLFSGSLRMNLDPFSQYSDEEVWTSLELAHLKDFVSALPDKLDHECAEGGENLSVGQRQLVCLARALLRKTKILVLDEATAAVDLETDDLIQSTIRTQFEDCTVLTIAHRLNTIMDYTRVIVLDKGEIQEYGAPSDLLQQRGLFYSMAKDAGLV

SEQ ID NO: 19792 - protein, 946 aa, Artificial Sequence
  Synthetic polypeptide
CNLISTKNTKISQASVSLKRLRIFLSHEELEPDSIERRPVKDGGGTNSITVRNATFTWARSDPPTLNGITFSIPEGALVAVVGQVGCGKSSLLSALLAEMDKVEGHVAIKGSVAYVPQQAWIQNDSLRENILFGCQLEEPYYRSVIQACALLPDLEILPSGDRTEIGEKGVNLSGGQKQRVSLARAVYSNADIYLFDDPLSAVDAHVGKHIFENVIGPKGMLKNKTRILVTHSMSYLPQVDVIIVMSGGKISEMGSYQELLARDGAFAEFLRTYASTEQEQDAEENGSTVMDEEEAGVTGVSGPGKEAKQMENGMLVTDSAGKQLQRQLSSSSSYSGDISRHHNSTAELQKAEAKKEETWKLMEADKAQTGQVKLSVYWDYMKAIGLFISFLSIFLFMCNHVSALASNYWLSLWTDDPIVNGTQEHTKVRLSVYGALGISQGIAVFGYSMAVSIGGILASRCLHVDLLHSILRSPMSFFERTPSGNLVNRFSKELDTVDSMIPEVIKMFMGSLFNVIGACIVILLATPIAAIIIPPLGLIYFFVQRFYVASSRQLKRLESVSRSPVYSHFNETLLGVSVIRAFEEQERFIHQSDLKVDENQKAYYPSIVANRWLAVRLECVGNCIVLFAALFAVISRHSLSAGLVGLSVSYSLQVTTYLNWLVRMSSEMETNIVAVERLKEYSETEKEAPWQIQETAPPSSWPQVGRVEFRNYCLRYREDLDFVLRHINVTINGGEKVGIVGRTGAGKSSLTLGLFRINESAEGEIIIDGINIAKIGLHDLRFKITIIPQDPVLFSGSLRMNLDPFSQYSDEEVWTSLELAHLKDFVSALPDKLDHECAEGGENLSVGQRQLVCLARALLRKTKILVLDEATAAVDLETDDLIQSTIRTQFEDCTVLTIAHRLNTIMDYTRVIVLDKGEIQEYGAPSDLLQQRGLFYSMAKDAGLV

SEQ ID NO: 19793 - protein, 85 aa, Artificial Sequence
  Synthetic polypeptide
NPSTLGGQASPSPSPKVLWWPWWARWAAESRPCSQPSWLRWTKWRGTWLSRAPWPMCHSRPGFRMILSEKTSFLDVSWRNHITGP

SEQ ID NO: 19794 - protein, 38 aa, Artificial Sequence
  Synthetic polypeptide
IPALWEAKHHLLHPRRCFGGRGGPGGLRKVVPALSPLG

SEQ ID NO: 19795 - protein, 876 aa, Artificial Sequence
  Synthetic polypeptide
SQHFGRPSITFSIPEGALVAVVGQVGCGKSSLLSALLAEMDKVEGHVAIKGSVAYVPQQAWIQNDSLRENILFGCQLEEPYYRSVIQACALLPDLEILPSGDRTEIGEKGVNLSGGQKQRVSLARAVYSNADIYLFDDPLSAVDAHVGKHIFENVIGPKGMLKNKTRILVTHSMSYLPQVDVIIVMSGGKISEMGSYQELLARDGAFAEFLRTYASTEQEQDAEENGVTGVSGPGKEAKQMENGMLVTDSAGKQLQRQLSSSSSYSGDISRHHNSTAELQKAEAKKEETWKLMEADKAQTGQVKLSVYWDYMKAIGLFISFLSIFLFMCNHVSALASNYWLSLWTDDPIVNGTQEHTKVRLSVYGALGISQGIAVFGYSMAVSIGGILASRCLHVDLLHSILRSPMSFFERTPSGNLVNRFSKELDTVDSMIPEVIKMFMGSLFNVIGACIVILLATPIAAIIIPPLGLIYFFVQRFYVASSRQLKRLESVSRSPVYSHFNETLLGVSVIRAFEEQERFIHQSDLKVDENQKAYYPSIVANRWLAVRLECVGNCIVLFAALFAVISRHSLSAGLVGLSVSYSLQVTTYLNWLVRMSSEMETNIVAVERLKEYSETEKEAPWQIQETAPPSSWPQVGRVEFRNYCLRYREDLDFVLRHINVTINGGEKVGIVGRTGAGKSSLTLGLFRINESAEGEIIIDGINIAKIGLHDLRFKITIIPQDPVLFSGSLRMNLDPFSQYSDEEVWTSLELAHLKDFVSALPDKLDHECAEGGENLSVGQRQLVCLARALLRKTKILVLDEATAAVDLETDDLIQSTIRTQFEDCTVLTIAHRLNTIMDYTRVIVLDKGEIQEYGAPSDLLQQRGLFYSMAKDAGLV

SEQ ID NO: 19796 - protein, 811 aa, Artificial Sequence
  Synthetic polypeptide
SQHFGRPSITFSIPEGALVAVVGQVGCGKSSLLSALLAEMDKVEGHVAIKGSVAYVPQQAWIQNDSLRENILFGCQLEEPYYRSVIQACALLPDLEILPSGDRTEIGEKGVNLSGGQKQRVSLARAVYSNADIYLFDDPLSAVDAHVGKHIFENVIGPKGMLKNKTRILVTHSMSYLPQVDVIIVMSGGKISEMGSYQELLARDGAFAEFLRTYASTEQEQDAEENGVTGVSGPGKEAKQMENGMLVTDSAGKQLQRQLSSSSSYSGDISRHHNSTAELQKAEAKKEETWKLMEADKAQTGQVKLSVYWDYMKAIGLFISFLSIFLFMCNHVSALASNYWLSLWTDDPIVNGTQEHTKVRLSVYGALGISQGIAVFGYSMAVSIGGILASRCLHVDLLHSILRSPMSFFERTPSGNLVNRFSKELDTVDSMIPEVIKMFMGSLFNVIGACIVILLATPIAAIIIPPLGLIYFFVQRFYVASSRQLKRLESVSRSPVYSHFNETLLGVSVIRAFEEQERFIHQSDLKVDENQKAYYPSIVANRWLAVRLECVGNCIVLFAALFAVISRHSLSAGLVGLSVSYSLQVTTYLNWLVRMSSEMETNIVAVERLKEYSETEKEAPWQIQETAPPSSWPQVGRVEFRNYCLRYREDLDFVLRHINVTINGGEKVGIVGRTGAGKSSLTLGLFRINESAEGEIIIDGINIAKIGLHDLRFKITIIPQDPVLFSGSLRMNLDPFSQYSDEEVWTSLELAHLKDFVSALPDKLDHECAEGGENLRVIVLDKGEIQEYGAPSDLLQQRGLFYSMAKDAGLV

SEQ ID NO: 19797 - protein, 820 aa, Artificial Sequence
  Synthetic polypeptide
SQHFGRPSITFSIPEGALVAVVGQVGCGKSSLLSALLAEMDKVEGHVAIKGSVAYVPQQAWIQNDSLRENILFGCQLEEPYYRSVIQACALLPDLEILPSGDRTEIGEKTRILVTHSMSYLPQVDVIIVMSGGKISEMGSYQELLARDGAFAEFLRTYASTEQEQDAEENGVTGVSGPGKEAKQMENGMLVTDSAGKQLQRQLSSSSSYSGDISRHHNSTAELQKAEAKKEETWKLMEADKAQTGQVKLSVYWDYMKAIGLFISFLSIFLFMCNHVSALASNYWLSLWTDDPIVNGTQEHTKVRLSVYGALGISQGIAVFGYSMAVSIGGILASRCLHVDLLHSILRSPMSFFERTPSGNLVNRFSKELDTVDSMIPEVIKMFMGSLFNVIGACIVILLATPIAAIIIPPLGLIYFFVQRFYVASSRQLKRLESVSRSPVYSHFNETLLGVSVIRAFEEQERFIHQSDLKVDENQKAYYPSIVANRWLAVRLECVGNCIVLFAALFAVISRHSLSAGLVGLSVSYSLQVTTYLNWLVRMSSEMETNIVAVERLKEYSETEKEAPWQIQETAPPSSWPQVGRVEFRNYCLRYREDLDFVLRHINVTINGGEKVGIVGRTGAGKSSLTLGLFRINESAEGEIIIDGINIAKIGLHDLRFKITIIPQDPVLFSGSLRMNLDPFSQYSDEEVWTSLELAHLKDFVSALPDKLDHECAEGGENLSVGQRQLVCLARALLRKTKILVLDEATAAVDLETDDLIQSTIRTQFEDCTVLTIAHRLNTIMDYTRVIVLDKGEIQEYGAPSDLLQQRGLFYSMAKDAGLV

SEQ ID NO: 19798 - protein, 59 aa, Artificial Sequence
  Synthetic polypeptide
NPSTLGGQASPSPSPKVLWWPWWARWAAESRPCSQPSWLRWTKWRGTWLSRRGSWSRTA

SEQ ID NO: 19799 - protein, 761 aa, Artificial Sequence
  Synthetic polypeptide
SQHFGRPSITFSIPEGALVAVVGQVGCGKSSLLSALLAEMDKVEGHVAIKTRILVTHSMSYLPQVDVIIVMSGGKISEMGSYQELLARDGAFAEFLRTYASTEQEQDAEENGVTGVSGPGKEAKQMENGMLVTDSAGKQLQRQLSSSSSYSGDISRHHNSTAELQKAEAKKEETWKLMEADKAQTGQVKLSVYWDYMKAIGLFISFLSIFLFMCNHVSALASNYWLSLWTDDPIVNGTQEHTKVRLSVYGALGISQGIAVFGYSMAVSIGGILASRCLHVDLLHSILRSPMSFFERTPSGNLVNRFSKELDTVDSMIPEVIKMFMGSLFNVIGACIVILLATPIAAIIIPPLGLIYFFVQRFYVASSRQLKRLESVSRSPVYSHFNETLLGVSVIRAFEEQERFIHQSDLKVDENQKAYYPSIVANRWLAVRLECVGNCIVLFAALFAVISRHSLSAGLVGLSVSYSLQVTTYLNWLVRMSSEMETNIVAVERLKEYSETEKEAPWQIQETAPPSSWPQVGRVEFRNYCLRYREDLDFVLRHINVTINGGEKVGIVGRTGAGKSSLTLGLFRINESAEGEIIIDGINIAKIGLHDLRFKITIIPQDPVLFSGSLRMNLDPFSQYSDEEVWTSLELAHLKDFVSALPDKLDHECAEGGENLSVGQRQLVCLARALLRKTKILVLDEATAAVDLETDDLIQSTIRTQFEDCTVLTIAHRLNTIMDYTRVIVLDKGEIQEYGAPSDLLQQRGLFYSMAKDAGLV

SEQ ID NO: 19800 - protein, 52 aa, Artificial Sequence
  Synthetic polypeptide
NPSTLGGQASPSPSPKVLWWPWWARWAAESRPCSQPSWLRWTKWRGTWLSRA

SEQ ID NO: 19801 - protein, 817 aa, Artificial Sequence
  Synthetic polypeptide
SQHFGRPSITFSIPEGALVAVVGQVGCGKSSLLSALLAEMDKVEGHVAIKGVNLSGGQKQRVSLARAVYSNADIYLFDDPLSAVDAHVGKHIFENVIGPKGMLKNKTRILVTHSMSYLPQVDVIIVMSGGKISEMGSYQELLARDGAFAEFLRTYASTEQEQDAEENGVTGVSGPGKEAKQMENGMLVTDSAGKQLQRQLSSSSSYSGDISRHHNSTAELQKAEAKKEETWKLMEADKAQTGQVKLSVYWDYMKAIGLFISFLSIFLFMCNHVSALASNYWLSLWTDDPIVNGTQEHTKVRLSVYGALGISQGIAVFGYSMAVSIGGILASRCLHVDLLHSILRSPMSFFERTPSGNLVNRFSKELDTVDSMIPEVIKMFMGSLFNVIGACIVILLATPIAAIIIPPLGLIYFFVQRFYVASSRQLKRLESVSRSPVYSHFNETLLGVSVIRAFEEQERFIHQSDLKVDENQKAYYPSIVANRWLAVRLECVGNCIVLFAALFAVISRHSLSAGLVGLSVSYSLQVTTYLNWLVRMSSEMETNIVAVERLKEYSETEKEAPWQIQETAPPSSWPQVGRVEFRNYCLRYREDLDFVLRHINVTINGGEKVGIVGRTGAGKSSLTLGLFRINESAEGEIIIDGINIAKIGLHDLRFKITIIPQDPVLFSGSLRMNLDPFSQYSDEEVWTSLELAHLKDFVSALPDKLDHECAEGGENLSVGQRQLVCLARALLRKTKILVLDEATAAVDLETDDLIQSTIRTQFEDCTVLTIAHRLNTIMDYTRVIVLDKGEIQEYGAPSDLLQQRGLFYSMAKDAGLV

SEQ ID NO: 19802 - protein, 886 aa, Artificial Sequence
  Synthetic polypeptide
SQHFGRPSITFSIPEGALVAVVGQVGCGKSSLLSALLAEMDKVEGHVAIKGSVAYVPQQAWIQNDSLRENILFGCQLEEPYYRSVIQACALLPDLEILPSGDRTEIGEKGVNLSGGQKQRVSLARAVYSNADIYLFDDPLSAVDAHVGKHIFENVIGPKGMLKNKTRILVTHSMSYLPQVDVIIVMSGGKISEMGSYQELLARDGAFAEFLRTYASTEQEQDAEENGSTVMDEEEAGVTGVSGPGKEAKQMENGMLVTDSAGKQLQRQLSSSSSYSGDISRHHNSTAELQKAEAKKEETWKLMEADKAQTGQVKLSVYWDYMKAIGLFISFLSIFLFMCNHVSALASNYWLSLWTDDPIVNGTQEHTKVRLSVYGALGISQGIAVFGYSMAVSIGGILASRCLHVDLLHSILRSPMSFFERTPSGNLVNRFSKELDTVDSMIPEVIKMFMGSLFNVIGACIVILLATPIAAIIIPPLGLIYFFVQRFYVASSRQLKRLESVSRSPVYSHFNETLLGVSVIRAFEEQERFIHQSDLKVDENQKAYYPSIVANRWLAVRLECVGNCIVLFAALFAVISRHSLSAGLVGLSVSYSLQVTTYLNWLVRMSSEMETNIVAVERLKEYSETEKEAPWQIQETAPPSSWPQVGRVEFRNYCLRYREDLDFVLRHINVTINGGEKVGIVGRTGAGKSSLTLGLFRINESAEGEIIIDGINIAKIGLHDLRFKITIIPQDPVLFSGSLRMNLDPFSQYSDEEVWTSLELAHLKDFVSALPDKLDHECAEGGENLSVGQRQLVCLARALLRKTKILVLDEATAAVDLETDDLIQSTIRTQFEDCTVLTIAHRLNTIMDYTRVIVLDKGEIQEYGAPSDLLQQRGLFYSMAKDAGLV

SEQ ID NO: 19803 - protein, 63 aa, Artificial Sequence
  Synthetic polypeptide
TTRSELQGPLRCTFLLVLPPRDTKISNLLCLFSVKMMRMKSSIMTHFHLTNRDCQTTPPFLGD

SEQ ID NO: 19804 - protein, 961 aa, Artificial Sequence
  Synthetic polypeptide
PTSTSQIGTVKQLLLFSETEGNPCFLDICGNFLVVGTDLAHFKSFDLSRREAKAHCSCRSLAELVPGVGGIASLRCSSSGSTISILPSKADNSPDSKICFYDVEMDTVTVFDFKTGQIDRRETLSFNEQETNKSHLFVDEGLKNYVPVNHFWDQSEPRLFVCEAVQETPRSQPQSANGQPQDGRAGPAADVLILSFFISEEHGFLLHESFPRPATSHSLLGMEVPYYYFTRKPEEADREDEVEPGCHHIPQMVSRRPLRDFVGLEDCDKATRDAMLHFSFFVTIGDMDEAFKSIKLIKSEAVWENMARMCVKTQRLDVAKVCLGNMGHARGARALREAEQEPELEARVAVLATQLGMLEDAEQLYRKCKRHDLLNKFYQAAGRWQEALQVAEHHDRVHLRSTYHRYAGHLEASADCSRALSYYEKSDTHRFEVPRMLSEDLPSLELYVNKMKDKTLWRWWAQYLESQGEMDAALHYYELARDHFSLVRIHCFQGNVQKAAQIANETGNLAASYHLARQYESQEEVGQAVHFYTRAQAFKNAIRLCKENGLDDQLMNLALLSSPEDMIEAARYYEEKGVQMDRAVMLYHKAGHFSKALELAFATQQFVALQLIAEDLDETSDPALLARCSDFFIEHSQYERAVELLLAARKYQEALQLCLGQNMSITEEMAEKMTVAKDSSDLPEESRRELLEQIADCCMRQGSYHLATKKYTQAGNKLKAMRALLKSGDTEKITFFASVSRQKEIYIMAANYLQSLDWRKEPEIMKNIIGFYTKGRALDLLAGFYDACAQVEIDEYQNYDKAHGALTEAYKCLAKAKAKSPLDQETRLAQLQSRMALVKRFIQARRTYTEDPKESIKQCELLLEEPDLDSTIRIGDVYGFLVEHYVRKEEYQTAYRFLEEMRRRLPLANMSYYVSPQAVDAVHRGLGLPLPRTVPEQVRHNSMEDARELDEEVVEEADDDP

SEQ ID NO: 19805 - protein, 6 aa, Artificial Sequence
  Synthetic polypeptide
ASKHHA

SEQ ID NO: 19806 - protein, 667 aa, Artificial Sequence
  Synthetic polypeptide
QVSIMHEDWCWKNKSLEVEVLEDDVSAVEFRQTGYMLRCSLSHAITLEFYQDGNGRENVGIYNLSKGVNRFCLSKPGVYKVTPRSCHRFEQAFYTYDTSSPSILTLTAIRHHVLGTITTDKMMDVTVTIKSSIDSEPALVLGPLKSVQELRREQQLAEIEARRQEREKNGNEEGEERMTKPPVQEMVDELQGPFSYDFSYWARSGEKITVTPSSKELLFYPPSMEAVVSGESCPGKLIEIHGKAGLFLEGQIHPELEGVEIVISEKGASSPLITVFTDDKGAYSVGPLHSDLEYTVTSQKEGYVLTAVEGTIGDFKAYALAGVSFEIKAEDDQPLPGVLLSLSGGLFRSNLLTQDNGILTFSNLSPGQYYFKPMMKEFRFEPSSQMIEVQEGQNLKITITGYRTAYSCYGTVSSLNGEPEQGVAMEAVGQNDCSIYGEDTVTDEEGKFRLRGLLPGCVYHVQLKAEGNDHIERALPHHRVIEVGNNDIDDVNIIVFRQINQFDLSGNVITSSEYLPTLWVKLYKSENLDNPIQTVSLGQSLFFHFPPLLRDGENYVVLLDSTLPRSQYDYILPQVSFTAVGYHKHITLIFNPTRKLPEQDIAQGSYIALPLTLLVLLAGYNHDKLIPLLLQLTSRLQGVGALGQAASDNSGPEDAKRQAKKQKTRRT

SEQ ID NO: 19807 - protein, 712 aa, Artificial Sequence
  Synthetic polypeptide
QVSIMHEDWCWKNKSLEVEVLEDDVSAVEFRQTGYMLRCSLSHAITLEFYQDGNGRENVGIYNLSKGVNRFCLSKPGVYKVTPRSCHRFEQAFYTYDTSSPSILTLTAIRHHVLGTITTDKMMDVTVTIKSSIDSEPALVLGPLKSVQELRREQQLAEIEARRQEREKNGNEEGEERMTKPPVQEMVDELQGPFSYDFSYWARSGEKITVTPSSKELLFYPPSMEAVVSGESCPGKLIEIHGKAGLFLEGQIHPELEGVEIVISEKGASSPLITVFTDDKGAYSVGPLHSDLEYTVTSQKEGYVLTAVEGTIGDFKAYALAGVSFEIKAEDDQPLPGVLLSLSGGLFRSNLLTQDNGILTFSNLSPGQYYFKPMMKEFRFEPSSQMIEVQEGQNLKITITGYRTAYSCYGTVSSLNGEPEQGVAMEAVGQNDCSIYGEDTVTDEEGKFRLRGLLPGCVYHVQLKAEGNDHIERALPHHRVIEVGNNDIDDVNIIVFRQINQFDLSGNVITSSEYLPTLWVKLYKSENLDNPIQTVSLGQSLFFHFPPLLRDGENYVVLLDSTLPRSQYDYILPQVSFTAVGYHKHITLIFNPTRKLPEQDIAQGSYIALPLTLLVLLAGYNHDKLIPLLLQLTSRLQGVGALGQAASDNSGPEDAKRQAKKQKTRRTLRLQEEFQLMWCLVPWRGTLGIHLFSSLPFASEILLETTATCIHY

SEQ ID NO: 19808 - protein, 90 aa, Artificial Sequence
  Synthetic polypeptide
GSARREGPSGVVRGLSPRLYHVSSFTKAKTSTIQSRQFPLASPCSSISPHCSEMARTMLCFWTPHSPDPSMTTSCLKFLSPQWATINTSP

SEQ ID NO: 19809 - protein, 55 aa, Artificial Sequence
  Synthetic polypeptide
VPGSTMCQALQKRKPRQSNPDSFPWPVPVLPFPPTAQRWRELCCASGLHTPQIPV

SEQ ID NO: 19810 - protein, 170 aa, Artificial Sequence
  Synthetic polypeptide
RQCKAGRTLRSRQGVESQALPCVKLYKSENLDNPIQTVSLGQSLFFHFPPLLRDGENYVVLLDSTLPRSQYDYILPQVSFTAVGYHKHITLIFNPTRKLPEQDIAQGSYIALPLTLLVLLAGYNHDKLIPLLLQLTSRLQGVGALGQAASDNSGPEDAKRQAKKQKTRRT

SEQ ID NO: 19811 - protein, 215 aa, Artificial Sequence
  Synthetic polypeptide
RQCKAGRTLRSRQGVESQALPCVKLYKSENLDNPIQTVSLGQSLFFHFPPLLRDGENYVVLLDSTLPRSQYDYILPQVSFTAVGYHKHITLIFNPTRKLPEQDIAQGSYIALPLTLLVLLAGYNHDKLIPLLLQLTSRLQGVGALGQAASDNSGPEDAKRQAKKQKTRRTLRLQEEFQLMWCLVPWRGTLGIHLFSSLPFASEILLETTATCIHY

SEQ ID NO: 19812 - protein, 34 aa, Artificial Sequence; identical to SEQ ID NO: 19752
  Synthetic polypeptide

SEQ ID NO: 19813 - protein, 114 aa, Artificial Sequence
  Synthetic polypeptide
GGPRSTQMTPQGCRTTTWSLICLTNKLQGKKNQQQMDRIPRKLPEQDIAQGSYIALPLTLLVLLAGYNHDKLIPLLLQLTSRLQGVGALGQAASDNSGPEDAKRQAKKQKTRRT

SEQ ID NO: 19814 - protein, 159 aa, Artificial Sequence
  Synthetic polypeptide
GGPRSTQMTPQGCRTTTWSLICLTNKLQGKKNQQQMDRIPRKLPEQDIAQGSYIALPLTLLVLLAGYNHDKLIPLLLQLTSRLQGVGALGQAASDNSGPEDAKRQAKKQKTRRTLRLQEEFQLMWCLVPWRGTLGIHLFSSLPFASEILLETTATCIHY

SEQ ID NO: 19815 - protein, 23 aa, Artificial Sequence
  Synthetic polypeptide
PGTVAHSCIPSTSGGQGQRRPVS

SEQ ID NO: 19816 - protein, 23 aa, Artificial Sequence
  Synthetic polypeptide
QAQWLTPVFLALREAKANADPSV

SEQ ID NO: 19817 - protein, 12 aa, Artificial Sequence
  Synthetic polypeptide
HFGRPRPTQTRQ

SEQ ID NO: 19818 - protein, 28 aa, Artificial Sequence
  Synthetic polypeptide
PGTVAHSCIPSTSGGQGQRRPVSDKLSA

SEQ ID NO: 19819 - protein, 453 aa, Artificial Sequence
  Synthetic polypeptide
QAQWLTPVFLALREAKANADPSVINCLHNLSRRIATVLQHEERRCQYLTREAKLILALQDEVSAMADGNEGPQSPFHHILPKCKLARDLKEAYDSLCTSGVVRLHINSWLEVSFCLPHKIHYAASSLIPPEAIERSLKAIRPYHALLLLSDEKSLLGELPIDCSPALVRVIKTTSAVKNLQQLAQDADLALLQVFQLAAHLVYWGKAIIIYPLCENNVYMLSPNASVCLYSPLAEQFSHQFPSHDLPSVLAKFSLPVSLSEFRNPLAPAVQETQLIQMVVWMLQRRLLIQLHTYVCLMASPSEEEPRPREDDVPFTARVGGRSLSTPNALSFGSPTSSDDMTLTSPSMDNSSAELLPSGDSPLNQRMTENLLASSEHERAAILSVPAAQNPEDLRMFARLLHYFRGRHHLEEIMYNENTRRSQLLMLFDKFRSVLVVTTHEDPVIAVFQALLP

SEQ ID NO: 19820 - protein, 73 aa, Artificial Sequence
  Synthetic polypeptide
QAQWLTPVFLALREAKANADPSVINCLHNLSRRIATVLQHEERRCQYLTREAKLILALQDEVSAMADACARRA

SEQ ID NO: 19821 - protein, 54 aa, Artificial Sequence
  Synthetic polypeptide
QAQWLTPVFLALREAKANADPSVINCLHNLSRRIATVLQHEERRCQYLTREAKL

SEQ ID NO: 19822 - protein, 74 aa, Artificial Sequence
  Synthetic polypeptide
GQAWWLMSVIPALWEAKQASSPQRRAGRCCRLPLGPTVALPCLAPACWMETRGTHLCPGPWLTLQRLWIPSWCA

SEQ ID NO: 19823 - protein, 52 aa, Artificial Sequence
  Synthetic polypeptide
SQHFGRPSKLHLPREEPEDVADSHWDQQWHFLAWPQLVGWKLAGLICVQVPG

SEQ ID NO: 19824 - protein, 119 aa, Artificial Sequence
  Synthetic polypeptide
PGVVAHVCNPSTLGGQASFISPEKSRKMLPTPIGTNSGTSLLGPSLLDGNSRDSFVSRSLADVAEVVDSQLVCMMNENSIDYISRFNDLAQELSIAEPGRREALFDGGGGGPAVSDLSQ

SEQ ID NO: 19825 - protein, 45 aa, Artificial Sequence
  Synthetic polypeptide
GNQGLRMIQSALTGMPRRGYSATLGVFWGPWMSRWVCRSGGRDLM

SEQ ID NO: 19826 - protein, 4 aa, Artificial Sequence
  Synthetic polypeptide
YSRH

SEQ ID NO: 19827 - protein, 229 aa, Artificial Sequence
  Synthetic polypeptide
AMRKSRLKNDTVGTDWDAKERLFRNFGGLLGPMDEPVGMQKWGKGPNVTVTVIWVDPVNVIAATYDILIESTAEFTHYKPPLNLPLRPGVWTVKILHHWVPVAETKFLVAPLTFSNRQPIKPEEALKLHNGPLRNAYMEQSFQSLNPVLSLPINPAQVEQARRNAASTGTALEGWLDSLVGGMWTAMDICATGPTACPVMQTCSQTAWSSFSPDPKSELGAVKPDGRLR

SEQ ID NO: 19828 - protein, 15 aa, Artificial Sequence
  Synthetic polypeptide
SSNSTVGYLPEKSRH

SEQ ID NO: 19829 - protein, 277 aa, Artificial Sequence
  Synthetic polypeptide
PKNNRCWHGCGEKGTLLCCWWDCKLGQPLWKTMWRFLKELQVVLPFDPAIPLWAIYQRKVGTDWDAKERLFRNFGGLLGPMDEPVGMQKWGKGPNVTVTVIWVDPVNVIAATYDILIESTAEFTHYKPPLNLPLRPGVWTVKILHHWVPVAETKFLVAPLTFSNRQPIKPEEALKLHNGPLRNAYMEQSFQSLNPVLSLPINPAQVEQARRNAASTGTALEGWLDSLVGGMWTAMDICATGPTACPVMQTCSQTAWSSFSPDPKSELGAVKPDGRLR

SEQ ID NO: 19830 - protein, 53 aa, Artificial Sequence
  Synthetic polypeptide
FYHLIQQFHCGLSTREKSALTGMPRRGYSATLGVFWGPWMSRWVCRSGGRDLM

SEQ ID NO: 19831 - protein, 33 aa, Artificial Sequence
  Synthetic polypeptide
LNGCNPGTWGGRGRWTTRSGDRDHPGQHGNGNC

SEQ ID NO: 19832 - protein, 86 aa, Artificial Sequence
  Synthetic polypeptide
AGCSDSTAVIPALGEAEAGGPRDQEIETILANTEMATADRKFGIHLPQPPEWTGALGTTSEGHEAPRRRIEQSFWKSRRSYSFQQA

SEQ ID NO: 19833 - protein, 227 aa, Artificial Sequence
  Synthetic polypeptide
SRHLGRPRQVDHEIRRSRPSWPTRKWQLLTGSLASTSPSLLSGQGPWAPLQRAMKPPGGESSNLFGSPEEATPSSRPNRMASNIFGPTEEPQNIPKRTNPPGGKGSGIFDESTPVQTRQHLNPPGGKTSDIFGSPVTATSRLAHPNKPKDHVFLCEGEEPKSDLKAARSIPAGAEPGEKGSARKAGPAKEQEPMPTVDSHEPRLGPRPRSHNKVLNPPGGKSSISFY

SEQ ID NO: 19834 - protein, 72 aa, Artificial Sequence
  Synthetic polypeptide
AGCSDSTAVIPALGEAEAGGPRDQEIETILANTEMATADRKFGIHLPQPPEWTGALGTTSEVGQHTLGFWGP

SEQ ID NO: 19835 - protein, 86 aa, Artificial Sequence
  Synthetic polypeptide
SRHLGRPRQVDHEIRRSRPSWPTRKWQLLTGSLASTSPSLLSGQGPWAPLQRSASTRLVSGGHEAPRRRIEQSFWKSRRSYSFQQA

SEQ ID NO: 19836 - protein, 107 aa, Artificial Sequence
  Synthetic polypeptide
SRHLGRPRQVDHEIRRSRPSWPTRKWQLLTGSLASTSPSLLSGQGPWAPLQRAMKPPGGESSNLFGSPEEATPSSRPNRMASNIFGPTEEPQNIPKRTNPPGSCFLM

SEQ ID NO: 19837 - protein, 18 aa, Artificial Sequence
  Synthetic polypeptide
KNNLPSFCLQNLLNFFPR

SEQ ID NO: 19838 - protein, 659 aa, Artificial Sequence
  Synthetic polypeptide
TFFLGKANKNVQWDEDSVEYMPANPVRIAFVLVVHGRASRQLQRMFKAIYHKDHFYYIHVDKRSNYLHRQVLQVSRQYSNVRVTPWRMATIWGGASLLSTYLQSMRDLLEMTDWPWDFFINLSAADYPIRTNDQLVAFLSRYRDMNFLKSHGRDNARFIRKQGLDRLFLECDAHMWRLGDRRIPEGIAVDGGSDWFLLNRRFVEYVTFSTDDLVTKMKQFYSYTLLPAESFFHTVLENSPHCDTMVDNNLRITNWNRKLGCKCQYKHIVDWCGCSPNDFKPQDFHRFQQTARPTFFARKFEAVVNQEIIGQLDYYLYGNYPAGTPGLRSYWENVYDEPDGIHSLSDVTLTLYHSFARLGLRRAETSLHTDGENSCRYYPMGHPASVHLYFLADRFQGFLIKHHATNLAVSKLETLETWVMPKKVFKIASPPSDFGRLQFSEVGTDWDAKERLFRNFGGLLGPMDEPVGMQKWGKGPNVTVTVIWVDPVNVIAATYDILIESTAEFTHYKPPLNLPLRPGVWTVKILHHWVPVAETKFLVAPLTFSNRQPIKPEEALKLHNGPLRNAYMEQSFQSLNPVLSLPINPAQVEQARRNAASTGTALEGWLDSLVGGMWTAMDICATGPTACPVMQTCSQTAWSSFSPDPKSELGAVKPDGRLR

SEQ ID NO: 19839 - protein, 656 aa, Artificial Sequence
  Synthetic polypeptide
DSKANKNVQWDEDSVEYMPANPVRIAFVLVVHGRASRQLQRMFKAIYHKDHFYYIHVDKRSNYLHRQVLQVSRQYSNVRVTPWRMATIWGGASLLSTYLQSMRDLLEMTDWPWDFFINLSAADYPIRTNDQLVAFLSRYRDMNFLKSHGRDNARFIRKQGLDRLFLECDAHMWRLGDRRIPEGIAVDGGSDWFLLNRRFVEYVTFSTDDLVTKMKQFYSYTLLPAESFFHTVLENSPHCDTMVDNNLRITNWNRKLGCKCQYKHIVDWCGCSPNDFKPQDFHRFQQTARPTFFARKFEAVVNQEIIGQLDYYLYGNYPAGTPGLRSYWENVYDEPDGIHSLSDVTLTLYHSFARLGLRRAETSLHTDGENSCRYYPMGHPASVHLYFLADRFQGFLIKHHATNLAVSKLETLETWVMPKKVFKIASPPSDFGRLQFSEVGTDWDAKERLFRNFGGLLGPMDEPVGMQKWGKGPNVTVTVIWVDPVNVIAATYDILIESTAEFTHYKPPLNLPLRPGVWTVKILHHWVPVAETKFLVAPLTFSNRQPIKPEEALKLHNGPLRNAYMEQSFQSLNPVLSLPINPAQVEQARRNAASTGTALEGWLDSLVGGMWTAMDICATGPTACPVMQTCSQTAWSSFSPDPKSELGAVKPDGRLR

SEQ ID NO: 19840 - protein, 148 aa, Artificial Sequence
  Synthetic polypeptide
ITGNSLGARRKAWNRFFLLSPQKKRTLPTPGSWTSSLRHYETVKPTRTCSGTRTPWSTCQPTRSESPLSWWSTAVPLGSCSACSRPSTTKTTSTTSTWTSALITCIGKCSRSPGSTAMSASPPGEWPPSGEEPASCPPTCRACGTSWR

SEQ ID NO: 19841 - protein, 36 aa, Artificial Sequence
  Synthetic polypeptide
EPEERHGIDSSFSALRRNEPCQRLDLGPPASGTMRQ

SEQ ID NO: 19842 - protein, 32 aa, Artificial Sequence
  Synthetic polypeptide
TQEAEVVGHEAPRRRIEQSFWKSRRSYSFQQA

SEQ ID NO: 19843 - protein, 209 aa, Artificial Sequence
  Synthetic polypeptide
KYKISWVWWRIPVILATWEAEAEELLEPRRRRLWAMKPPGGESSNLFGSPEEATPSSRPNRMASNIFGPTEEPQNIPKRTNPPGGKGSGIFDESTPVQTRQHLNPPGGKTSDIFGSPVTATSRLAHPNKPKDHVFLCEGEEPKSDLKAARSIPAGAEPGEKGSARKAGPAKEQEPMPTVDSHEPRLGPRPRSHNKVLNPPGGKSSISFY

SEQ ID NO: 19844 - protein, 20 aa, Artificial Sequence
  Synthetic polypeptide
LRGRLRQKNCLNPGGGGCGP

SEQ ID NO: 19845 - protein, 89 aa, Artificial Sequence
  Synthetic polypeptide
KYKISWVWWRIPVILATWEAEAEELLEPRRRRLWAMKPPGGESSNLFGSPEEATPSSRPNRMASNIFGPTEEPQNIPKRTNPPGSCFLM

SEQ ID NO: 19846 - protein, 209 aa, Artificial Sequence
  Synthetic polypeptide
KYKISWVWWRIPVILATWEAEAEELLEPRRRRLWAMKPPGGESSNLFGSPEEATPSSRPNRMASNIFGPTEEPQNIPKRTNPPGGKGSGIFDESTPVQTRQHLNPPGGKTSDIFGSPVTATSRLAHPNKPKDHVFLCEGEEPKSDLKAARSIPAGAEPEKSQLFRYTKEEEELWRPPSTKLYRTSGSNSQTSFQKRLETLGQEMKEFSS

SEQ ID NO: 19847 - protein, 59 aa, Artificial Sequence
  Synthetic polypeptide
KYKISWVWWRIPVILATWEAEAEELLEPRRRRLWAMKPPGGESSNLFGSPEEATPSSRP

SEQ ID NO: 19848 - protein, 183 aa, Artificial Sequence
  Synthetic polypeptide
SQHFGTPRAMKPPGGESSNLFGSPEEATPSSRPNRMASNIFGPTEEPQNIPKRTNPPGGKGSGIFDESTPVQTRQHLNPPGGKTSDIFGSPVTATSRLAHPNKPKDHVFLCEGEEPKSDLKAARSIPAGAEPGEKGSARKAGPAKEQEPMPTVDSHEPRLGPRPRSHNKVLNPPGGKSSISFY

SEQ ID NO: 19849 - protein, 18 aa, Artificial Sequence
  Synthetic polypeptide
MGMVAHTCNHSTLGRQGP

SEQ ID NO: 19850 - protein, 41 aa, Artificial Sequence
  Synthetic polypeptide
WVWWLIPVITALWDAKGHEAPRRRIEQSFWKSRRSYSFQQA

SEQ ID NO: 19851 - protein, 63 aa, Artificial Sequence
  Synthetic polypeptide
SQHFGTPRAMKPPGGESSNLFGSPEEATPSSRPNRMASNIFGPTEEPQNIPKRTNPPGSCFLM

SEQ ID NO: 19852 - protein, 183 aa, Artificial Sequence
  Synthetic polypeptide
SQHFGTPRAMKPPGGESSNLFGSPEEATPSSRPNRMASNIFGPTEEPQNIPKRTNPPGGKGSGIFDESTPVQTRQHLNPPGGKTSDIFGSPVTATSRLAHPNKPKDHVFLCEGEEPKSDLKAARSIPAGAEPEKSQLFRYTKEEEELWRPPSTKLYRTSGSNSQTSFQKRLETLGQEMKEFSS

SEQ ID NO: 19853 - protein, 33 aa, Artificial Sequence
  Synthetic polypeptide
SQHFGTPRAMKPPGGESSNLFGSPEEATPSSRP

SEQ ID NO: 19854 - protein, 854 aa, Artificial Sequence
  Synthetic polypeptide
LSPSAVIVRPRQPPGTDPHPSPLITLETQDGYFSHRPKEKVRTDSNNENSVPKDFENVDNSNFAPRTQKQKHQPELAKKPPSRQKELLKRKLEQQEKGKGHTFPGKGPGEVLPPGDRAAANSSHGKDVSRPPHARKTGGSSPETKYDQPPKCDISGKEAISALSRAKSKHCRQEIGETYCRHKLGLLMPEKVTRFCPLEGKANKNVQWDEDSVEYMPANPVRIAFVLVVHGRASRQLQRMFKAIYHKDHFYYIHVDKRSNYLHRQVLQVSRQYSNVRVTPWRMATIWGGASLLSTYLQSMRDLLEMTDWPWDFFINLSAADYPIRTNDQLVAFLSRYRDMNFLKSHGRDNARFIRKQGLDRLFLECDAHMWRLGDRRIPEGIAVDGGSDWFLLNRRFVEYVTFSTDDLVTKMKQFYSYTLLPAESFFHTVLENSPHCDTMVDNNLRITNWNRKLGCKCQYKHIVDWCGCSPNDFKPQDFHRFQQTARPTFFARKFEAVVNQEIIGQLDYYLYGNYPAGTPGLRSYWENVYDEPDGIHSLSDVTLTLYHSFARLGLRRAETSLHTDGENSCRYYPMGHPASVHLYFLADRFQGFLIKHHATNLAVSKLETLETWVMPKKVFKIASPPSDFGRLQFSEVGTDWDAKERLFRNFGGLLGPMDEPVGMQKWGKGPNVTVTVIWVDPVNVIAATYDILIESTAEFTHYKPPLNLPLRPGVWTVKILHHWVPVAETKFLVAPLTFSNRQPIKPEEALKLHNGPLRNAYMEQSFQSLNPVLSLPINPAQVEQARRNAASTGTALEGWLDSLVGGMWTAMDICATGPTACPVMQTCSQTAWSSFSPDPKSELGAVKPDGRLR

SEQ ID NO: 19855 - protein, 79 aa, Artificial Sequence
  Synthetic polypeptide
GLASHLELIHTQVRSSPWRLRMATFLIGRKRKCEQTATTRTLSPKTLRMSTTATSHPGLKSRSTSLSWRRSHRVDRRSF

SEQ ID NO: 19856 - protein, 1147 aa, Artificial Sequence
  Synthetic polypeptide
RGGGTRGAAGWRKERPTSLNVFPLADGTVRAQIGGKLVPAGDHWHLSDLGQLQSSSSYQCPQDEMSESGQSSAAATPSTTGTKSNTPTSSVPSAAVTPLNESLQPLGDYGVGSKNSKRAREKRDSRNMEVQVTQEMRNVSIGMGSSDEWSDVQDIIDSTPELDMCPETRLDRTGSSPTQGIVNKAFGINTDSLYHELSTAGSEVIGDVDEGADLLGEFSVRDDFFGMGKEVGNLLLENSQLLETKNALNVVKNDLIAKVDQLSGEQEVLRGELEAAKQAKVKLENRIKELEEELKRVKSEAIIARREPKEEAEDVSSYLCTESDKIPMAQRRRFTRVEMARVLMERNQYKERLMELQEAVRWTEMIRASREHPSVQEKKKSTIWQFFSRLFSSSSSPPPAKRPYPSVNIHYKSPTTAGFSQRRNHAMCPISAGSRPLEFFPDDDCTSSARREQKREQYRQVREHVRNDDGRLQACGWSLPAKYKQLSPNGGQEDTRMKNVPVPVYCRPLVEKDPTMKLWCAAGVNLSGWRPNEDDAGNGVKPAPGRDPLTCDREGDGEPKSAHTSPEKKKAKELPEMDATSSRVWILTSTLTTSKVVIIDANQPGTVVDQFTVCNAHVLCISSIPAASDSDYPPGEMFLDSDVNPEDPGADGVLAGITLVGCATRCNVPRSNCSSRGDTPVLDKGQGEVATIANGKVNPSQSTEEATEATEVPDPGPSEPETATLRPGPLTEHVFTDPAPTPSSGPQPGSENGPEPDSSSTRPEPEPSGDPTGAGSSAAPTMWLGAQNGWLYVHSAVANWKKCLHSIKLKDSVLSLVHVKGRVLVALADGTLAIFHRGEDGQWDLSNYHLMDLGHPHHSIRCMAVVYDRVWCGYKNKVHVIQPKTMQIEKSFDAHPRRESQVRQLAWIGDGVWVSIRLDSTLRLYHAHTHQHLQDVDIEPYVSKMLGTGKLGFSFVRITALLVAGSRLWVGTGNGVVISIPLTETVVLHRGQLLGLRANKTSPTSGEGARPGGIIHVYGDDSSDRAASSFIPYCSMAQAQLCFHGHRDAVKFFVSVPGNVLATLNGSVLDSPAEGPGPAAPASEVEGQKLRNVLVLSGGEGYIDFRIGDGEDDETEEGAGDMSQVKPVLSKAERSHIIVWQVSYTPE

SEQ ID NO: 19857 - protein, 18 aa, Artificial Sequence
  Synthetic polypeptide
GAEVRGARRGGGRSAPPP

SEQ ID NO: 19858 - protein, 24 aa, Artificial Sequence
  Synthetic polypeptide
GRRYAGRGGVEEGAPHLPERVPPG

SEQ ID NO: 19859 - protein, 1141 aa, Artificial Sequence
  Synthetic polypeptide
RGGGTRGAAGWRKERPTSLNVFPLADGTVRAQIGGKLVPAGDHWHLSDLGQLQSSSSYQCPQDEMSESGQSSAAATPSTTGTKSNTPTSSVPSAAVTPLNESLQPLGDYGVGSKNSKRAREKRDSRNMEVQVTQEMRNVSIGMGSSDEWSDVQDIIDSTPELDMCPETRLDRTGSSPTQGIVNKAFGINTDSLYHELSTAGSEVIGDVDEGADLLGEFSGMGKEVGNLLLENSQLLETKNALNVVKNDLIAKVDQLSGEQEVLRGELEAAKQAKVKLENRIKELEEELKRVKSEAIIARREPKEEAEDVSSYLCTESDKIPMAQRRRFTRVEMARVLMERNQYKERLMELQEAVRWTEMIRASREHPSVQEKKKSTIWQFFSRLFSSSSSPPPAKRPYPSVNIHYKSPTTAGFSQRRNHAMCPISAGSRPLEFFPDDDCTSSARREQKREQYRQVREHVRNDDGRLQACGWSLPAKYKQLSPNGGQEDTRMKNVPVPVYCRPLVEKDPTMKLWCAAGVNLSGWRPNEDDAGNGVKPAPGRDPLTCDREGDGEPKSAHTSPEKKKAKELPEMDATSSRVWILTSTLTTSKVVIIDANQPGTVVDQFTVCNAHVLCISSIPAASDSDYPPGEMFLDSDVNPEDPGADGVLAGITLVGCATRCNVPRSNCSSRGDTPVLDKGQGEVATIANGKVNPSQSTEEATEATEVPDPGPSEPETATLRPGPLTEHVFTDPAPTPSSGPQPGSENGPEPDSSSTRPEPEPSGDPTGAGSSAAPTMWLGAQNGWLYVHSAVANWKKCLHSIKLKDSVLSLVHVKGRVLVALADGTLAIFHRGEDGQWDLSNYHLMDLGHPHHSIRCMAVVYDRVWCGYKNKVHVIQPKTMQIEKSFDAHPRRESQVRQLAWIGDGVWVSIRLDSTLRLYHAHTHQHLQDVDIEPYVSKMLGTGKLGFSFVRITALLVAGSRLWVGTGNGVVISIPLTETVVLHRGQLLGLRANKTSPTSGEGARPGGIIHVYGDDSSDRAASSFIPYCSMAQAQLCFHGHRDAVKFFVSVPGNVLATLNGSVLDSPAEGPGPAAPASEVEGQKLRNVLVLSGGEGYIDFRIGDGEDDETEEGAGDMSQVKPVLSKAERSHIIVWQVSYTPE

SEQ ID NO: 19860 - protein, 90 aa, Artificial Sequence; identical to SEQ ID NO: 19808
  Synthetic polypeptide

SEQ ID NO: 19861 - protein, 55 aa, Artificial Sequence; identical to SEQ ID NO: 19809
  Synthetic polypeptide

SEQ ID NO: 19862 - protein, 170 aa, Artificial Sequence; identical to SEQ ID NO: 19810
  Synthetic polypeptide

SEQ ID NO: 19863 - protein, 215 aa, Artificial Sequence; identical to SEQ ID NO: 19811
  Synthetic polypeptide

SEQ ID NO: 19864 - protein, 33 aa, Artificial Sequence
  Synthetic polypeptide
NISPVRAGAMVMTPKAQPCVCHIAGILSGWKWA

SEQ ID NO: 19865 - protein, 621 aa, Artificial Sequence
  Synthetic polypeptide
QEFYQDGNGRENVGIYNLSKGVNRFCLSKPGVYKVTPRSCHRFEQAFYTYDTSSPSILTLTAIRHHVLGTITTDKMMDVTVTIKSSIDSEPALVLGPLKSVQELRREQQLAEIEARRQEREKNGNEEGEERMTKPPVQEMVDELQGPFSYDFSYWARSGEKITVTPSSKELLFYPPSMEAVVSGESCPGKLIEIHGKAGLFLEGQIHPELEGVEIVISEKGASSPLITVFTDDKGAYSVGPLHSDLEYTVTSQKEGYVLTAVEGTIGDFKAYALAGVSFEIKAEDDQPLPGVLLSLSGGLFRSNLLTQDNGILTFSNLSPGQYYFKPMMKEFRFEPSSQMIEVQEGQNLKITITGYRTAYSCYGTVSSLNGEPEQGVAMEAVGQNDCSIYGEDTVTDEEGKFRLRGLLPGCVYHVQLKAEGNDHIERALPHHRVIEVGNNDIDDVNIIVFRQINQFDLSGNVITSSEYLPTLWVKLYKSENLDNPIQTVSLGQSLFFHFPPLLRDGENYVVLLDSTLPRSQYDYILPQVSFTAVGYHKHITLIFNPTRKLPEQDIAQGSYIALPLTLLVLLAGYNHDKLIPLLLQLTSRLQGVGALGQAASDNSGPEDAKRQAKKQKTRRT

SEQ ID NO: 19866 - protein, 64 aa, Artificial Sequence
  Synthetic polypeptide
FCLPVLEHKPCESRSHGHDSQGPALCLSHSRNFIRMEMGVRMWGFITSPKESTDSACPSLVCTK

SEQ ID NO: 19867 - protein, 666 aa, Artificial Sequence
  Synthetic polypeptide
QEFYQDGNGRENVGIYNLSKGVNRFCLSKPGVYKVTPRSCHRFEQAFYTYDTSSPSILTLTAIRHHVLGTITTDKMMDVTVTIKSSIDSEPALVLGPLKSVQELRREQQLAEIEARRQEREKNGNEEGEERMTKPPVQEMVDELQGPFSYDFSYWARSGEKITVTPSSKELLFYPPSMEAVVSGESCPGKLIEIHGKAGLFLEGQIHPELEGVEIVISEKGASSPLITVFTDDKGAYSVGPLHSDLEYTVTSQKEGYVLTAVEGTIGDFKAYALAGVSFEIKAEDDQPLPGVLLSLSGGLFRSNLLTQDNGILTFSNLSPGQYYFKPMMKEFRFEPSSQMIEVQEGQNLKITITGYRTAYSCYGTVSSLNGEPEQGVAMEAVGQNDCSIYGEDTVTDEEGKFRLRGLLPGCVYHVQLKAEGNDHIERALPHHRVIEVGNNDIDDVNIIVFRQINQFDLSGNVITSSEYLPTLWVKLYKSENLDNPIQTVSLGQSLFFHFPPLLRDGENYVVLLDSTLPRSQYDYILPQVSFTAVGYHKHITLIFNPTRKLPEQDIAQGSYIALPLTLLVLLAGYNHDKLIPLLLQLTSRLQGVGALGQAASDNSGPEDAKRQAKKQKTRRTLRLQEEFQLMWCLVPWRGTLGIHLFSSLPFASEILLETTATCIHY

SEQ ID NO: 19868 - protein, 35 aa, Artificial Sequence
  Synthetic polypeptide
QEFYQDGNGRENVGIYNLSKGVNRFCLSKPGVYKV

SEQ ID NO: 19869 - protein, 10 aa, Artificial Sequence
  Synthetic polypeptide
KELQKNKHHA

SEQ ID NO: 19870 - protein, 714 aa, Artificial Sequence
  Synthetic polypeptide
FISVVSLEYSLAHLFMDSLWLLVCNSGQVEWLRLTKHVACKTEKSYRKISIMHEDWCWKNKSLEVEVLEDDVSAVEFRQTGYMLRCSLSHAITLEFYQDGNGRENVGIYNLSKGVNRFCLSKPGVYKVTPRSCHRFEQAFYTYDTSSPSILTLTAIRHHVLGTITTDKMMDVTVTIKSSIDSEPALVLGPLKSVQELRREQQLAEIEARRQEREKNGNEEGEERMTKPPVQEMVDELQGPFSYDFSYWARSGEKITVTPSSKELLFYPPSMEAVVSGESCPGKLIEIHGKAGLFLEGQIHPELEGVEIVISEKGASSPLITVFTDDKGAYSVGPLHSDLEYTVTSQKEGYVLTAVEGTIGDFKAYALAGVSFEIKAEDDQPLPGVLLSLSGGLFRSNLLTQDNGILTFSNLSPGQYYFKPMMKEFRFEPSSQMIEVQEGQNLKITITGYRTAYSCYGTVSSLNGEPEQGVAMEAVGQNDCSIYGEDTVTDEEGKFRLRGLLPGCVYHVQLKAEGNDHIERALPHHRVIEVGNNDIDDVNIIVFRQINQFDLSGNVITSSEYLPTLWVKLYKSENLDNPIQTVSLGQSLFFHFPPLLRDGENYVVLLDSTLPRSQYDYILPQVSFTAVGYHKHITLIFNPTRKLPEQDIAQGSYIALPLTLLVLLAGYNHDKLIPLLLQLTSRLQGVGALGQAASDNSGPEDAKRQAKKQKTRRT

SEQ ID NO: 19871 - protein, 759 aa, Artificial Sequence
  Synthetic polypeptide
FISVVSLEYSLAHLFMDSLWLLVCNSGQVEWLRLTKHVACKTEKSYRKISIMHEDWCWKNKSLEVEVLEDDVSAVEFRQTGYMLRCSLSHAITLEFYQDGNGRENVGIYNLSKGVNRFCLSKPGVYKVTPRSCHRFEQAFYTYDTSSPSILTLTAIRHHVLGTITTDKMMDVTVTIKSSIDSEPALVLGPLKSVQELRREQQLAEIEARRQEREKNGNEEGEERMTKPPVQEMVDELQGPFSYDFSYWARSGEKITVTPSSKELLFYPPSMEAVVSGESCPGKLIEIHGKAGLFLEGQIHPELEGVEIVISEKGASSPLITVFTDDKGAYSVGPLHSDLEYTVTSQKEGYVLTAVEGTIGDFKAYALAGVSFEIKAEDDQPLPGVLLSLSGGLFRSNLLTQDNGILTFSNLSPGQYYFKPMMKEFRFEPSSQMIEVQEGQNLKITITGYRTAYSCYGTVSSLNGEPEQGVAMEAVGQNDCSIYGEDTVTDEEGKFRLRGLLPGCVYHVQLKAEGNDHIERALPHHRVIEVGNNDIDDVNIIVFRQINQFDLSGNVITSSEYLPTLWVKLYKSENLDNPIQTVSLGQSLFFHFPPLLRDGENYVVLLDSTLPRSQYDYILPQVSFTAVGYHKHITLIFNPTRKLPEQDIAQGSYIALPLTLLVLLAGYNHDKLIPLLLQLTSRLQGVGALGQAASDNSGPEDAKRQAKKQKTRRTLRLQEEFQLMWCLVPWRGTLGIHLFSSLPFASEILLETTATCIHY

SEQ ID NO: 19872 - protein, 147 aa, Artificial Sequence
  Synthetic polypeptide
FISVVSLEYSLAHLFMDSLWLLVCNSGQVEWLRLTKHVACKTEKSYRKISIMHEDWCWKNKSLEVEVLEDDVSAVEFRQTGYMLRCSLSHAITLAQPYCSGEMCPGTSELKTPRNFIRMEMGVRMWGFITSPKESTDSACPSLVCTK

SEQ ID NO: 19873 - protein, 6 aa, Artificial Sequence
  Synthetic polypeptide
ASKHHA

SEQ ID NO: 19874 - protein, 667 aa, Artificial Sequence; identical to SEQ ID NO: 19806
  Synthetic polypeptide

SEQ ID NO: 19875 - protein, 712 aa, Artificial Sequence; identical to SEQ ID NO: 19807
  Synthetic polypeptide

SEQ ID NO: 19876 - protein, 100 aa, Artificial Sequence
  Synthetic polypeptide
QVSIMHEDWCWKNKSLEVEVLEDDVSAVEFRQTGYMLRCSLSHAITLAQPYCSGEMCPGTSELKTPRNFIRMEMGVRMWGFITSPKESTDSACPSLVCTK

SEQ ID NO: 19877 - protein, 31 aa, Artificial Sequence
  Synthetic polypeptide
SEFKPLFFCFKAMRSWASHSLDFFIRKISLY

SEQ ID NO: 19878 - protein, 27 aa, Artificial Sequence
  Synthetic polypeptide
DLGQVTALISSSVKFHCTDNLSWHHGP

SEQ ID NO: 19879 - protein, 18 aa, Artificial Sequence
  Synthetic polypeptide
DLGQVTALISSSVKFHCT

SEQ ID NO: 19880 - protein, 431 aa, Artificial Sequence
  Synthetic polypeptide
GQAWWFMPIIPALWEAEEKLAALESSIEQRLKWAGGANPALAPVLQDFEATIAERRNLVLKESQRASQVTFLCSNIIHFESLRTRTAEALNLDAALFELIKRCQQMCSFASQFNSSVSELELRLLQRVDTGLEHPIGSSEWLLSAHKQLTQDMSTQRAIQTEKEQQIETVCETIQNLVDNIKTVLTGHNRQLGDVKHLLKAMAKDEEAALADGEDVPYENSVRQFLGEYKSWQDNIQTVLFTLVQAMGQVRSQEHVEMLQEITPTLKELKTQSQSIYNNLVSFASPLVTDATNECSSPTSSATYQPSFAAAVRSNTGQKTQPDVMSQNARKLIQKNLATSADTPPSTVPGTGKSVACSPKKAVRDPKTGKAVQERNSYAVSVWKRVKAKLEGRDVDPNRRMSVAEQVDYVIKEATNLDNLAQLYEGWTAWV

SEQ ID NO: 19881 - protein, 10 aa, Artificial Sequence
  Synthetic polypeptide
SQHFGRPRRS

SEQ ID NO: 19882 - protein, 22 aa, Artificial Sequence
  Synthetic polypeptide
PGMVVHAYNPSTLGGRGEASCT

SEQ ID NO: 19883 - protein, 1987 aa, Artificial Sequence
  Synthetic polypeptide
EAEAGGSPEDEDITLQITESEDNEEDDMVDVIWRQLISSCPWLSELDESATEGVIKVWRKVVDRIFSLYKLSCSAYFTFLKLNAGQIPLDEDDPRLHLSHRVEQSTDDMIVMATLRLLRLLVKHAGELRQYLEHGLETTPTAPWRGIIPQLFSRLNHPEVYVRQSICNLLCRVAQDSPHLILYPAIVGTISLSSESQASGNKFSTAIPTLLGNIQGEELLVSECEGGSPPASQDSNKDEPKSGLNEDQAMMQDCYSKIVDKLSSANPTMVLQVQMLVAELRRVTVLWDELWLGVLLQQHMYVLRRIQQLEDEVKRVQNNNTLRKEEKIAIMREKHTALMKPIVFALEHVRSITAAPAETPHEKWFQDNYGDAIENALEKLKTPLNPAKPGSSWIPFKEIMLSLQQRAQKRASYILRLEEISPWLAAMTNTEIALPGEVSARDTVTIHSVGGTITILPTKTKPKKLLFLGSDGKSYPYLFKGLEDLHLDERIMQFLSIVNTMFATINRQETPRFHARHYSVTPLGTRSGLIQWVDGATPLFGLYKRWQQREAALQAQKAQDSYQTPQNPGIVPRPSELYYSKIGPALKTVGLSLDVSRRDWPLHVMKAVLEELMEATPPNLLAKELWSSCTTPDEWWRVTQSYARSTAVMSMVGYIIGLGDRHLDNVLIDMTTGEVVHIDYNVCFEKGKSLRVPEKVPFRMTQNIETALGVTGVEGVFRLSCEQVLHIMRRGRETLLTLLEAFVYDPLVDWTAGGEAGFAGAVYGGGGQQAESKQSKREMEREITRSLFSSRVAEIKVNWFKNRDEMLVVLPKLDGSLDEYLSLQEQLTDVEKLQGKLLEEIEFLEGAEGVDHPSHTLQHRYSEHTQLQTQQRAVQEAIQVKLNEFEQWITHYQAAFNNLEATQLASLLQEISTQMDLGPPSYVPATAFLQNAGQAHLISQCEQLEGEVGALLQQRRSVLRGCLEQLHHYATVALQYPKAIFQKHRIEQWKTWMEELICNTTVERCQELYRKYEMQYAPQPPPTVCQFITATEMTLQRYAADINSRLIRQVERLKQEAVTVPVCEDQLKEIERCIKVFLHENGEEGSLSLASVIISALCTLTRRNLMMEGAASSAGEQLVDLTSRDGAWFLEELCSMSGNVTCLVQLLKQCHLVPQDLDIPNPMEASETVHLANGVYTSLQELNSNFRQIIFPEALRCLMKGEYTLESMLHELDGLIEQTTDGVPLQTLVESLQAYLRNAAMGLEEETHAHYIDVARLLHAQYGELIQPRNGSVDETPKMSAGQMLLVAFDGMFAQVETAFSLLVEKLNKMEIPIAWRKIDIIREARSTQVNFFDDDNHRQVLEEIFFLKRLQTIKEFFRLCGTFSKTLSGSSSLEDQNTVNGPVQIVNVKTLFRNSCFSEDQMAKPIKAFTADFVRQLLIGLPNQALGLTLCSFISALGVDIIAQVEAKDFGAESKVSVDDLCKKAVEHNIQIGKFSQLVMNRATVLASSYDTAWKKHDLVRRLETSISSCKTSLQRVQLHIAMFQQWQHEDLLINRPQAMSVTPPPRSAILTSMKKKLHTLSQIETSIATVQEKLAALESSIEQRLKWAGGANPALAPVLQDFEATIAERRNLVLKESQRASQVTFLCSNIIHFESLRTRTAEALNLDAALFELIKRCQQMCSFASQFNSSVSELELRLLQRVDTGLEHPIGSSEWLLSAHKQLTQDMSTQRAIQTEKEQQIETVCETIQNLVDNIKTVLTGHNRQLGDVKHLLKAMAKDEEAALADGEDVPYENSVRQFLGEYKSWQDNIQTVLFTLVQAMGQVRSQEHVEMLQEITPTLKELKTQSQSIYNNLVSFASPLVTDATNECSSPTSSATYQPSFAAAVRSNTGQKTQPDVMSQNARKLIQKNLATSADTPPSTVPGTGKSVACSPKKAVRDPKTGKAVQERNSYAVSVWKRVKAKLEGRDVDPNRRMSVAEQVDYVIKEATNLDNLAQLYEGWTAWV

SEQ ID NO: 19884 - protein, 17 aa, Artificial Sequence
  Synthetic polypeptide
FQHFEKPRQADHLRMKI

SEQ ID NO: 19885 - protein, 1986 aa, Artificial Sequence
  Synthetic polypeptide
EAEAGGSPEDEDITLQITESEDNEEDDMVDVIWRQLISSCPWLSELDESATEGVIKVWRKVVDRIFSLYKLSCSAYFTFLKLNAGQIPLDEDDPRLHLSHRVEQSTDDMIVMATLRLLRLLVKHAGELRQYLEHGLETTPTAPWRGIIPQLFSRLNHPEVYVRQSICNLLCRVAQDSPHLILYPAIVGTISLSSESQASGNKFSTAIPTLLGNIQGEELLVSECEGGSPPASQDSNKDEPKSGLNEDQAMMQDCYSKIVDKLSSANPTMVLQVQMLVAELRRVTVLWDELWLGVLLQQHMYVLRRIQQLEDEVKRVQNNNTLRKEEKIAIMREKHTALMKPIVFALEHVRSITAAPAETPHEKWFQDNYGDAIENALEKLKTPLNPAKPGSSWIPFKEIMLSLQQRAQKRASYILRLEEISPWLAAMTNTEIALPGEVSARDTVTIHSVGGTITILPTKTKPKKLLFLGSDGKSYPYLFKGLEDLHLDERIMQFLSIVNTMFATINRQETPRFHARHYSVTPLGTRSGLIQWVDGATPLFGLYKRWQQREAALQAQKAQDSYQTPQNPGIVPRPSELYYSKIGPALKTVGLSLDVSRRDWPLHVMKAVLEELMEATPPNLLAKELWSSCTTPDEWWRVTQSYARSTAVMSMVGYIIGLGDRHLDNVLIDMTTGEVVHIDYNVCFEKGKSLRVPEKVPFRMTQNIETALGVTGVEGVFRLSCEQVLHIMRRGRETLLTLLEAFVYDPLVDWTAGGEAGFAGAVYGGGGQQAESKQSKREMEREITRSLFSSRVAEIKVNWFKNRDEMLVVLPKLDGSLDEYLSLQEQLTDVEKLQGKLLEEIEFLEGAEGVDHPSHTLQHRYSEHTQLQTQQRAVQEAIQVKLNEFEQWITHYQAAFNNLEATQLASLLQEISTQMDLGPPSYVPATAFLQNAGQAHLISQCEQLEGEVGALLQQRRSVLRGCLEQLHHYATVALQYPKAIFQKHRIEQWKTWMEELICNTTVERCQELYRKYEMQYAPQPPPTVCQFITATEMTLQRYAADINSRLIRQVERLKQEAVTVPVCEDQLKEIERCIKVFLHENGEEGSLSLASVIISALCTLTRRNLMMEGAASSAGEQLVDLTSRDGAWFLEELCSMSGNVTCLVQLLKQCHLVPQDLDIPNPMEASETVHLANGVYTSLQELNSNFRQIIFPEALRCLMKGEYTLESMLHELDGLIEQTTDGVPLQTLVESLQAYLRNAAMGLEEETHAHYIDVARLLHAQYGELIQPRNGSVDETPKMSAGQMLLVAFDGMFAQVETAFSLLVEKLNKMEIPIAWRKIDIIREARSTQVNFFDDDNHRQVLEEIFFLKRLQTIKEFFRLCGTFSKTLSGSSSLEDQNTVNGPVQIVNVKTLFRNSCFSEDQMAKPIKAFTADFVRQLLIGLPNQALGLTLCSFISALGVDIIAQVEAKDFGAESKVSVDDLCKKAVEHNIQIGKFSQLVMNRATVLASSYDTAWKKHDLVRRLETSISSCKTSLQRVQLHIAMFQWQHEDLLINRPQAMSVTPPPRSAILTSMKKKLHTLSQIETSIATVQEKLAALESSIEQRLKWAGGANPALAPVLQDFEATIAERRNLVLKESQRASQVTFLCSNIIHFESLRTRTAEALNLDAALFELIKRCQQMCSFASQFNSSVSELELRLLQRVDTGLEHPIGSSEWLLSAHKQLTQDMSTQRAIQTEKEQQIETVCETIQNLVDNIKTVLTGHNRQLGDVKHLLKAMAKDEEAALADGEDVPYENSVRQFLGEYKSWQDNIQTVLFTLVQAMGQVRSQEHVEMLQEITPTLKELKTQSQSIYNNLVSFASPLVTDATNECSSPTSSATYQPSFAAAVRSNTGQKTQPDVMSQNARKLIQKNLATSADTPPSTVPGTGKSVACSPKKAVRDPKTGKAVQERNSYAVSVWKRVKAKLEGRDVDPNRRMSVAEQVDYVIKEATNLDNLAQLYEGWTAWV

SEQ ID NO: 19886 - protein, 753 aa, Artificial Sequence
  Synthetic polypeptide
TNLKPNSALSVYCCGTFENLSLDSSCFSSPPVNFLQELPSYRSIARRRTTVHSRDKQSGTLLKPTDSYSSQLEDRIAENLSSHSLRNYALNISEKRRLRDIQETQMKYLSEWDQWKRYSSKSWKRFLEKAREMTTHLELWREDIRSIEGKFGTGIQSYFSFLRFLVLLNLVIFLIIFMLVLLPVLLTKYKITNSSFVLIPFKDMDKQCTVYPVSSSGLIYFYSYIIDLLSGTGFLEETSLFYGHYTIDGVKFQNFTYDLPLAYLLSTIASLALSLLWIVKRSVEGFKINLIRSEEHFQSYCNKIFAGWDFCITNRSMADLKHSSLRYELRADLEEERMRQKIAERTSEETIRIYSLRLFLNCIVLAVLGACFYAIYVATVFSQEHMKKEIDKMVFGENLFILYLPSIVITLANFITPMIFAKIIRYEDYSPGFEIRLTILRCVFMRLATICVLVFTLGSKITSCDDDTCDLCGYNQKLYPCWETQVGQEMYKLMIFDFIIILAVTLFVDFPRKLLVTYCSSCKLIQCWGQQEFAIPDNVLGIVYGQTICWIGAFFSPLLPAIATLKFIIIFYVKEWSLLYTCRPSPRPFRASNSNFFFLLVLLIGLCLAIIPLTISISRIPSSKACGPFTNFNTTWEVIPKTVSTFPSSLQSFIHGVTSEAFAVPFFMIICLIMFYFIALAGAHKRVVIQLREQLSLVRKHSSRGSWLGTFTQDTARKVLFSWEGVKLLQPSLTTTSPKLCLEAQPRPASLIH

SEQ ID NO: 19887 - protein, 18 aa, Artificial Sequence
  Synthetic polypeptide
NRILPCLFIAVGPLRTSL

SEQ ID NO: 19888 - protein, 718 aa, Artificial Sequence
  Synthetic polypeptide
TNLKPNSALSVYCCGTFENLSLDSSCFSSPPVNFLQELPSYRSIARRRTTVHSRDKQSGTLLKPTDSYSSQLEDRIAENLSSHSLRNYALNISEKRRLRDIQETQMKYLSEWDQWKRYSSKSWKRFLEKAREMTTHLELWREDIRSIEGKFGTGIQSYFSFLRFLVLLNLVIFLIIFMLVLLPVLLTKYKITNSSFVLIPFKDMDKQCTVYPVSSSGLIYFYSYIIDLLSGTGFLEETSLFYGHYTIDGVKFQNFTYDLPLAYLLSTIASLALSLLWIVKRSVEGFKINLIRSEEHFQSYCNKIFAGWDFCITNRSMADLKHSSLRYELRADLEEERMRQKIAERTSEETIRIYSLRLFLNCIVLAVLGACFYAIYVATVFSQEHMKKEIDKMVFGENLFILYLPSIVITLANFITPMIFAKIIRYEDYSPGFEIRLTILRCVFMRLATICVLVFTLGSKITSCDDDTCDLCGYNQKLYPCWETQVGQEMYKLMIFDFIIILAVTLFVDFPRKLLVTYCSSCKLIQCWGQQEFAIPDNVLGIVYGQTICWIGAFFSPLLPAIATLKFIIIFYVKEWSLLYTCRPSPRPFRASNSNFFFLLVLLIGLCLAIIPLTISISRIPSSKACGPFTNFNTTWEVIPKTVSTFPSSLQSFIHGVTSEAFAVPFFMIICLIMFYFIALAGAHKRVVIQLREQLSLESRDKCYLIQKLTEAQRDMRN

SEQ ID NO: 19889 - protein, 37 aa, Artificial Sequence
  Synthetic polypeptide
PGTVAHPCNFNTLGGGSRCIAWVQEFETSLGNMRTSL

SEQ ID NO: 19890 - protein, 742 aa, Artificial Sequence
  Synthetic polypeptide
DQSGQYENLSLDSSCFSSPPVNFLQELPSYRSIARRRTTVHSRDKQSGTLLKPTDSYSSQLEDRIAENLSSHSLRNYALNISEKRRLRDIQETQMKYLSEWDQWKRYSSKSWKRFLEKAREMTTHLELWREDIRSIEGKFGTGIQSYFSFLRFLVLLNLVIFLIIFMLVLLPVLLTKYKITNSSFVLIPFKDMDKQCTVYPVSSSGLIYFYSYIIDLLSGTGFLEETSLFYGHYTIDGVKFQNFTYDLPLAYLLSTIASLALSLLWIVKRSVEGFKINLIRSEEHFQSYCNKIFAGWDFCITNRSMADLKHSSLRYELRADLEEERMRQKIAERTSEETIRIYSLRLFLNCIVLAVLGACFYAIYVATVFSQEHMKKEIDKMVFGENLFILYLPSIVITLANFITPMIFAKIIRYEDYSPGFEIRLTILRCVFMRLATICVLVFTLGSKITSCDDDTCDLCGYNQKLYPCWETQVGQEMYKLMIFDFIIILAVTLFVDFPRKLLVTYCSSCKLIQCWGQQEFAIPDNVLGIVYGQTICWIGAFFSPLLPAIATLKFIIIFYVKEWSLLYTCRPSPRPFRASNSNFFFLLVLLIGLCLAIIPLTISISRIPSSKACGPFTNFNTTWEVIPKTVSTFPSSLQSFIHGVTSEAFAVPFFMIICLIMFYFIALAGAHKRVVIQLREQLSLVRKHSSRGSWLGTFTQDTARKVLFSWEGVKLLQPSLTTTSPKLCLEAQPRPASLIH

SEQ ID NO: 19891 - protein, 707 aa, Artificial Sequence
  Synthetic polypeptide
DQSGQYENLSLDSSCFSSPPVNFLQELPSYRSIARRRTTVHSRDKQSGTLLKPTDSYSSQLEDRIAENLSSHSLRNYALNISEKRRLRDIQETQMKYLSEWDQWKRYSSKSWKRFLEKAREMTTHLELWREDIRSIEGKFGTGIQSYFSFLRFLVLLNLVIFLIIFMLVLLPVLLTKYKITNSSFVLIPFKDMDKQCTVYPVSSSGLIYFYSYIIDLLSGTGFLEETSLFYGHYTIDGVKFQNFTYDLPLAYLLSTIASLALSLLWIVKRSVEGFKINLIRSEEHFQSYCNKIFAGWDFCITNRSMADLKHSSLRYELRADLEEERMRQKIAERTSEETIRIYSLRLFLNCIVLAVLGACFYAIYVATVFSQEHMKKEIDKMVFGENLFILYLPSIVITLANFITPMIFAKIIRYEDYSPGFEIRLTILRCVFMRLATICVLVFTLGSKITSCDDDTCDLCGYNQKLYPCWETQVGQEMYKLMIFDFIIILAVTLFVDFPRKLLVTYCSSCKLIQCWGQQEFAIPDNVLGIVYGQTICWIGAFFSPLLPAIATLKFIIIFYVKEWSLLYTCRPSPRPFRASNSNFFFLLVLLIGLCLAIIPLTISISRIPSSKACGPFTNFNTTWEVIPKTVSTFPSSLQSFIHGVTSEAFAVPFFMIICLIMFYFIALAGAHKRVVIQLREQLSLESRDKCYLIQKLTEAQRDMRN

SEQ ID NO: 19892 - protein, 80 aa, Artificial Sequence
  Synthetic polypeptide
SVNRTFSLWKKNQCQISQFRNDFRQYQSGSCGSNNPGGSCRRIWSKPHLCRADGCPGSDQRRASHSENVGSRKGPFEKVQ

SEQ ID NO: 19893 - protein, 197 aa, Artificial Sequence
  Synthetic polypeptide
TGPLAYGRRTSVRFRSSGMTLDNISRAAVDRIIRVDHAGEYGANRIYAGQMAVLGRTSVGPVIQKMWDQEKDHLKKFNELMVTFRVRPTVLMPLWNVLGFALGAGTALLGKEGAMACTVAVEESIAHHYNNQIRTLMEEDPEKYEELLQLIKKFRDEELEHHDIGLDHDAELAPAYAVLKSIIQAGCRVAIYLSERL

SEQ ID NO: 19894 - protein, 89 aa, Artificial Sequence
  Synthetic polypeptide
SVNRTFSLWKKNQCQISQFRNDFRQYQSGSCGSNNPGGSCRRIWSKPHLCRADGCPGSDQRRASHSGAGTALLGKEGAMACTVAVEESI

SEQ ID NO: 19895 - protein, 86 aa, Artificial Sequence
  Synthetic polypeptide
TGPLAYGRRTSVRFRSSGMTLDNISRAAVDRIIRVDHAGEYGANRIYAGQMAVLGRTSVGPVIQGRGPPCSGRKVPWPAPWRWKRA

SEQ ID NO: 19896 - protein, 116 aa, Artificial Sequence
  Synthetic polypeptide
TGPLAYGRRTSVRFRSSGMTLDNISRAAVDRIIRVDHAGEYGANRIYAGQMAVLGRTSVGPVIQKMWDQEKDHLKKFNELMVTFRVRPTVLMPLWNVLGFALGTCLSRRAYASLGI

SEQ ID NO: 19897 - protein, 53 aa, Artificial Sequence
  Synthetic polypeptide
MYRWAGSARTKAPGLRTGLKSSSVPLSQAKHLFENINHWHSLLLLAQHRGPVW

SEQ ID NO: 19898 - protein, 319 aa, Artificial Sequence
  Synthetic polypeptide
NHPAFPLVKLNIFLKISIIGILCYYWLNTVALSGEECWETLIGQDIYRLLLMDFVFSLVNSFLGEFLRRIIGMQLITSLGLQEFDIARNVLELIYAQTLVWIGIFFCPLLPFIQMIMLFIMFYSKNISLMMNFQPPSKAWRASQMMTFFIFLLFFPSFTGVLCTLAITIWRLKPSADCGPFRGLPLFIHSIYSWIDTLSTRPGYLWVVWIYRNLIGSVHFFFILTLIVLIITYLYWQITEGRKIMIRLLHEQIINEGKDKMFLIEKLIKLQDMEKKANPSSLVLERREVEQQGFLHLGEHDGSLDLRSRRSVQEGNPRA

SEQ ID NO: 19899 - protein, 261 aa, Artificial Sequence
  Synthetic polypeptide
NHPAFPLVKLNIFLKISIIGILCYYWLNTVALSGEECWETLIGQDIYRLLLMDFVFSLVNSFLGEFLRRIIGMQLITSLGLQEFDIARNVLELIYAQTLVWIGIFFCPLLPFIQMIMLFIMFYSKNISLMMNFQPPSKAWRASQMMTFFIFLLFFPSFTGVLCTLAITIWRIITYLYWQITEGRKIMIRLLHEQIINEGKDKMFLIEKLIKLQDMEKKANPSSLVLERREVEQQGFLHLGEHDGSLDLRSRRSVQEGNPRA

SEQ ID NO: 19900 - protein, 12 aa, Artificial Sequence
  Synthetic polypeptide
SWTSQPPELNER

SEQ ID NO: 19901 - protein, 475 aa, Artificial Sequence
  Synthetic polypeptide
GLGEKMPFVRNGSSPDTKSALILDFPASRTKREVNTVLADVIKHMTPDRAFEDSYPQLQLIIKKVIAHFHDFSVLFSVEKFLPFLDMFQKESVRVEVCKCIMDAFIKHQQEPTKDPVILNALLHVCKTMHDSVNALTLEDEKRMLSYLINGFIKMVSFGRDFEQQLSFYVESRSMFCNLEPVLVQLIHSVNRLAMETRKVMKGNHSRKTAAFVRACVAYCFITIPSLAGIFTRLNLYLHSGQVALANQCLSQADAFFKAAISLVPEVPKMINIDGKMRPSESFLLEFLCNFFSTLLIVPDHPEHGVLFLVRELLNVIQDYTWEDNSDEKIRIYTCVLHLLSAMSQETYLYHIDKVDSNDSLYGGDSKFLAENNKLCETVMAQILEHLKTLAKDEALKRQSSLGLSFFNSILAHGDLRNNKLNQLSVNLWHLAQRHGCADTRTMVKTLEYIKKQSKQPDMTHLTELALRLPLQTRT

SEQ ID NO: 19902 - protein, 449 aa, Artificial Sequence
  Synthetic polypeptide
GLGEKMPFVRNGSSPDTKSALILDFPASRTKREVNTVLADVIKHMTPDRAFEDSYPQLQLIIKKVIAHFHDFSVLFSVEKFLPFLDMFQKESVRVEVCKCIMDAFIKHQQEPTKDPVILNALLHVCKTMHDSVNALTLEDEKRMLSYLINGFIKMVSFGRDFEQQLSFYVESRSMFCNLEPVLVQLIHACVAYCFITIPSLAGIFTRLNLYLHSGQVALANQCLSQADAFFKAAISLVPEVPKMINIDGKMRPSESFLLEFLCNFFSTLLIVPDHPEHGVLFLVRELLNVIQDYTWEDNSDEKIRIYTCVLHLLSAMSQETYLYHIDKVDSNDSLYGGDSKFLAENNKLCETVMAQILEHLKTLAKDEALKRQSSLGLSFFNSILAHGDLRNNKLNQLSVNLWHLAQRHGCADTRTMVKTLEYIKKQSKQPDMTHLTELALRLPLQTRT

SEQ ID NO: 19903 - protein, 300 aa, Artificial Sequence
  Synthetic polypeptide
GSLEPRRLRPQCAVIVPLCYSKSKTRSQIKWSLGRSFLPLPPSPSTSCSMRRNMISTLQMERCTHCTGSCCSTSARGAPSCHLSASSGTWSSTCGGSMSSSAAVCASSTSRSSHMSASGTRARTWPGIACRVTPMTRRTVGTRSASSVTSATWTMMSCLSTCAATTTSATSATRTGPRTTTATMPTCVSTSGRSTFCVRKAAAARSSSPTPSAPRSTSRPTGRPATVAAAPRHARTATSTCSSATRHGTRAGTRGSLVAKTTRRWTGTAARAEWPGLALAEPSRAAEEAGGTKGKKRTEK

SEQ ID NO: 19904 - protein, 856 aa, Artificial Sequence
  Synthetic polypeptide
AQEVEASVCCDRTTVLQQEQDPVSNKVVFGKKLPAFATIPIHQLQHEKKYDIYFADGKVYALYRQLLQHECPRCPELPPFSLFGDLEQHMRRQHELFCCRLCLQHLQIFTYERKWYSRKDLARHRMQGDPDDTSHRGHPLCKFCDERYLDNDELLKHLRRDHYFCHFCDSDGAQDYYSDYAYLREHFREKHFLCEEGRCSTEQFTHAFRTEIDLKAHRTACHSRSRAEARQNRHIDLQFSYAPRHSRRNEGVVGGEDYEEVDRYSRQGRVARAGTRGAQQSRRGSWRYKREEEDREVAAAVRASVAAQQQEEARRSEDQEEGGRPKKEEAAARGPEDPRGPRRSPRTQGEGPGPKETSTNGPVSQEAFSVTGPAAPGCVGVPGALPPPSPKLKDEDFPSLSASTSSSCSTAATPGPVGLALPYAIPARGRSAFQEEDFPALVSSVPKPGTAPTSLVSAWNSSSSSKKVAQPPLSAQATGSGQPTRKAGKGSRGGRKGGPPFTQEEEEDGGPALQELLSTRPTGSVSSTLGLASIQPSKVGKKKKVGSEKPGTTLPQPPPATCPPGALQAPEAPASRAEGPVAVVVNGHMEGPAPARSAPKEPPGLPRPLGSFPCPTPQEDFPALGGPCPPRMPPPPGFSAVVLLKGTPPPPPPGLVPPISKPPPGFSGLLPSPHPACVPSPATTTTTKAPRLLPAPRAYLVPENFRERNLQLIQSIRDFLQSDEARFSEFKSHSGEFRQGLISAAQYYKSCRDLLGENFQKVFNELLVLLPDTAKQQELLSAHTDFCNREKPLSTKSKKNKKSAWQATTQQAGLDCRVCPTCQQVLAHGDASSHQALHAARDDDFPSLQAIARIIT

SEQ ID NO: 19905 - protein, 25 aa, Artificial Sequence
  Synthetic polypeptide
GNHRSYLPSQAHARAEISIPRTHLC

SEQ ID NO: 19906 - protein, 395 aa, Artificial Sequence
  Synthetic polypeptide
ETRETEGTTDLICHLKLMLGQRSASPEHTCVKSKTLDPMVIFFTSGTTGFPKMAKHSHGLALQPSFPGSRKLRSLKTSDVSWCLSDSGWIVATIWTLVEPWTAGCTVFIHHLPQFDTKVIIQTLLKYPINHFWGVSSIYRMILQQDFTSIRFPALEHCYTGGEVVLPKDQEEWKRRTGLLLYENYGQSETGLICATYWGMKIKPGFMGKATPPYDVQVIDDKGSILPPNTEGNIGIRIKPVRPVSLFMCYEGDPEKTAKVECGDFYNTGDRGKMDEEGYICFLGRSDDIINASGYRIGPAEVESALVEHPAVAESAVVGSPDPIRGEVVKAFIVLTPQFLSHDKDQLTKELQQHVKSVTAPYKYPRKVEFVSELPKTITGKIERKELRKKETGQM

SEQ ID NO: 19907 - protein, 55 aa, Artificial Sequence
  Synthetic polypeptide
GRDQHPQNTPVLSQRPWTQWSSSSPVGPQASPRWQNTPMGWPYNPPSQEVGNYGA

SEQ ID NO: 19908 - protein, 25 aa, Artificial Sequence
  Synthetic polypeptide
SGWKETFKSSLLVDQQKWRRDAMEF

SEQ ID NO: 19909 - protein, 50 aa, Artificial Sequence
  Synthetic polypeptide
NIYFIFIPVSWYIAAKTPGISEVAGKKPSNPAFWWINRNGEEMRWSFEEL

SEQ ID NO: 19910 - protein, 37 aa, Artificial Sequence
  Synthetic polypeptide
PLKPLEFLKWLERNLQIQPSGGSTEMEKRCDGVLRNW

SEQ ID NO: 19911 - protein, 536 aa, Artificial Sequence
  Synthetic polypeptide
NIYFIFIPVSWYIAAKTPGISEVAGKKPSNPAFWWINRNGEEMRWSFEELGSLSRKFANILSEACSLQRGDRVILILPRVPEWWLANVACLRTGTVLIPGTTQLTQKDILYRLQSSKANCIITNDVLAPAVDAVASKCENLHSKLIVSENSREGWGNLKELMKHASDSHTCVKTKHNEIMAIFFTSGTSGYPKMTAHTHSSFGLGLSVNGRFWLDLTPSDVMWNTSDTGWAKSAWSSVFSPWIQGACVFTHHLPRFEPTSILQTLSKYPITVFCSAPTVYRMLVQNDITSYKFKSLKHCVSAGEPITPDVTEKWRNKTGLDIYEGYGQTETVLICGNFKGMKIKPGSMGKPSPAFDVKIVDVNGNVLPPGQEGDIGIQVLPNRPFGLFTHYVDNPSKTASTLRGNFYITGDRGYMDKDGYFWFVARADDVILSSGYRIGPFEVENALNEHPSVAESAVVSSPDPIRGEVVKAFVVLNPDYKSHDQEQLIKEIQEHVKKTTAPYKYPRKVEFIQELPKTISGKTKRNELRKKEWKTI

SEQ ID NO: 19912 - protein, 59 aa, Artificial Sequence
  Synthetic polypeptide
PLKPLEFLKWLERNLQIQPSGGSTEMEKRCDGVLRNWDLCPENLPIYFQKPVPYKEEIG

SEQ ID NO: 19913 - protein, 388 aa, Artificial Sequence
  Synthetic polypeptide
NIYFIFIPVSWYIAAKTPGISEVAGKKPSNPAFWWINRNGEEMRWSFEELGSLSRKFANILSEACSLQRGDRVILILPRVPEWWLANVACLRTGTVLIPGTTQLTQKDILYRLQSSKANCIITNDVLAPAVDAVASKCENLHSKLIVSENSREGWGNLKELMKHASDSHTCVKTKHNEIMAIFFTSGTSGYPKMTAHTHSSFGLGLSVNGRFWLDLTPSDVMWNTSDTGWAKSAWSSVFSPWIQGACVFTHHLPRFEPTSILQTLSKYPITVFCSAPTVYRMLVQNDITSYKFKSLKHCVSAGEPITPDVTEKWRNKTGLDIYEGYGQTETVLICGNFKGMKIKPGSMGKPSPAFDVKVCTSPSRRMFNNPICTLPTYRLPPYKLSLL

SEQ ID NO: 19914 - protein, 108 aa, Artificial Sequence
  Synthetic polypeptide
NIYFIFIPVSWYIAAKTPGISEVAGKKPSNPAFWWINRNGEEMRWSFEELGSLSRKFANILSEACSLQRGDRVILILPRVPEWWLANVACLRTGTVLIPGTTQLTQKD

SEQ ID NO: 19915 - protein, 573 aa, Artificial Sequence
  Synthetic polypeptide
NIYFIFIPVSWYIAAKTPGISEVAGKKPSNPAFWWINRNGEEMRWSFEELGSLSRKFANILSEACSLQRGDRVILILPRVPEWWLANVACLRTGTVLIPGTTQLTQKDILYRLQSSKANCIITNDVLAPAVDAVASKCENLHSKLIVSENSREGWGNLKELMKVFLCHPGWSTVARSWLTATSTSLVQAILSLLSSWDYRHASDSHTCVKTKHNEIMAIFFTSGTSGYPKMTAHTHSSFGLGLSVNGRFWLDLTPSDVMWNTSDTGWAKSAWSSVFSPWIQGACVFTHHLPRFEPTSILQTLSKYPITVFCSAPTVYRMLVQNDITSYKFKSLKHCVSAGEPITPDVTEKWRNKTGLDIYEGYGQTETVLICGNFKGMKIKPGSMGKPSPAFDVKIVDVNGNVLPPGQEGDIGIQVLPNRPFGLFTHYVDNPSKTASTLRGNFYITGDRGYMDKDGYFWFVARADDVILSSGYRIGPFEVENALNEHPSVAESAVVSSPDPIRGEVVKAFVVLNPDYKSHDQEQLIKEIQEHVKKTTAPYKYPRKVEFIQELPKTISGKTKRNELRKKEWKTI

SEQ ID NO: 19916 - protein, 32 aa, Artificial Sequence
  Synthetic polypeptide
GRVRWLMPVIPALWEAEAGGSRESPLIYHFIY

SEQ ID NO: 19917 - protein, 139 aa, Artificial Sequence
  Synthetic polypeptide
FQHFGRPRRADHEKARLSTILFTDNCEVTHDQLCELLKYAVLGKSNVPKPSWCQLFHQNHLNNVVVFVLQGMSQLHFYRFYLEFGCLRKAFRHKFRLPPPSSDFLADVVGLQTEQRAGDLPKTMEGPLPSNAKAAINLQ

SEQ ID NO: 19918 - protein, 36 aa, Artificial Sequence
  Synthetic polypeptide
PSAVAHACNSSTLGGRGGRITRKPAYLPFYLLTTVK

SEQ ID NO: 19919 - protein, 69 aa, Artificial Sequence
  Synthetic polypeptide
FQHFGRPRRADHEKARLSTILFTDNCEVTHDQLCELLKYAVLGKSNVPKPSWCQLFHQNHLNNVVVFVL

SEQ ID NO: 19920 - protein, 52 aa, Artificial Sequence
  Synthetic polypeptide
FQHFGRPRRADHEKARLSTILFTDNCEVTHDQLCELLKYAVLGKSNVPKPRE

SEQ ID NO: 19921 - protein, 741 aa, Artificial Sequence
  Synthetic polypeptide
FQHFGRPRRADHEKARLSTILFTDNCEVTHDQLCELLKYAVLGKSNVPKPSWCQLFHQNHLNNVVVFVLQGMSQLHFYRFYLEFGCLRKAFRHKFRLPPPSSDFLADVVGLQTEQRAGDLPKTMEGPLPSNAKAAINLQDDPIIQKYGSKKVGLTRCLLTKEEMRTFHFPLQGFPDCENFLLTKCNGSIADNSPLFGLDCEMCLTSKGRELTRISLVAEGGCCVMDELVKPENKILDYLTSFSGITKKILNPVTTKLKDVQRQLKALLPPDAVLVGHSLDLDLRALKMIHPYVIDTSLLYVREQGRRFKLKFLAKVILGKDIQCPDRLGHDATEDARTILELARYFLKHGPKKIAELNLEALANHQEIQAAGQEPKNTAEVLQHPNTSVLECLDSVGQKLLFLTRETDAGELPSSRNCQTIKCLSNKEVLEQARVEIPLFPFSIVQFSFKAFSPVLTEEMNKRMRIKWTEISTVYAGPFSKNCNLRALKRLFKSFGPVQSMTFVLETRQPHLCIQYEVLEAAQLAIESLDGILVDGICIKVQRPVTELTLDCDTLVNELEGDSENQGSIYLSGVSETFKEQLLQEPRLFLGLEAVILPKDLKSGKQKKYCFLKFKSFGSAQQALNILTGKDWKLKGRHALTPRHLHAWLRGLPPESTRLPGLRVVPPPFEQEALQTLKLDHPKIAAWRWSRKIGKLYNSLCPGTLCLILLPGTKSTHGSLSGLGLMGIKEEEESAGPGLCS

SEQ ID NO: 19922 - protein, 710 aa, Artificial Sequence
  Synthetic polypeptide
FQHFGRPRRADHEKARLSTILFTDNCEVTHDQLCELLKYAVLGKSNVPKPSWCQLFHQNHLNNVVVFVLQGMSQLHFYRFYLEFGCLRKAFRHKFRLPPPSSDFLADVVGLQTEQRAGDLPKTMEGPLPSNAKAAINLQDDPIIQKYGSKKVGLTRCLLTKEEMRTFHFPLQGFPDCENFLLTKCNGSIADNSPLFGLDCEMCLTSKGRELTRISLVAEGGCCVMDELVKPENKILDYLTSFSGITKKILNPVTTKLKDVQRQLKALLPPDAVLVGHSLDLDLRALKMIHPYVIDTSLLYVREQGRRFKLKFLAKVILGKDIQCPDRLGHDATEDARTILELARYFLKHGPKKIAELNLEALANHQEIQAAGQEPKNTAEVLQHPNTSVLECLDSVGQKLLFLTRETDAGELPSSRNCQTIKCLSNKEVLEQARVEIPLFPFSIVQFSFKAFSPVLTEEMNKRMRIKWTEISTVYAGPFSKNCNLRALKRLFKSFGPVQSMTFVLETRQVQRPVTELTLDCDTLVNELEGDSENQGSIYLSGVSETFKEQLLQEPRLFLGLEAVILPKDLKSGKQKKYCFLKFKSFGSAQQALNILTGKDWKLKGRHALTPRHLHAWLRGLPPESTRLPGLRVVPPPFEQEALQTLKLDHPKIAAWRWSRKIGKLYNSLCPGTLCLILLPGTKSTHGSLSGLGLMGIKEEEESAGPGLCS

SEQ ID NO: 19923 - protein, 128 aa, Artificial Sequence
  Synthetic polypeptide
FQHFGRPRRADHEKARLSTILFTDNCEVTHDQLCELLKYAVLGKSNVPKPSWCQLFHQNHLNNVVVFVLQGMSQLHFYRFYLEFGCLRKAFRHKFRLPPPSSDFLADVVGLQTEQRAGDLPKTMEGPL

SEQ ID NO: 19924 - protein, 55 aa, Artificial Sequence
  Synthetic polypeptide
FQHFGRPRRADHEKARLSTILFTDNCEVTHDQLCELLKYAVLGKSNVPKPRAFTF

SEQ ID NO: 19925 - protein, 72 aa, Artificial Sequence
  Synthetic polypeptide
FQHFGRPRRADHEKARLSTILFTDNCEVTHDQLCELLKYAVLGKSNVPKPSWCQLFHQNHLNNVVVFVLQGM

SEQ ID NO: 19926 - protein, 32 aa, Artificial Sequence
  Synthetic polypeptide
ILREQSRVAKLYAQACLSQYCKNLFGNHEEDS

SEQ ID NO: 19927 - protein, 523 aa, Artificial Sequence
  Synthetic polypeptide
FLENSHVWQSCMHKHVCHSIAKIFSGITKKILNPVTTKLKDVQRQLKALLPPDAVLVGHSLDLDLRALKMIHPYVIDTSLLYVREQGRRFKLKFLAKVILGKDIQCPDRLGHDATEDARTILELARYFLKHGPKKIAELNLEALANHQEIQAAGQEPKNTAEVLQHPNTSVLECLDSVGQKLLFLTRETDAGELPSSRNCQTIKCLSNKEVLEQARVEIPLFPFSIVQFSFKAFSPVLTEEMNKRMRIKWTEISTVYAGPFSKNCNLRALKRLFKSFGPVQSMTFVLETRQPHLCIQYEVLEAAQLAIESLDGILVDGICIKVQRPVTELTLDCDTLVNELEGDSENQGSIYLSGVSETFKEQLLQEPRLFLGLEAVILPKDLKSGKQKKYCFLKFKSFGSAQQALNILTGKDWKLKGRHALTPRHLHAWLRGLPPESTRLPGLRVVPPPFEQEALQTLKLDHPKIAAWRWSRKIGKLYNSLCPGTLCLILLPGTKSTHGSLSGLGLMGIKEEEESAGPGLCS

SEQ ID NO: 19928 - protein, 32 aa, Artificial Sequence
  Synthetic polypeptide
RTVTCGKVVCTSMFVTVLQKSFRESRRRFLTQ

SEQ ID NO: 19929 - protein, 492 aa, Artificial Sequence
  Synthetic polypeptide
FLENSHVWQSCMHKHVCHSIAKIFSGITKKILNPVTTKLKDVQRQLKALLPPDAVLVGHSLDLDLRALKMIHPYVIDTSLLYVREQGRRFKLKFLAKVILGKDIQCPDRLGHDATEDARTILELARYFLKHGPKKIAELNLEALANHQEIQAAGQEPKNTAEVLQHPNTSVLECLDSVGQKLLFLTRETDAGELPSSRNCQTIKCLSNKEVLEQARVEIPLFPFSIVQFSFKAFSPVLTEEMNKRMRIKWTEISTVYAGPFSKNCNLRALKRLFKSFGPVQSMTFVLETRQVQRPVTELTLDCDTLVNELEGDSENQGSIYLSGVSETFKEQLLQEPRLFLGLEAVILPKDLKSGKQKKYCFLKFKSFGSAQQALNILTGKDWKLKGRHALTPRHLHAWLRGLPPESTRLPGLRVVPPPFEQEALQTLKLDHPKIAAWRWSRKIGKLYNSLCPGTLCLILLPGTKSTHGSLSGLGLMGIKEEEESAGPGLCS

SEQ ID NO: 19930 - protein, 65 aa, Artificial Sequence
  Synthetic polypeptide
FLENSHVWQSCMHKHVCHSIAKIFSGITKKILNPVTTKLKDVQRQLKALLPPDAVLVGHSLDLDL

SEQ ID NO: 19931 - protein, 149 aa, Artificial Sequence
  Synthetic polypeptide
FLENSHVWQSCMHKHVCHSIAKIFSGITKKILNPVTTKLKDVQRQLKALLPPDAVLVGHSLDLDLRALKMIHPYVIDTSLLYVREQGRRFKLKFLAKVILGKDIQCPDRLGHDATEDARTILELARYFLKHGPKKIAELNLEALANHQE

SEQ ID NO: 19932 - protein, 50 aa, Artificial Sequence
  Synthetic polypeptide
EFETSLGNIGRPCLYLKKNQADQSGSEEPHQSWPSHQRTGPDVLGARGSL

SEQ ID NO: 19933 - protein, 235 aa, Artificial Sequence
  Synthetic polypeptide
KKIRLTKVVRRSLINLGRAIKGQVLMSSELEEVFNSMLVGKVPAMWAAKSYPSLKPLGGYVADLLARLTFFQEWIDKGPPVVFWISGFYFTQSFLTGVSQNYARKYTIPIDHIGFEFEVTPQETVMENNPEDGAYIKGLFLEGARWDRKTMQIGESLPKILYDPLPIIWLKPGESAMFLHQDIYVCPVYKTSARRGTLSTTGHSTNYVLSIELPTDMPQKHWINRGVASLCQLDN

SEQ ID NO: 19934 - protein, 18 aa, Artificial Sequence
  Synthetic polypeptide
DQPGQHRETLSLLKKKSG

SEQ ID NO: 19935 - protein, 26 aa, Artificial Sequence
  Synthetic polypeptide
HSPRGVAASFLKTIHSPSEYHFHQCL

SEQ ID NO: 19936 - protein, 50 aa, Artificial Sequence
  Synthetic polypeptide
ASEMTNPPEGKNSEHIRTSEGTTSRRATLRAVTLTARGRGFIFEDDSLAI

SEQ ID NO: 19937 - protein, 74 aa, Artificial Sequence
  Synthetic polypeptide
FLHFHLRYRVHLTRECQTVGAGLVPDSGHDGPRLRPHWRNLPLLHGVSGLQKSRPEDRCDLPPVLGTTVLSASL

SEQ ID NO: 19938 - protein, 2585 aa, Artificial Sequence
  Synthetic polypeptide
GTGFISLGSARQWAQALFRTVAMMVPDYALIGEISLYSMGFLDSRSLAQKIVATYRLCSEQLSSQHHYDYGMRAVKSVLTAAGNLKLKYPEENESVLLLRALLDVNLAKFLAQDVPLFQGIISDLFPGVVLPKPDYEVFLKVLNDNIKKMKLQPVPWFIGKIIQIYEMMLVRHGYMIVGDPMGGKTSAYKVLAAALGDLHAANQMEEFAVEYKIINPKAITMGQLYGCFDQVSHEWMDGVLANAFREQASSLSDDRKWIIFDGPVDAIWIENMNTVLDDNKKLCLMSGEIIQMNSKMSLIFEPADLEQASPATVSRCGMIYMEPHQLGWKPLKDSYMDTLPSSLTKEHKELVNDMFMWLVQPCLEFGRLHCKFVVQTSPIHLAFSMMRLYSSLLDEIRAVEEEEMELGEGLSSQQIFLWLQGLFLFSLVWTVAGTINADSRKKFDVFFRNLIMGMDDNHPRPKSVKLTKNNIFPERGSIYDFYFIKQASGHWETWTQYITKEEEKVPAGAKVSELIIPTMETARQSFFLKTYLDHEIPMLFVGPTGTGKSAITNNFLLHLPKNTYLPNCINFSARTSANQTQDIIMSKLDRRRKGLFGPPIGKKAVVFVDDLNMPAKEVYGAQPPIELLRQWIDHGYWFDKKDTTRLDIVDMLLVTAMGPPGGGRNDITGRFTRHLNIISINAFEDDILTKIFSSIVDWHFGKGFDVMFLRYGKMLVQATKTIYRDAVENFLPTPSKSHYVFNLRDFSRVIQGVLLCPHTHLQDVEKCIRLWIHEVYRVFYDRLIDKEDRQVFFNMVKETTSNCFKQTIEKVLIHLSPTGKIVDDNIRSLFFGDYFKPESDQKIYDEITDLKQLTVVMEHYLEEFNNISKAPMSLVMFRFAIEHISRICRVLKQDKGHLLLVGIGGSGRQSAAKLSTFMNAYELYQIEITKNYAGNDWREDLKKIILQVGVATKSTVFLFADNQIKDESFVEDINMLLNTGDVPNIFPADEKADIVEKMQTAARTQGEKVEVTPLSMYNFFIERVINKISFSLAMSPIGDAFRNRLRMFPSLINCCTIDWFQSWPTDALELVANKFLEDVELDDNIRVEVVSMCKYFQESVKKLSLDYYNKLRRHNYVTPTSYLELILTFKTLLNSKRQEVAMMRNRYLTGLQKLDFAASQVAVMQRELTALQPQLILTSEETAKMMVKIEAETREADGKKLLVQADEKEANVAAAIAQGIKNECEGDLAEAMPALEAALAALDTLNPADISLVKSMQNPPGPVKLVMESICIMKGMKPERKPDPSGSGKMIEDYWGVSKKILGDLKFLESLKTYDKDNIPPLTMKRIRERFINHPEFQPAVIKNVSSACEGLCKWVRAMEVYDRVAKVVAPKRERLREAEGKLAAQMQKLNQKRAELKLVVDRLQALNDDFEEMNTKKKDLEENIEICSQKLVRAEKLISGLGGEKDRWTEAARQLGIRYTNLTGDVLLSSGTVAYLGAFTVDYRVQCQNQWLAECKDKVIPGFSDFSLSHTLGDPIKIRAWQIAGLPVDSFSIDNGIIVSNSRRWALMIDPHGQANKWIKNMEKANKLAVIKFSDSNYMRMLENALQLGTPVLIENIGEELDASIEPILLKATFKQQGVEYMRLGENIIEYSRDFKLYITTRLRNPHYLPEVAVKVCLLNFMITPLGLQDQLLGIVAAKEKPELEEKKNQLIVESAKNKKHLKEIEDKILEVLSMSKGNILEDETAIKVLSSSKVLSEEISEKQKVASMTETQIDETRMGYKPVAVHSATIFFCISDLANIEPMYQYSLTWFINLYMHSLTHSTKSEELNLRIKYIIDHFTLSIYNNVCRSLFEKDKLLFSLLLTIGIMKQKKEITEEVWYFLLTGGIALDNPYPNPAPQWLSEKAWAEIVRASALPKLHGLMEHLEQNLGEWKLIYDSAWPHEEQLPGSWKFSQGLEKMVILRCLRPDKMVPAVREFIAEHMGKLYIEAPTFDLQGSYNDSSCCAPLIFVLSPSADPMAGLLKFADDLGMGGTRTQTISLGQGQGPIAAKMINNAIKDGTWVVLQNCHLAASWMPTLEKICEEVIVPESTNARFRLWLTSYPSEKFPVSILQNGIKMTNEPPKGLRANLLRSYLNDPISDPVFFQSCAKAVMWQKMLFGLCFFHAVVQERRNFGPLGWNIPYEFNESDLRISMWQIQMFLNDYKEVPFDALTYLTGECNYGGRVTDDKDRRLLLSLLSMFYCKEIEEDYYSLAPGDTYYIPPHGSYQSYIDYLRNLPITAHPEVFGLHENADITKDNQETNQLFEGVLLTLPRQSGGSGKSPQEVVEELAQDILSKLPRDFDLEEVMKLYPVVYEESMNTVLRQELIRFNRLTKVVRRSLINLGRAIKGQVLMSSELEEVFNSMLVGKVPAMWAAKSYPSLKPLGGYVADLLARLTFFQEWIDKGPPVVFWISGFYFTQSFLTGVSQNYARKYTIPIDHIGFEFEVTPQETVMENNPEDGAYIKGLFLEGARWDRKTMQIGESLPKILYDPLPIIWLKPGESAMFLHQDIYVCPVYKTSARRGTLSTTGHSTNYVLSIELPTDMPQKHWINRGVASLCQLDN

SEQ ID NO: 19939 - protein, 54 aa, Artificial Sequence
  Synthetic polypeptide
GRSQDGRIGTAPVYSSQRERRRRRVISAFPSEVPGSSHSGVPDSGRRPCSGQWP

SEQ ID NO: 19940 - protein, 356 aa, Artificial Sequence
  Synthetic polypeptide
GTGFISLGSARQWAQALFRTVAMMVPDYALIGEISLYSMGFLDSRSLAQKIVATYRLCSEQLSSQHHYDYGMRAVKSVLTAAGNLKLKYPEENESVLLLRALLDVNLAKFLAQDVPLFQGIISDLFPGVVLPKPDYEVFLKVLNDNIKKMKLQPVPWFIGKIIQIYEMMLVRHGYMIVGDPMGGKTSAYKVLAAALGDLHAANQMEEFAVEYKIINPKAITMGQLYGCFDQVSHEWMDGVLANAFREQASSLSDDRKWIIFDGPVDAIWIENMNTVLDDNKKLCLMSGEIIQMNSKMSLIFEPADLEQASPATVSRCGMIYMEPHQLGWKPLKDSYMDTLPSSLTKEHKELMKSGQ

SEQ ID NO: 19941 - protein, 48 aa, Artificial Sequence
  Synthetic polypeptide
FLHFHLRYRVHLTRECQTVGAGRSAVCGRSADPQHPTSHHSEAKDIHL

SEQ ID NO: 19942 - protein, 2644 aa, Artificial Sequence
  Synthetic polypeptide
GTGFISLGSARQWAQVEVLSVVAQQILSIQQAIIRKLKTFIFEGTELSLNPTCAVFITMNPGYAGRAELPDNLKALFRTVAMMVPDYALIGEISLYSMGFLDSRSLAQKIVATYRLCSEQLSSQHHYDYGMRAVKSVLTAAGNLKLKYPEENESVLLLRALLDVNLAKFLAQDVPLFQGIISDLFPGVVLPKPDYEVFLKVLNDNIKKMKLQPVPWFIGKIIQIYEMMLVRHGYMIVGDPMGGKTSAYKVLAAALGDLHAANQMEEFAVEYKIINPKAITMGQLYGCFDQVSHEWMDGVLANAFREQASSLSDDRKWIIFDGPVDAIWIENMNTVLDDNKKLCLMSGEIIQMNSKMSLIFEPADLEQASPATVSRCGMIYMEPHQLGWKPLKDSYMDTLPSSLTKEHKELVNDMFMWLVQPCLEFGRLHCKFVVQTSPIHLAFSMMRLYSSLLDEIRAVEEEEMELGEGLSSQQIFLWLQGLFLFSLVWTVAGTINADSRKKFDVFFRNLIMGMDDNHPRPKSVKLTKNNIFPERGSIYDFYFIKQASGHWETWTQYITKEEEKVPAGAKVSELIIPTMETARQSFFLKTYLDHEIPMLFVGPTGTGKSAITNNFLLHLPKNTYLPNCINFSARTSANQTQDIIMSKLDRRRKGLFGPPIGKKAVVFVDDLNMPAKEVYGAQPPIELLRQWIDHGYWFDKKDTTRLDIVDMLLVTAMGPPGGGRNDITGRFTRHLNIISINAFEDDILTKIFSSIVDWHFGKGFDVMFLRYGKMLVQATKTIYRDAVENFLPTPSKSHYVFNLRDFSRVIQGVLLCPHTHLQDVEKCIRLWIHEVYRVFYDRLIDKEDRQVFFNMVKETTSNCFKQTIEKVLIHLSPTGKIVDDNIRSLFFGDYFKPESDQKIYDEITDLKQLTVVMEHYLEEFNNISKAPMSLVMFRFAIEHISRICRVLKQDKGHLLLVGIGGSGRQSAAKLSTFMNAYELYQIEITKNYAGNDWREDLKKIILQVGVATKSTVFLFADNQIKDESFVEDINMLLNTGDVPNIFPADEKADIVEKMQTAARTQGEKVEVTPLSMYNFFIERVINKISFSLAMSPIGDAFRNRLRMFPSLINCCTIDWFQSWPTDALELVANKFLEDVELDDNIRVEVVSMCKYFQESVKKLSLDYYNKLRRHNYVTPTSYLELILTFKTLLNSKRQEVAMMRNRYLTGLQKLDFAASQVAVMQRELTALQPQLILTSEETAKMMVKIEAETREADGKKLLVQADEKEANVAAAIAQGIKNECEGDLAEAMPALEAALAALDTLNPADISLVKSMQNPPGPVKLVMESICIMKGMKPERKPDPSGSGKMIEDYWGVSKKILGDLKFLESLKTYDKDNIPPLTMKRIRERFINHPEFQPAVIKNVSSACEGLCKWVRAMEVYDRVAKVVAPKRERLREAEGKLAAQMQKLNQKRAELKLVVDRLQALNDDFEEMNTKKKDLEENIEICSQKLVRAEKLISGLGGEKDRWTEAARQLGIRYTNLTGDVLLSSGTVAYLGAFTVDYRVQCQNQWLAECKDKVIPGFSDFSLSHTLGDPIKIRAWQIAGLPVDSFSIDNGIIVSNSRRWALMIDPHGQANKWIKNMEKANKLAVIKFSDSNYMRMLENALQLGTPVLIENIGEELDASIEPILLKATFKQQGVEYMRLGENIIEYSRDFKLYITTRLRNPHYLPEVAVKVCLLNFMITPLGLQDQLLGIVAAKEKPELEEKKNQLIVESAKNKKHLKEIEDKILEVLSMSKGNILEDETAIKVLSSSKVLSEEISEKQKVASMTETQIDETRMGYKPVAVHSATIFFCISDLANIEPMYQYSLTWFINLYMHSLTHSTKSEELNLRIKYIIDHFTLSIYNNVCRSLFEKDKLLFSLLLTIGIMKQKKEITEEVWYFLLTGGIALDNPYPNPAPQWLSEKAWAEIVRASALPKLHGLMEHLEQNLGEWKLIYDSAWPHEEQLPGSWKFSQGLEKMVILRCLRPDKMVPAVREFIAEHMGKLYIEAPTFDLQGSYNDSSCCAPLIFVLSPSADPMAGLLKFADDLGMGGTRTQTISLGQGQGPIAAKMINNAIKDGTWVVLQNCHLAASWMPTLEKICEEVIVPESTNARFRLWLTSYPSEKFPVSILQNGIKMTNEPPKGLRANLLRSYLNDPISDPVFFQSCAKAVMWQKMLFGLCFFHAVVQERRNFGPLGWNIPYEFNESDLRISMWQIQMFLNDYKEVPFDALTYLTGECNYGGRVTDDKDRRLLLSLLSMFYCKEIEEDYYSLAPGDTYYIPPHGSYQSYIDYLRNLPITAHPEVFGLHENADITKDNQETNQLFEGVLLTLPRQSGGSGKSPQEVVEELAQDILSKLPRDFDLEEVMKLYPVVYEESMNTVLRQELIRFNRLTKVVRRSLINLGRAIKGQVLMSSELEEVFNSMLVGKVPAMWAAKSYPSLKPLGGYVADLLARLTFFQEWIDKGPPVVFWISGFYFTQSFLTGVSQNYARKYTIPIDHIGFEFEVTPQETVMENNPEDGAYIKGLFLEGARWDRKTMQIGESLPKILYDPLPIIWLKPGESAMFLHQDIYVCPVYKTSARRGTLSTTGHSTNYVLSIELPTDMPQKHWINRGVASLCQLDN

SEQ ID NO: 19943 - protein, 47 aa, Artificial Sequence
  Synthetic polypeptide
GRSQDGRIGTAPVYSSQRERRRRRVISAFPSEVPGSSHSGVPDSGRR

SEQ ID NO: 19944 - protein, 415 aa, Artificial Sequence
  Synthetic polypeptide
GTGFISLGSARQWAQVEVLSVVAQQILSIQQAIIRKLKTFIFEGTELSLNPTCAVFITMNPGYAGRAELPDNLKALFRTVAMMVPDYALIGEISLYSMGFLDSRSLAQKIVATYRLCSEQLSSQHHYDYGMRAVKSVLTAAGNLKLKYPEENESVLLLRALLDVNLAKFLAQDVPLFQGIISDLFPGVVLPKPDYEVFLKVLNDNIKKMKLQPVPWFIGKIIQIYEMMLVRHGYMIVGDPMGGKTSAYKVLAAALGDLHAANQMEEFAVEYKIINPKAITMGQLYGCFDQVSHEWMDGVLANAFREQASSLSDDRKWIIFDGPVDAIWIENMNTVLDDNKKLCLMSGEIIQMNSKMSLIFEPADLEQASPATVSRCGMIYMEPHQLGWKPLKDSYMDTLPSSLTKEHKELMKSGQ

SEQ ID NO: 19945 - protein, 14 aa, Artificial Sequence
  Synthetic polypeptide
FLHFHLRPCSGQWP

SEQ ID NO: 19946 - protein, 2602 aa, Artificial Sequence
  Synthetic polypeptide
GRSQDGRIGTAPVYSSQRERRRRRVISAFPSEALFRTVAMMVPDYALIGEISLYSMGFLDSRSLAQKIVATYRLCSEQLSSQHHYDYGMRAVKSVLTAAGNLKLKYPEENESVLLLRALLDVNLAKFLAQDVPLFQGIISDLFPGVVLPKPDYEVFLKVLNDNIKKMKLQPVPWFIGKIIQIYEMMLVRHGYMIVGDPMGGKTSAYKVLAAALGDLHAANQMEEFAVEYKIINPKAITMGQLYGCFDQVSHEWMDGVLANAFREQASSLSDDRKWIIFDGPVDAIWIENMNTVLDDNKKLCLMSGEIIQMNSKMSLIFEPADLEQASPATVSRCGMIYMEPHQLGWKPLKDSYMDTLPSSLTKEHKELVNDMFMWLVQPCLEFGRLHCKFVVQTSPIHLAFSMMRLYSSLLDEIRAVEEEEMELGEGLSSQQIFLWLQGLFLFSLVWTVAGTINADSRKKFDVFFRNLIMGMDDNHPRPKSVKLTKNNIFPERGSIYDFYFIKQASGHWETWTQYITKEEEKVPAGAKVSELIIPTMETARQSFFLKTYLDHEIPMLFVGPTGTGKSAITNNFLLHLPKNTYLPNCINFSARTSANQTQDIIMSKLDRRRKGLFGPPIGKKAVVFVDDLNMPAKEVYGAQPPIELLRQWIDHGYWFDKKDTTRLDIVDMLLVTAMGPPGGGRNDITGRFTRHLNIISINAFEDDILTKIFSSIVDWHFGKGFDVMFLRYGKMLVQATKTIYRDAVENFLPTPSKSHYVFNLRDFSRVIQGVLLCPHTHLQDVEKCIRLWIHEVYRVFYDRLIDKEDRQVFFNMVKETTSNCFKQTIEKVLIHLSPTGKIVDDNIRSLFFGDYFKPESDQKIYDEITDLKQLTVVMEHYLEEFNNISKAPMSLVMFRFAIEHISRICRVLKQDKGHLLLVGIGGSGRQSAAKLSTFMNAYELYQIEITKNYAGNDWREDLKKIILQVGVATKSTVFLFADNQIKDESFVEDINMLLNTGDVPNIFPADEKADIVEKMQTAARTQGEKVEVTPLSMYNFFIERVINKISFSLAMSPIGDAFRNRLRMFPSLINCCTIDWFQSWPTDALELVANKFLEDVELDDNIRVEVVSMCKYFQESVKKLSLDYYNKLRRHNYVTPTSYLELILTFKTLLNSKRQEVAMMRNRYLTGLQKLDFAASQVAVMQRELTALQPQLILTSEETAKMMVKIEAETREADGKKLLVQADEKEANVAAAIAQGIKNECEGDLAEAMPALEAALAALDTLNPADISLVKSMQNPPGPVKLVMESICIMKGMKPERKPDPSGSGKMIEDYWGVSKKILGDLKFLESLKTYDKDNIPPLTMKRIRERFINHPEFQPAVIKNVSSACEGLCKWVRAMEVYDRVAKVVAPKRERLREAEGKLAAQMQKLNQKRAELKLVVDRLQALNDDFEEMNTKKKDLEENIEICSQKLVRAEKLISGLGGEKDRWTEAARQLGIRYTNLTGDVLLSSGTVAYLGAFTVDYRVQCQNQWLAECKDKVIPGFSDFSLSHTLGDPIKIRAWQIAGLPVDSFSIDNGIIVSNSRRWALMIDPHGQANKWIKNMEKANKLAVIKFSDSNYMRMLENALQLGTPVLIENIGEELDASIEPILLKATFKQQGVEYMRLGENIIEYSRDFKLYITTRLRNPHYLPEVAVKVCLLNFMITPLGLQDQLLGIVAAKEKPELEEKKNQLIVESAKNKKHLKEIEDKILEVLSMSKGNILEDETAIKVLSSSKVLSEEISEKQKVASMTETQIDETRMGYKPVAVHSATIFFCISDLANIEPMYQYSLTWFINLYMHSLTHSTKSEELNLRIKYIIDHFTLSIYNNVCRSLFEKDKLLFSLLLTIGIMKQKKEITEEVWYFLLTGGIALDNPYPNPAPQWLSEKAWAEIVRASALPKLHGLMEHLEQNLGEWKLIYDSAWPHEEQLPGSWKFSQGLEKMVILRCLRPDKMVPAVREFIAEHMGKLYIEAPTFDLQGSYNDSSCCAPLIFVLSPSADPMAGLLKFADDLGMGGTRTQTISLGQGQGPIAAKMINNAIKDGTWVVLQNCHLAASWMPTLEKICEEVIVPESTNARFRLWLTSYPSEKFPVSILQNGIKMTNEPPKGLRANLLRSYLNDPISDPVFFQSCAKAVMWQKMLFGLCFFHAVVQERRNFGPLGWNIPYEFNESDLRISMWQIQMFLNDYKEVPFDALTYLTGECNYGGRVTDDKDRRLLLSLLSMFYCKEIEEDYYSLAPGDTYYIPPHGSYQSYIDYLRNLPITAHPEVFGLHENADITKDNQETNQLFEGVLLTLPRQSGGSGKSPQEVVEELAQDILSKLPRDFDLEEVMKLYPVVYEESMNTVLRQELIRFNRLTKVVRRSLINLGRAIKGQVLMSSELEEVFNSMLVGKVPAMWAAKSYPSLKPLGGYVADLLARLTFFQEWIDKGPPVVFWISGFYFTQSFLTGVSQNYARKYTIPIDHIGFEFEVTPQETVMENNPEDGAYIKGLFLEGARWDRKTMQIGESLPKILYDPLPIIWLKPGESAMFLHQDIYVCPVYKTSARRGTLSTTGHSTNYVLSIELPTDMPQKHWINRGVASLCQLDN

SEQ ID NO: 19947 - protein, 373 aa, Artificial Sequence
  Synthetic polypeptide
GRSQDGRIGTAPVYSSQRERRRRRVISAFPSEALFRTVAMMVPDYALIGEISLYSMGFLDSRSLAQKIVATYRLCSEQLSSQHHYDYGMRAVKSVLTAAGNLKLKYPEENESVLLLRALLDVNLAKFLAQDVPLFQGIISDLFPGVVLPKPDYEVFLKVLNDNIKKMKLQPVPWFIGKIIQIYEMMLVRHGYMIVGDPMGGKTSAYKVLAAALGDLHAANQMEEFAVEYKIINPKAITMGQLYGCFDQVSHEWMDGVLANAFREQASSLSDDRKWIIFDGPVDAIWIENMNTVLDDNKKLCLMSGEIIQMNSKMSLIFEPADLEQASPATVSRCGMIYMEPHQLGWKPLKDSYMDTLPSSLTKEHKELMKSGQ

SEQ ID NO: 19948 - protein, 32 aa, Artificial Sequence
  Synthetic polypeptide
FLHFHLRSAVCGRSADPQHPTSHHSEAKDIHL

SEQ ID NO: 19949 - protein, 52 aa, Artificial Sequence
  Synthetic polypeptide
GRSQDGRIGTAPVYSSQRERRRRRVISAFPSEKCCLWSLSRSSASNKPSFGS

SEQ ID NO: 19950 - protein, 1285 aa, Artificial Sequence
  Synthetic polypeptide
GQEIKTILANTVMARSLSPPPELEERDVAAYSASLEDVKTAVLGLLVILQTKLYTLPASHATRVYEMLVSHIQLHYKHSYTLPIASSIRLQAFDFLLLLRADSLHRLGLPNKDGVVRFSPYCVCDYMEPERGSEKKTSGPLSPPTGPPGPAPAGPAVRLGSVPYSLLFRVLLQCLKQESDWKVLKLVLGRLPESLRYKVLIFTSPCSVDQLCSALCSMLSGPKTLERLRGAPEGFSRTDLHLAVVPVLTALISYHNYLDKTKQREMVYCLEQGLIHRCASQCVVALSICSVEMPDIIIKALPVLVVKLTHISATASMAVPLLEFLSTLARLPHLYRNFAAEQYASVFAISLPYTNPSKFNQYIVCLAHHVIAMWFIRCRLPFRKDFVPFITKGLRSNVLLSFDDTPEKDSFRARSTSLNERPKSLRIARPPKQGLNNSPPVKEFKESSAAEAFRCRSISVSEHVVRSRIQTSLTSASLGSADENSVAQADDSLKNLHLELTETCLDMMARYVFSNFTAVPKRSPVGEFLLAGGRTKTWLVGNKLVTVTTSVGTGTRSLLGLDSGELQSGPESSSSPGVHVRQTKEAPAKLESQAGQQVSRGARDRVRSMSGGHGLRVGALDVPASQFLGSATSPGPRTAPAAKPEKASAGTRVPVQEKTNLAAYVPLLTQGWAEILVRRPTGNTSWLMSLENPLSPFSSDINNMPLQELSNALMAAERFKEHRDTALYKSLSVPAASTAKPPPLPRSNTVASFSSLYQSSCQGQLHRSVSWADSAVVMEEGSPGEVPVLVEPPGLEDVEAALGMDRRTDAYSRSSSVSSQEEKSLHAEELVGRGIPIERVVSSEGGRPSVDLSFQPSQPLSKSSSSPELQTLQDILGDPGDKADVGRLSPEVKARSQSGTLDGESAAWSASGEDSRGQPEGPLPSSSPRSPSGLRPRGYTISDSAPSRRGKRVERDALKSRATASNAEKVPGINPSFVFLQLYHSPFFGDESNKPILLPNESQSFERSVQLLDQIPSYDTHKIAVLYVGEGQSNSELAILSNEHGSYRYTEFLTGLGRLIELKDCQPDKVYLGGLDVCGEDGQFTYCWHDDIMQAVFHIATLMPTKDVDKHRCDKKRHLGNDFVSIVYNDSGEDFKLGTIKGQFNFVHVIVTPLDYECNLVSLQCRKDMEGLVDTSVAKIVSDRNLPFVARQMALHANMASQVHHSRSNPTDIYPSKWIARLRHIKRLRQRICEEAAYSNPSLPLVHPPSHSKAPAQTPAEPTPGYEVGQRKRLISSVEDFTEFV

SEQ ID NO: 19951 - protein, 24 aa, Artificial Sequence
  Synthetic polypeptide
SQHFGRPRQADHEVRRSRPSWLTR

SEQ ID NO: 19952 - protein, 55 aa, Artificial Sequence
  Synthetic polypeptide
HGDGPLPLPTPGAGRKGCGRILGLLGGCEDSRPGASGHPSDQAVHPACKPRHACV

SEQ ID NO: 19953 - protein, 1219 aa, Artificial Sequence
  Synthetic polypeptide
GQEIKTILANTVMARSLSPPPELEERDVAAYSASLEDVKTAVLGLLVILQTKLYTLPASHATRVYEMLVSHIQLHYKHSYTLPIASSIRLQAFDFLLLLRADSLHRLGLPNKDGVVRFSPYCVCDYMEPERGSEKKTSGPLSPPTGPPGPAPAGPAVRLGSVPYSLLFRVLLQCLKQESDWKVLKLVLGRLPESLRYKVLIFTSPCSVDQLCSALCSMLSGPKTLERLRGAPEGFSRTDLHLAVVPVLTALISYHNYLDKTKQREMVYCLEQGLIHRCASQCVVALSICSVEMPDIIIKALPVLVVKLTHISATASMAVPLLEFLSTLARLPHLYRNFAAEQYASVFAISLPYTNPSKFNQYIVCLAHHVIAMWFIRCRLPFRKDFVPFITKGLRSNVLLSFDDTPEKDSFRARSTSLNERPKSRIQTSLTSASLGSADENSVAQADDSLKNLHLELTETCLDMMARYVFSNFTAVPKRSPVGEFLLAGGRTKTWLVGNKLVTVTTSVGTGTRSLLGLDSGELQSGPESSSSPGVHVRQTKEAPAKLESQAGQQVSRGARDRVRSMSGGHGLRVGALDVPASQFLGSATSPGPRTAPAAKPEKASAGTRVPVQEKTNLAAYVPLLTQGWAEILVRRPTGNTSWLMSLENPLSPFSSDINNMPLQELSNALMAAERFKEHRDTALYKSLSVPAASTAKPPPLPRSNTDSAVVMEEGSPGEVPVLVEPPGLEDVEAALGMDRRTDAYSRSSSVSSQEEKSLHAEELVGRGIPIERVVSSEGGRPSVDLSFQPSQPLSKSSSSPELQTLQDILGDPGDKADVGRLSPEVKARSQSGTLDGESAAWSASGEDSRGQPEGPLPSSSPRSPSGLRPRGYTISDSAPSRRGKRVERDALKSRATASNAEKVPGINPSFVFLQLYHSPFFGDESNKPILLPNESQSFERSVQLLDQIPSYDTHKIAVLYVGEGQSNSELAILSNEHGSYRYTEFLTGLGRLIELKDCQPDKVYLGGLDVCGEDGQFTYCWHDDIMQAVFHIATLMPTKDVDKHRCDKKRHLGNDFVSIVYNDSGEDFKLGTIKGQFNFVHVIVTPLDYECNLVSLQCRKDMEGLVDTSVAKIVSDRNLPFVARQMALHANMASQVHHSRSNPTDIYPSKWIARLRHIKRLRQRICEEAAYSNPSLPLVHPPSHSKAPAQTPAEPTPGYEVGQRKRLISSVEDFTEFV

SEQ ID NO: 19954 - protein, 1218 aa, Artificial Sequence
  Synthetic polypeptide
GQEIKTILANTVMARSLSPPPELEERDVAAYSASLEDVKTAVLGLLVILQTKLYTLPASHATRVYEMLVSHIQLHYKHSYTLPIASSIRLQAFDFLLLLRADSLHRLGLPNKDGVVRFSPYCVCDYMEPERGSEKKTSGPLSPPTGPPGPAPAGPAVRLGSVPYSLLFRVLLQCLKQESDWKVLKLVLGRLPESLRYKVLIFTSPCSVDQLCSALCSMLSGPKTLERLRGAPEGFSRTDLHLAVVPVLTALISYHNYLDKTKQREMVYCLEQGLIHRCASQCVVALSICSVEMPDIIIKALPVLVVKLTHISATASMAVPLLEFLSTLARLPHLYRNFAAEQYASVFAISLPYTNPSKFNQYIVCLAHHVIAMWFIRCRLPFRKDFVPFITKGLRSNVLLSFDDTPEKDSFRARSTSLNERPKRIQTSLTSASLGSADENSVAQADDSLKNLHLELTETCLDMMARYVFSNFTAVPKRSPVGEFLLAGGRTKTWLVGNKLVTVTTSVGTGTRSLLGLDSGELQSGPESSSSPGVHVRQTKEAPAKLESQAGQQVSRGARDRVRSMSGGHGLRVGALDVPASQFLGSATSPGPRTAPAAKPEKASAGTRVPVQEKTNLAAYVPLLTQGWAEILVRRPTGNTSWLMSLENPLSPFSSDINNMPLQELSNALMAAERFKEHRDTALYKSLSVPAASTAKPPPLPRSNTDSAVVMEEGSPGEVPVLVEPPGLEDVEAALGMDRRTDAYSRSSSVSSQEEKSLHAEELVGRGIPIERVVSSEGGRPSVDLSFQPSQPLSKSSSSPELQTLQDILGDPGDKADVGRLSPEVKARSQSGTLDGESAAWSASGEDSRGQPEGPLPSSSPRSPSGLRPRGYTISDSAPSRRGKRVERDALKSRATASNAEKVPGINPSFVFLQLYHSPFFGDESNKPILLPNESQSFERSVQLLDQIPSYDTHKIAVLYVGEGQSNSELAILSNEHGSYRYTEFLTGLGRLIELKDCQPDKVYLGGLDVCGEDGQFTYCWHDDIMQAVFHIATLMPTKDVDKHRCDKKRHLGNDFVSIVYNDSGEDFKLGTIKGQFNFVHVIVTPLDYECNLVSLQCRKDMEGLVDTSVAKIVSDRNLPFVARQMALHANMASQVHHSRSNPTDIYPSKWIARLRHIKRLRQRICEEAAYSNPSLPLVHPPSHSKAPAQTPAEPTPGYEVGQRKRLISSVEDFTEFV

SEQ ID NO: 19955 - protein, 1242 aa, Artificial Sequence
  Synthetic polypeptide
GQEIKTILANTVMARSLSPPPELEERDVAAYSASLEDVKTAVLGLLVILQTKLYTLPASHATRVYEMLVSHIQLHYKHSYTLPIASSIRLQAFDFLLLLRADSLHRLGLPNKDGVVRFSPYCVCDYMEPERGSEKKTSGPLSPPTGPPGPAPAGPAVRLGSVPYSLLFRVLLQCLKQESDWKVLKLVLGRLPESLRYKVLIFTSPCSVDQLCSALCSMLSGPKTLERLRGAPEGFSRTDLHLAVVPVLTALISYHNYLDKTKQREMVYCLEQGLIHRCASQCVVALSICSVEMPDIIIKALPVLVVKLTHISATASMAVPLLEFLSTLARLPHLYRNFAAEQYASVFAISLPYTNPSKFNQYIVCLAHHVIAMWFIRCRLPFRKDFVPFITKGLRSNVLLSFDDTPEKDSFRARSTSLNERPKSRIQTSLTSASLGSADENSVAQADDSLKNLHLELTETCLDMMARYVFSNFTAVPKRSPVGEFLLAGGRTKTWLVGNKLVTVTTSVGTGTRSLLGLDSGELQSGPESSSSPGVHVRQTKEAPAKLESQAGQQVSRGARDRVRSMSGGHGLRVGALDVPASQFLGSATSPGPRTAPAAKPEKASAGTRVPVQEKTNLAAYVPLLTQGWAEILVRRPTGNTSWLMSLENPLSPFSSDINNMPLQELSNALMAAERFKEHRDTALYKSLSVPAASTAKPPPLPRSNTVASFSSLYQSSCQGQLHRSVSWADSAVVMEEGSPGEVPVLVEPPGLEDVEAALGMDRRTDAYSRSSSVSSQEEKSLHAEELVGRGIPIERVVSSEGGRPSVDLSFQPSQPLSKSSSSPELQTLQDILGDPGDKADVGRLSPEVKARSQSGTLDGESAAWSASGEDSRGQPEGPLPSSSPRSPSGLRPRGYTISDSAPSRRGKRVERDALKSRATASNAEKVPGINPSFVFLQLYHSPFFGDESNKPILLPNESQSFERSVQLLDQIPSYDTHKIAVLYVGEGQSNSELAILSNEHGSYRYTEFLTGLGRLIELKDCQPDKVYLGGLDVCGEDGQFTYCWHDDIMQAVFHIATLMPTKDVDKHRCDKKRHLGNDFVSIVYNDSGEDFKLGTIKGQFNFVHVIVTPLDYECNLVSLQCRKDMEGLVDTSVAKIVSDRNLPFVARQMALHANMASQVHHSRSNPTDIYPSKWIARLRHIKRLRQRICEEAAYSNPSLPLVHPPSHSKAPAQTPAEPTPGYEVGQRKRLISSVEDFTEFV

SEQ ID NO: 19956 - protein, 1262 aa, Artificial Sequence
  Synthetic polypeptide
GQEIKTILANTVMARSLSPPPELEERDVAAYSASLEDVKTAVLGLLVILQTKLYTLPASHATRVYEMLVSHIQLHYKHSYTLPIASSIRLQAFDFLLLLRADSLHRLGLPNKDGVVRFSPYCVCDYMEPERGSEKKTSGPLSPPTGPPGPAPAGPAVRLGSVPYSLLFRVLLQCLKQESDWKVLKLVLGRLPESLRYKVLIFTSPCSVDQLCSALCSMLSGPKTLERLRGAPEGFSRTDLHLAVVPVLTALISYHNYLDKTKQREMVYCLEQGLIHRCASQCVVALSICSVEMPDIIIKALPVLVVKLTHISATASMAVPLLEFLSTLARLPHLYRNFAAEQYASVFAISLPYTNPSKFNQYIVCLAHHVIAMWFIRCRLPFRKDFVPFITKGLRSNVLLSFDDTPEKDSFRARSTSLNERPKSLRIARPPKQGLNNSPPVKEFKESSAAEAFRCRSISVSEHVVRSRIQTSLTSASLGSADENSVAQADDSLKNLHLELTETCLDMMARYVFSNFTAVPKRSPVGEFLLAGGRTKTWLVGNKLVTVTTSVGTGTRSLLGLDSGELQSGPESSSSPGVHVRQTKEAPAKLESQAGQQVSRGARDRVRSMSGGHGLRVGALDVPASQFLGSATSPGPRTAPAAKPEKASAGTRVPVQEKTNLAAYVPLLTQGWAEILVRRPTGNTSWLMSLENPLSPFSSDINNMPLQELSNALMAAERFKEHRDTALYKSLSVPAASTAKPPPLPRSNTDSAVVMEEGSPGEVPVLVEPPGLEDVEAALGMDRRTDAYSRSSSVSSQEEKSLHAEELVGRGIPIERVVSSEGGRPSVDLSFQPSQPLSKSSSSPELQTLQDILGDPGDKADVGRLSPEVKARSQSGTLDGESAAWSASGEDSRGQPEGPLPSSSPRSPSGLRPRGYTISDSAPSRRGKRVERDALKSRATASNAEKVPGINPSFVFLQLYHSPFFGDESNKPILLPNESQSFERSVQLLDQIPSYDTHKIAVLYVGEGQSNSELAILSNEHGSYRYTEFLTGLGRLIELKDCQPDKVYLGGLDVCGEDGQFTYCWHDDIMQAVFHIATLMPTKDVDKHRCDKKRHLGNDFVSIVYNDSGEDFKLGTIKGQFNFVHVIVTPLDYECNLVSLQCRKDMEGLVDTSVAKIVSDRNLPFVARQMALHANMASQVHHSRSNPTDIYPSKWIARLRHIKRLRQRICEEAAYSNPSLPLVHPPSHSKAPAQTPAEPTPGYEVGQRKRLISSVEDFTEFV

SEQ ID NO: 19957 - protein, 154 aa, Artificial Sequence
  Synthetic polypeptide
GGAWWLMLIILALREAEAGRSLELPQHSRISLDSDDGVSRLGSAGSKVVAFMKSPVGQYLDSHPFLAFTLLVFIVMSAVPVGFFLLIVVLTTLAALLGVIILEGLVISVGGFSLLCILCGLGFVSLAMSGMMIASYVVVSSLISCWFSPRSHEI

SEQ ID NO: 19958 - protein, 40 aa, Artificial Sequence
  Synthetic polypeptide
HFGRPRRADHLSCPNTAGSHWTLMMECPGWAVLAPRWWPL

SEQ ID NO: 19959 - protein, 176 aa, Artificial Sequence
  Synthetic polypeptide
GGAWWLMLIILALREAEAGRSLELPQHSRISLDSDDGVSRLGSAGSKVVAFMKSPVGQYLDSHPFLAFTLLVFIVMSAVPVGFFLLIVVLTTLAALLGVIILEGLVISVGGFSLLCILCGLGFVSLAMSGMMIASYVVVSSLISCWFSPRPLTQQNTSCDFLPAMKSAEFEGLYQE

SEQ ID NO: 19960 - protein, 37 aa, Artificial Sequence
  Synthetic polypeptide
GGAWWLMLIILALREAEAGRSLELPQHSRISLDSDDG

SEQ ID NO: 19961 - protein, 26 aa, Artificial Sequence
  Synthetic polypeptide
HFGRPRRADHLSCPNTAGSHWTLMME

SEQ ID NO: 19962 - protein, 1262 aa, Artificial Sequence
  Synthetic polypeptide
NPVSTKNTKISWMRWCAPVIPATREAETKLYTLPASHATRVYEMLVSHIQLHYKHSYTLPIASSIRLQAFDFLLLLRADSLHRLGLPNKDGVVRFSPYCVCDYMEPERGSEKKTSGPLSPPTGPPGPAPAGPAVRLGSVPYSLLFRVLLQCLKQESDWKVLKLVLGRLPESLRYKVLIFTSPCSVDQLCSALCSMLSGPKTLERLRGAPEGFSRTDLHLAVVPVLTALISYHNYLDKTKQREMVYCLEQGLIHRCASQCVVALSICSVEMPDIIIKALPVLVVKLTHISATASMAVPLLEFLSTLARLPHLYRNFAAEQYASVFAISLPYTNPSKFNQYIVCLAHHVIAMWFIRCRLPFRKDFVPFITKGLRSNVLLSFDDTPEKDSFRARSTSLNERPKSLRIARPPKQGLNNSPPVKEFKESSAAEAFRCRSISVSEHVVRSRIQTSLTSASLGSADENSVAQADDSLKNLHLELTETCLDMMARYVFSNFTAVPKRSPVGEFLLAGGRTKTWLVGNKLVTVTTSVGTGTRSLLGLDSGELQSGPESSSSPGVHVRQTKEAPAKLESQAGQQVSRGARDRVRSMSGGHGLRVGALDVPASQFLGSATSPGPRTAPAAKPEKASAGTRVPVQEKTNLAAYVPLLTQGWAEILVRRPTGNTSWLMSLENPLSPFSSDINNMPLQELSNALMAAERFKEHRDTALYKSLSVPAASTAKPPPLPRSNTVASFSSLYQSSCQGQLHRSVSWADSAVVMEEGSPGEVPVLVEPPGLEDVEAALGMDRRTDAYSRSSSVSSQEEKSLHAEELVGRGIPIERVVSSEGGRPSVDLSFQPSQPLSKSSSSPELQTLQDILGDPGDKADVGRLSPEVKARSQSGTLDGESAAWSASGEDSRGQPEGPLPSSSPRSPSGLRPRGYTISDSAPSRRGKRVERDALKSRATASNAEKVPGINPSFVFLQLYHSPFFGDESNKPILLPNESQSFERSVQLLDQIPSYDTHKIAVLYVGEGQSNSELAILSNEHGSYRYTEFLTGLGRLIELKDCQPDKVYLGGLDVCGEDGQFTYCWHDDIMQAVFHIATLMPTKDVDKHRCDKKRHLGNDFVSIVYNDSGEDFKLGTIKGQFNFVHVIVTPLDYECNLVSLQCRKDMEGLVDTSVAKIVSDRNLPFVARQMALHANMASQVHHSRSNPTDIYPSKWIARLRHIKRLRQRICEEAAYSNPSLPLVHPPSHSKAPAQTPAEPTPGYEVGQRKRLISSVEDFTEFV

SEQ ID NO: 19963 - protein, 132 aa, Artificial Sequence
  Synthetic polypeptide
SQLLGRLRPSCTPCLQATPRVCMRCWSATFSSTTSTATPCQSRAASGCRPLTSCCCCGPTHCTAWACPTRMESCGSAPTASATTWSQREALRRRPAAPFLLPQGLLARRLQAPPCGWGPCPTPCSSASCCSA

SEQ ID NO: 19964 - protein, 1196 aa, Artificial Sequence
  Synthetic polypeptide
NPVSTKNTKISWMRWCAPVIPATREAETKLYTLPASHATRVYEMLVSHIQLHYKHSYTLPIASSIRLQAFDFLLLLRADSLHRLGLPNKDGVVRFSPYCVCDYMEPERGSEKKTSGPLSPPTGPPGPAPAGPAVRLGSVPYSLLFRVLLQCLKQESDWKVLKLVLGRLPESLRYKVLIFTSPCSVDQLCSALCSMLSGPKTLERLRGAPEGFSRTDLHLAVVPVLTALISYHNYLDKTKQREMVYCLEQGLIHRCASQCVVALSICSVEMPDIIIKALPVLVVKLTHISATASMAVPLLEFLSTLARLPHLYRNFAAEQYASVFAISLPYTNPSKFNQYIVCLAHHVIAMWFIRCRLPFRKDFVPFITKGLRSNVLLSFDDTPEKDSFRARSTSLNERPKSRIQTSLTSASLGSADENSVAQADDSLKNLHLELTETCLDMMARYVFSNFTAVPKRSPVGEFLLAGGRTKTWLVGNKLVTVTTSVGTGTRSLLGLDSGELQSGPESSSSPGVHVRQTKEAPAKLESQAGQQVSRGARDRVRSMSGGHGLRVGALDVPASQFLGSATSPGPRTAPAAKPEKASAGTRVPVQEKTNLAAYVPLLTQGWAEILVRRPTGNTSWLMSLENPLSPFSSDINNMPLQELSNALMAAERFKEHRDTALYKSLSVPAASTAKPPPLPRSNTDSAVVMEEGSPGEVPVLVEPPGLEDVEAALGMDRRTDAYSRSSSVSSQEEKSLHAEELVGRGIPIERVVSSEGGRPSVDLSFQPSQPLSKSSSSPELQTLQDILGDPGDKADVGRLSPEVKARSQSGTLDGESAAWSASGEDSRGQPEGPLPSSSPRSPSGLRPRGYTISDSAPSRRGKRVERDALKSRATASNAEKVPGINPSFVFLQLYHSPFFGDESNKPILLPNESQSFERSVQLLDQIPSYDTHKIAVLYVGEGQSNSELAILSNEHGSYRYTEFLTGLGRLIELKDCQPDKVYLGGLDVCGEDGQFTYCWHDDIMQAVFHIATLMPTKDVDKHRCDKKRHLGNDFVSIVYNDSGEDFKLGTIKGQFNFVHVIVTPLDYECNLVSLQCRKDMEGLVDTSVAKIVSDRNLPFVARQMALHANMASQVHHSRSNPTDIYPSKWIARLRHIKRLRQRICEEAAYSNPSLPLVHPPSHSKAPAQTPAEPTPGYEVGQRKRLISSVEDFTEFV

SEQ ID NO: 19965 - protein, 1195 aa, Artificial Sequence
  Synthetic polypeptide
NPVSTKNTKISWMRWCAPVIPATREAETKLYTLPASHATRVYEMLVSHIQLHYKHSYTLPIASSIRLQAFDFLLLLRADSLHRLGLPNKDGVVRFSPYCVCDYMEPERGSEKKTSGPLSPPTGPPGPAPAGPAVRLGSVPYSLLFRVLLQCLKQESDWKVLKLVLGRLPESLRYKVLIFTSPCSVDQLCSALCSMLSGPKTLERLRGAPEGFSRTDLHLAVVPVLTALISYHNYLDKTKQREMVYCLEQGLIHRCASQCVVALSICSVEMPDIIIKALPVLVVKLTHISATASMAVPLLEFLSTLARLPHLYRNFAAEQYASVFAISLPYTNPSKFNQYIVCLAHHVIAMWFIRCRLPFRKDFVPFITKGLRSNVLLSFDDTPEKDSFRARSTSLNERPKRIQTSLTSASLGSADENSVAQADDSLKNLHLELTETCLDMMARYVFSNFTAVPKRSPVGEFLLAGGRTKTWLVGNKLVTVTTSVGTGTRSLLGLDSGELQSGPESSSSPGVHVRQTKEAPAKLESQAGQQVSRGARDRVRSMSGGHGLRVGALDVPASQFLGSATSPGPRTAPAAKPEKASAGTRVPVQEKTNLAAYVPLLTQGWAEILVRRPTGNTSWLMSLENPLSPFSSDINNMPLQELSNALMAAERFKEHRDTALYKSLSVPAASTAKPPPLPRSNTDSAVVMEEGSPGEVPVLVEPPGLEDVEAALGMDRRTDAYSRSSSVSSQEEKSLHAEELVGRGIPIERVVSSEGGRPSVDLSFQPSQPLSKSSSSPELQTLQDILGDPGDKADVGRLSPEVKARSQSGTLDGESAAWSASGEDSRGQPEGPLPSSSPRSPSGLRPRGYTISDSAPSRRGKRVERDALKSRATASNAEKVPGINPSFVFLQLYHSPFFGDESNKPILLPNESQSFERSVQLLDQIPSYDTHKIAVLYVGEGQSNSELAILSNEHGSYRYTEFLTGLGRLIELKDCQPDKVYLGGLDVCGEDGQFTYCWHDDIMQAVFHIATLMPTKDVDKHRCDKKRHLGNDFVSIVYNDSGEDFKLGTIKGQFNFVHVIVTPLDYECNLVSLQCRKDMEGLVDTSVAKIVSDRNLPFVARQMALHANMASQVHHSRSNPTDIYPSKWIARLRHIKRLRQRICEEAAYSNPSLPLVHPPSHSKAPAQTPAEPTPGYEVGQRKRLISSVEDFTEFV

SEQ ID NO: 19966 - protein, 1219 aa, Artificial Sequence
  Synthetic polypeptide
NPVSTKNTKISWMRWCAPVIPATREAETKLYTLPASHATRVYEMLVSHIQLHYKHSYTLPIASSIRLQAFDFLLLLRADSLHRLGLPNKDGVVRFSPYCVCDYMEPERGSEKKTSGPLSPPTGPPGPAPAGPAVRLGSVPYSLLFRVLLQCLKQESDWKVLKLVLGRLPESLRYKVLIFTSPCSVDQLCSALCSMLSGPKTLERLRGAPEGFSRTDLHLAVVPVLTALISYHNYLDKTKQREMVYCLEQGLIHRCASQCVVALSICSVEMPDIIIKALPVLVVKLTHISATASMAVPLLEFLSTLARLPHLYRNFAAEQYASVFAISLPYTNPSKFNQYIVCLAHHVIAMWFIRCRLPFRKDFVPFITKGLRSNVLLSFDDTPEKDSFRARSTSLNERPKSRIQTSLTSASLGSADENSVAQADDSLKNLHLELTETCLDMMARYVFSNFTAVPKRSPVGEFLLAGGRTKTWLVGNKLVTVTTSVGTGTRSLLGLDSGELQSGPESSSSPGVHVRQTKEAPAKLESQAGQQVSRGARDRVRSMSGGHGLRVGALDVPASQFLGSATSPGPRTAPAAKPEKASAGTRVPVQEKTNLAAYVPLLTQGWAEILVRRPTGNTSWLMSLENPLSPFSSDINNMPLQELSNALMAAERFKEHRDTALYKSLSVPAASTAKPPPLPRSNTVASFSSLYQSSCQGQLHRSVSWADSAVVMEEGSPGEVPVLVEPPGLEDVEAALGMDRRTDAYSRSSSVSSQEEKSLHAEELVGRGIPIERVVSSEGGRPSVDLSFQPSQPLSKSSSSPELQTLQDILGDPGDKADVGRLSPEVKARSQSGTLDGESAAWSASGEDSRGQPEGPLPSSSPRSPSGLRPRGYTISDSAPSRRGKRVERDALKSRATASNAEKVPGINPSFVFLQLYHSPFFGDESNKPILLPNESQSFERSVQLLDQIPSYDTHKIAVLYVGEGQSNSELAILSNEHGSYRYTEFLTGLGRLIELKDCQPDKVYLGGLDVCGEDGQFTYCWHDDIMQAVFHIATLMPTKDVDKHRCDKKRHLGNDFVSIVYNDSGEDFKLGTIKGQFNFVHVIVTPLDYECNLVSLQCRKDMEGLVDTSVAKIVSDRNLPFVARQMALHANMASQVHHSRSNPTDIYPSKWIARLRHIKRLRQRICEEAAYSNPSLPLVHPPSHSKAPAQTPAEPTPGYEVGQRKRLISSVEDFTEFV

SEQ ID NO: 19967 - protein, 1239 aa, Artificial Sequence
  Synthetic polypeptide
NPVSTKNTKISWMRWCAPVIPATREAETKLYTLPASHATRVYEMLVSHIQLHYKHSYTLPIASSIRLQAFDFLLLLRADSLHRLGLPNKDGVVRFSPYCVCDYMEPERGSEKKTSGPLSPPTGPPGPAPAGPAVRLGSVPYSLLFRVLLQCLKQESDWKVLKLVLGRLPESLRYKVLIFTSPCSVDQLCSALCSMLSGPKTLERLRGAPEGFSRTDLHLAVVPVLTALISYHNYLDKTKQREMVYCLEQGLIHRCASQCVVALSICSVEMPDIIIKALPVLVVKLTHISATASMAVPLLEFLSTLARLPHLYRNFAAEQYASVFAISLPYTNPSKFNQYIVCLAHHVIAMWFIRCRLPFRKDFVPFITKGLRSNVLLSFDDTPEKDSFRARSTSLNERPKSLRIARPPKQGLNNSPPVKEFKESSAAEAFRCRSISVSEHVVRSRIQTSLTSASLGSADENSVAQADDSLKNLHLELTETCLDMMARYVFSNFTAVPKRSPVGEFLLAGGRTKTWLVGNKLVTVTTSVGTGTRSLLGLDSGELQSGPESSSSPGVHVRQTKEAPAKLESQAGQQVSRGARDRVRSMSGGHGLRVGALDVPASQFLGSATSPGPRTAPAAKPEKASAGTRVPVQEKTNLAAYVPLLTQGWAEILVRRPTGNTSWLMSLENPLSPFSSDINNMPLQELSNALMAAERFKEHRDTALYKSLSVPAASTAKPPPLPRSNTDSAVVMEEGSPGEVPVLVEPPGLEDVEAALGMDRRTDAYSRSSSVSSQEEKSLHAEELVGRGIPIERVVSSEGGRPSVDLSFQPSQPLSKSSSSPELQTLQDILGDPGDKADVGRLSPEVKARSQSGTLDGESAAWSASGEDSRGQPEGPLPSSSPRSPSGLRPRGYTISDSAPSRRGKRVERDALKSRATASNAEKVPGINPSFVFLQLYHSPFFGDESNKPILLPNESQSFERSVQLLDQIPSYDTHKIAVLYVGEGQSNSELAILSNEHGSYRYTEFLTGLGRLIELKDCQPDKVYLGGLDVCGEDGQFTYCWHDDIMQAVFHIATLMPTKDVDKHRCDKKRHLGNDFVSIVYNDSGEDFKLGTIKGQFNFVHVIVTPLDYECNLVSLQCRKDMEGLVDTSVAKIVSDRNLPFVARQMALHANMASQVHHSRSNPTDIYPSKWIARLRHIKRLRQRICEEAAYSNPSLPLVHPPSHSKAPAQTPAEPTPGYEVGQRKRLISSVEDFTEFV

SEQ ID NO: 19968 - protein, 46 aa, Artificial Sequence
  Synthetic polypeptide
DIPFTFCRDCEASSATWNCHGWKCHNCKENSCSFCHCHQVSETSQQ

SEQ ID NO: 19969 - protein, 96 aa, Artificial Sequence
  Synthetic polypeptide
ELMVFKWGVSLHKLSCLPLCEIYLSPSAVIVRPPQPRGTVMDGNVITAKRTAAVSAIATKFLKPPSSEVLCILGAGVQAYSHYEIFTEQFSFKEVI

SEQ ID NO: 19970 - protein, 14 aa, Artificial Sequence
  Synthetic polypeptide
GLLSHVELSWMEMS

SEQ ID NO: 19971 - protein, 245 aa, Artificial Sequence
  Synthetic polypeptide
ELMVFKWGVSLHKLSCLPLCEIYLSPSAVIVRPPQPRGTVMDGNVITAKRTAAVSAIATKFLKPPSSEVLCILGAGVQAYSHYEIFTEQFSFKEVRIWNRTKENAEKFADTVQGEVRVCSSVQEAVAGADVIITVTLATEPILFGEWVKPGAHINAVGASRPDWRELDDELMKEAVLYVDSQEAALKESGDVLLSGAEIFAELGEVIKGVKPAHCEKTTVFKSLGMAVEDTVAAKLIYDSWSSGK

SEQ ID NO: 19972 - protein, 214 aa, Artificial Sequence
  Synthetic polypeptide
ELMVFKWGVSLHKLSCLPLCEIYLSPSAVIVRPPQPRGTVMDGNVITAKRTAAVSAIATKFLKPPSSEVLCILGAGVQAYSHYEIFTEQFSFKEVRIWNRTKENAEKFADTVQGEVRVCSSVQEAVAGADVIITVTLATEPILFGEWVKPGAHINAVGASRPDWRELDDELMKEAVLYVDSQEAALKESGDVLLSGAEIFAELGEVIKGVKPAH

SEQ ID NO: 19973 - protein, 71 aa, Artificial Sequence
  Synthetic polypeptide
ELMVFKWGVSLHKLSCLPLCEIYLSPSAVIVRPPQPRGTVMDGNVITAKRTAAVSAIATKFLKPPSSEVLC

SEQ ID NO: 19974 - protein, 10 aa, Artificial Sequence
  Synthetic polypeptide
IPLWLLELEV

SEQ ID NO: 19975 - protein, 587 aa, Artificial Sequence
  Synthetic polypeptide
NWRSEELWPWMAHVLLPYVHGNQSSPELGPPRLRQVRLQEALYPDPPGPRVHTCSAAGGFSTSDYDVGWESPHNGSGTWAYSAPDLLGAWSWGSCAVYDSGGYVQELGLSLEESRDRLRFLQLHNWLDNRSRAVFLELTRYSPAVGLHAAVTLRLEFPAAGRALAALSVRPFALRRLSAGLSLPLLTSVCLLLFAVHFAVAEARTWHREGRWRVLRLGAWARWLLVALTAATALVRLAQLGAADRQWTRFVRGRPRRFTSFDQVAQLSSAARGLAASLLFLLLVKAAQQLRFVRQWSVFGKTLCRALPELLGVTLGLVVLGVAYAQLAILLVSSCVDSLWSVAQALLVLCPGTGLSTLCPAESWHLSPLLCVGLWALRLWGALRLGAVILRWRYHALRGELYRPAWEPQDYEMVELFLRRLRLWMGLSKVKEFRHKVRFEGMEPLPSRSSRGSKVSPDVPPPSAGSDASHPSTSSSQLDGLSVSLGRLGTRCEPEPSRLQAVFEALLTQFDRLNQATEDVYQLEQQLHSLQGRRSSRAPAGSSRGPSPGLRPALPSRLARASRGVDLATGPSRTPLRAKNKVHPSST

SEQ ID NO: 19976 - protein, 123 aa, Artificial Sequence
  Synthetic polypeptide
LGDMWTCVDTFVAARTGGLRSSGHGWPTCCCPTSTGTSPAQSWGPHGCGRCGCRKHSTQTLPAPGSTRARPQEASAPAITTLAGRVLTMARGRGPIQRRICWGHGPGAPVPCMTAGATCRSWA

SEQ ID NO: 19977 - protein, 4 aa, Artificial Sequence
  Synthetic polypeptide
NWRS

SEQ ID NO: 19978 - protein, 19 aa, Artificial Sequence
  Synthetic polypeptide
LGDMWTCVDTFVAARTGGL

SEQ ID NO: 19979 - protein, 54 aa, Artificial Sequence
  Synthetic polypeptide
GRINTNPSQTLSKNTAGGWEPEPHTCRAAGAGHRQLPGLVRAGQLLPHVLRPPR

SEQ ID NO: 19980 - protein, 972 aa, Artificial Sequence
  Synthetic polypeptide
AVKEELTPILHRLFPRIQQVAGSPSPTPAGQQVLDIDSCLDSSVLDSSFLTFSGLHAEQAFVGQMKSDLFLDDSKSLVCWPSGEGTLSWPDLLSDPSIVGSNLRQLARGQAGHGLGPEEDGFSLASPYSPAKSFSASDEDLIQQVLAEGVSSPAPTQDTHMETDLLSSLSSTPGEKTETLALQRLGELGPPSPGLNWEQPQAARLSRTGLVEGLRKRLLPAWCASLAHGLSLLLVAVAVAVSGWVGASFPPGVSVAWLLSSSASFLASFLGWEPLKVLLEALYFSLVAKRLHPDEDDTLVESPAVTPVSARVPRVRPPHGFALFLAKEEARKVKRLHGMLRSLLVYMLFLLVTLLASYGDASCHGHAYRLQSAIKQELHSRAFLAITRSEELWPWMAHVLLPYVHGNQSSPELGPPRLRQVRLQEALYPDPPGPRVHTCSAAGGFSTSDYDVGWESPHNGSGTWAYSAPDLLGAWSWGSCAVYDSGGYVQELGLSLEESRDRLRFLQLHNWLDNRSRAVFLELTRYSPAVGLHAAVTLRLEFPAAGRALAALSVRPFALRRLSAGLSLPLLTSVCLLLFAVHFAVAEARTWHREGRWRVLRLGAWARWLLVALTAATALVRLAQLGAADRQWTRFVRGRPRRFTSFDQVAQLSSAARGLAASLLFLLLVKAAQQLRFVRQWSVFGKTLCRALPELLGVTLGLVVLGVAYAQLAILLVSSCVDSLWSVAQALLVLCPGTGLSTLCPAESWHLSPLLCVGLWALRLWGALRLGAVILRWRYHALRGELYRPAWEPQDYEMVELFLRRLRLWMGLSKVKEFRHKVRFEGMEPLPSRSSRGSKVSPDVPPPSAGSDASHPSTSSSQLDGLSVSLGRLGTRCEPEPSRLQAVFEALLTQFDRLNQATEDVYQLEQQLHSLQGRRSSRAPAGSSRGPSPGLRPALPSRLARASRGVDLATGPSRTPLRAKNKVHPSST

SEQ ID NO: 19981 - protein, 58 aa, Artificial Sequence
  Synthetic polypeptide
HQSFTDSFQEYSRWLGARAPHLPGSRCWTSTAAWTRPCWTAPSSRSQASTLSRPLLDR

SEQ ID NO: 19982 - protein, 971 aa, Artificial Sequence
  Synthetic polypeptide
AVKEELTPILHRLFPRIQQVAGSPSPTPAGQQVLDIDSCLDSSVLDSSFLTFSGLHAEAFVGQMKSDLFLDDSKSLVCWPSGEGTLSWPDLLSDPSIVGSNLRQLARGQAGHGLGPEEDGFSLASPYSPAKSFSASDEDLIQQVLAEGVSSPAPTQDTHMETDLLSSLSSTPGEKTETLALQRLGELGPPSPGLNWEQPQAARLSRTGLVEGLRKRLLPAWCASLAHGLSLLLVAVAVAVSGWVGASFPPGVSVAWLLSSSASFLASFLGWEPLKVLLEALYFSLVAKRLHPDEDDTLVESPAVTPVSARVPRVRPPHGFALFLAKEEARKVKRLHGMLRSLLVYMLFLLVTLLASYGDASCHGHAYRLQSAIKQELHSRAFLAITRSEELWPWMAHVLLPYVHGNQSSPELGPPRLRQVRLQEALYPDPPGPRVHTCSAAGGFSTSDYDVGWESPHNGSGTWAYSAPDLLGAWSWGSCAVYDSGGYVQELGLSLEESRDRLRFLQLHNWLDNRSRAVFLELTRYSPAVGLHAAVTLRLEFPAAGRALAALSVRPFALRRLSAGLSLPLLTSVCLLLFAVHFAVAEARTWHREGRWRVLRLGAWARWLLVALTAATALVRLAQLGAADRQWTRFVRGRPRRFTSFDQVAQLSSAARGLAASLLFLLLVKAAQQLRFVRQWSVFGKTLCRALPELLGVTLGLVVLGVAYAQLAILLVSSCVDSLWSVAQALLVLCPGTGLSTLCPAESWHLSPLLCVGLWALRLWGALRLGAVILRWRYHALRGELYRPAWEPQDYEMVELFLRRLRLWMGLSKVKEFRHKVRFEGMEPLPSRSSRGSKVSPDVPPPSAGSDASHPSTSSSQLDGLSVSLGRLGTRCEPEPSRLQAVFEALLTQFDRLNQATEDVYQLEQQLHSLQGRRSSRAPAGSSRGPSPGLRPALPSRLARASRGVDLATGPSRTPLRAKNKVHPSST

SEQ ID NO: 19983 - protein, 57 aa, Artificial Sequence
  Synthetic polypeptide
HQSFTDSFQEYSRWLGARAPHLPGSRCWTSTAAWTRPCWTAPSSRSQASTLRPLLDR

SEQ ID NO: 19984 - protein, 75 aa, Artificial Sequence
  Synthetic polypeptide
AVKEELTPILHRLFPRIQQVAGSPSPTPAGQQVLDIDSCLDSSVLDSSFLTFSGLHAEQAFVGQMKSDLFLDDSK

SEQ ID NO: 19985 - protein, 66 aa, Artificial Sequence
  Synthetic polypeptide
LRRSKHAAVHASEMHSRRKSQWLGARAPHLPGSRCWTSTAAWTRPCWTAPSSRSQASTLSRPLLDR

SEQ ID NO: 19986 - protein, 79 aa, Artificial Sequence
  Synthetic polypeptide
KNEGTLLSRRHGRLHSSTPDNSEEASTRLCTLPKCTPEENLSGWEPEPHTCRAAGAGHRQLPGLVRAGQLLPHVLRPPR

SEQ ID NO: 19987 - protein, 987 aa, Artificial Sequence
  Synthetic polypeptide
ADATDDCTAARQITQKKQARGCARFRNALQKKISVAGSPSPTPAGQQVLDIDSCLDSSVLDSSFLTFSGLHAEQAFVGQMKSDLFLDDSKSLVCWPSGEGTLSWPDLLSDPSIVGSNLRQLARGQAGHGLGPEEDGFSLASPYSPAKSFSASDEDLIQQVLAEGVSSPAPTQDTHMETDLLSSLSSTPGEKTETLALQRLGELGPPSPGLNWEQPQAARLSRTGLVEGLRKRLLPAWCASLAHGLSLLLVAVAVAVSGWVGASFPPGVSVAWLLSSSASFLASFLGWEPLKVLLEALYFSLVAKRLHPDEDDTLVESPAVTPVSARVPRVRPPHGFALFLAKEEARKVKRLHGMLRSLLVYMLFLLVTLLASYGDASCHGHAYRLQSAIKQELHSRAFLAITRSEELWPWMAHVLLPYVHGNQSSPELGPPRLRQVRLQEALYPDPPGPRVHTCSAAGGFSTSDYDVGWESPHNGSGTWAYSAPDLLGAWSWGSCAVYDSGGYVQELGLSLEESRDRLRFLQLHNWLDNRSRAVFLELTRYSPAVGLHAAVTLRLEFPAAGRALAALSVRPFALRRLSAGLSLPLLTSVCLLLFAVHFAVAEARTWHREGRWRVLRLGAWARWLLVALTAATALVRLAQLGAADRQWTRFVRGRPRRFTSFDQVAQLSSAARGLAASLLFLLLVKAAQQLRFVRQWSVFGKTLCRALPELLGVTLGLVVLGVAYAQLAILLVSSCVDSLWSVAQALLVLCPGTGLSTLCPAESWHLSPLLCVGLWALRLWGALRLGAVILRWRYHALRGELYRPAWEPQDYEMVELFLRRLRLWMGLSKVKEFRHKVRFEGMEPLPSRSSRGSKVSPDVPPPSAGSDASHPSTSSSQLDGLSVSLGRLGTRCEPEPSRLQAVFEALLTQFDRLNQATEDVYQLEQQLHSLQGRRSSRAPAGSSRGPSPGLRPALPSRLARASRGVDLATGPSRTPLRAKNKVHPSST

SEQ ID NO: 19988 - protein, 65 aa, Artificial Sequence
  Synthetic polypeptide
LRRSKHAAVHASEMHSRRKSQWLGARAPHLPGSRCWTSTAAWTRPCWTAPSSRSQASTLRPLLDR

SEQ ID NO: 19989 - protein, 986 aa, Artificial Sequence
  Synthetic polypeptide
ADATDDCTAARQITQKKQARGCARFRNALQKKISVAGSPSPTPAGQQVLDIDSCLDSSVLDSSFLTFSGLHAEAFVGQMKSDLFLDDSKSLVCWPSGEGTLSWPDLLSDPSIVGSNLRQLARGQAGHGLGPEEDGFSLASPYSPAKSFSASDEDLIQQVLAEGVSSPAPTQDTHMETDLLSSLSSTPGEKTETLALQRLGELGPPSPGLNWEQPQAARLSRTGLVEGLRKRLLPAWCASLAHGLSLLLVAVAVAVSGWVGASFPPGVSVAWLLSSSASFLASFLGWEPLKVLLEALYFSLVAKRLHPDEDDTLVESPAVTPVSARVPRVRPPHGFALFLAKEEARKVKRLHGMLRSLLVYMLFLLVTLLASYGDASCHGHAYRLQSAIKQELHSRAFLAITRSEELWPWMAHVLLPYVHGNQSSPELGPPRLRQVRLQEALYPDPPGPRVHTCSAAGGFSTSDYDVGWESPHNGSGTWAYSAPDLLGAWSWGSCAVYDSGGYVQELGLSLEESRDRLRFLQLHNWLDNRSRAVFLELTRYSPAVGLHAAVTLRLEFPAAGRALAALSVRPFALRRLSAGLSLPLLTSVCLLLFAVHFAVAEARTWHREGRWRVLRLGAWARWLLVALTAATALVRLAQLGAADRQWTRFVRGRPRRFTSFDQVAQLSSAARGLAASLLFLLLVKAAQQLRFVRQWSVFGKTLCRALPELLGVTLGLVVLGVAYAQLAILLVSSCVDSLWSVAQALLVLCPGTGLSTLCPAESWHLSPLLCVGLWALRLWGALRLGAVILRWRYHALRGELYRPAWEPQDYEMVELFLRRLRLWMGLSKVKEFRHKVRFEGMEPLPSRSSRGSKVSPDVPPPSAGSDASHPSTSSSQLDGLSVSLGRLGTRCEPEPSRLQAVFEALLTQFDRLNQATEDVYQLEQQLHSLQGRRSSRAPAGSSRGPSPGLRPALPSRLARASRGVDLATGPSRTPLRAKNKVHPSST

SEQ ID NO: 19990 - protein, 90 aa, Artificial Sequence
  Synthetic polypeptide
ADATDDCTAARQITQKKQARGCARFRNALQKKISVAGSPSPTPAGQQVLDIDSCLDSSVLDSSFLTFSGLHAEQAFVGQMKSDLFLDDSK

SEQ ID NO: 19991 - protein, 31 aa, Artificial Sequence
  Synthetic polypeptide
GLGMCATERNYANHSRLSLFRVTLIKEHRSS

SEQ ID NO: 19992 - protein, 40 aa, Artificial Sequence
  Synthetic polypeptide
MTQKPLHPSLTHSTYLEGLVCVQQREIMRITPGCLCSELP

SEQ ID NO: 19993 - protein, 245 aa, Artificial Sequence
  Synthetic polypeptide
PKSLSTLPSPTLPTLRAWYVCNREKLCESLQAVFVQSYLDQGTQIFLNNSIEKSGWLFIQLYHSFVSSVFSLFMSRTSINGLLGRGSMFVFSPDQFQRLLKINPDWKTHRLLDLGAGDGEVTKIMSPHFEEIYATELSETMIWQLQKKKYRVLGINEWQNTGFQYDVISCLNLLDRCDQPLTLLKDIRSVLEPTRGRVILALVLPFHPYVENVGGKWEKPSEILEIKGQNWEEQVNSLPEVFRKA

SEQ ID NO: 19994 - protein, 280 aa, Artificial Sequence
  Synthetic polypeptide
PKSLSTLPSPTLPTLRAWYVCNREKLCESLQAVFVQSYLDQGTQIFLNNSIEKSGWLFIQLYHSFVSSVFSLFMSRTSINGLLGRGSMFVFSPDQFQRLLKINPDWKTHRLLDLGAGDGEVTKIMSPHFEEIYATELSETMIWQLQKKKYRVLGINEWQNTGFQYDVISCLNLLDRCDQPLTLLKDIRSVLEPTRGRVILALVLPFHPYVENVGGKWEKPSEILEIKGQNWEEQVNSLPEVFRKAGFVIEAFTRLPYLCEGDMYNDYYVLDDAVFVLKPV

SEQ ID NO: 19995 - protein, 279 aa, Artificial Sequence
  Synthetic polypeptide
PKSLSTLPSPTLPTLRAWYVCNREKLCESLQAVFVQSYLDQGTQIFLNNSIEKSGWLFIQLYHSFVSSVFSLFMSRTSINGLLGRGSMFVFSPDQFQRLLKINPDWKTHRLLDLGAGDGEVTKIMSPHFEEIYATELSETMIWQLQKKKYRVLGINEWQNTGFQYDVISCLNLLDRCDQPLTLLKDIRSVLEPTRGRVILALVLPFHPYVENGGKWEKPSEILEIKGQNWEEQVNSLPEVFRKAGFVIEAFTRLPYLCEGDMYNDYYVLDDAVFVLKPV

SEQ ID NO: 19996 - protein, 47 aa, Artificial Sequence
  Synthetic polypeptide
PKSLSTLPSPTLPTLRAWYVCNREKLCESLQAVFVQSYLDQGTQIFL

SEQ ID NO: 19997 - protein, 3 aa, Artificial Sequence
  Synthetic polypeptide
QSC

SEQ ID NO: 19998 - protein, 32 aa, Artificial Sequence
  Synthetic polypeptide
AEIMPLHSSLSDRVARKRLNVCVFTRSVSETA

SEQ ID NO: 19999 - protein, 167 aa, Artificial Sequence
  Synthetic polypeptide
VTELLGRGSMFVFSPDQFQRLLKINPDWKTHRLLDLGAGDGEVTKIMSPHFEEIYATELSETMIWQLQKKKYRVLGINEWQNTGFQYDVISCLNLLDRCDQPLTLLKDIRSVLEPTRGRVILALVLPFHPYVENVGGKWEKPSEILEIKGQNWEEQVNSLPEVFRKA

SEQ ID NO: 20000 - protein, 202 aa, Artificial Sequence
  Synthetic polypeptide
VTELLGRGSMFVFSPDQFQRLLKINPDWKTHRLLDLGAGDGEVTKIMSPHFEEIYATELSETMIWQLQKKKYRVLGINEWQNTGFQYDVISCLNLLDRCDQPLTLLKDIRSVLEPTRGRVILALVLPFHPYVENVGGKWEKPSEILEIKGQNWEEQVNSLPEVFRKAGFVIEAFTRLPYLCEGDMYNDYYVLDDAVFVLKPV

SEQ ID NO: 20001 - protein, 201 aa, Artificial Sequence
  Synthetic polypeptide
VTELLGRGSMFVFSPDQFQRLLKINPDWKTHRLLDLGAGDGEVTKIMSPHFEEIYATELSETMIWQLQKKKYRVLGINEWQNTGFQYDVISCLNLLDRCDQPLTLLKDIRSVLEPTRGRVILALVLPFHPYVENGGKWEKPSEILEIKGQNWEEQVNSLPEVFRKAGFVIEAFTRLPYLCEGDMYNDYYVLDDAVFVLKPV

SEQ ID NO: 20002 - protein, 22 aa, Artificial Sequence
  Synthetic polypeptide
VTELLGRGSMFVFSPDQFQRLL

SEQ ID NO: 20003 - protein, 134 aa, Artificial Sequence
  Synthetic polypeptide
VTELLGRGSMFVFSPDQFQRLLKINPDWKTHRLLDLGAGDGEVTKIMSPHFEEIYATELSETMIWQLQKKKYRVLGINEWQNTGFQYDVISCLNLLDRCDQPLTLLKDIRSVLEPTRGRVILALVLPFHPYVEN

SEQ ID NO: 20004 - protein, 23 aa, Artificial Sequence
  Synthetic polypeptide
LTPVIPALWEAEAVGSLESPWYK

SEQ ID NO: 20005 - protein, 108 aa, Artificial Sequence
  Synthetic polypeptide
SQHFGRPRQSDRLRVLGINEWQNTGFQYDVISCLNLLDRCDQPLTLLKDIRSVLEPTRGRVILALVLPFHPYVENVGGKWEKPSEILEIKGQNWEEQVNSLPEVFRKA

SEQ ID NO: 20006 - protein, 143 aa, Artificial Sequence
  Synthetic polypeptide
SQHFGRPRQSDRLRVLGINEWQNTGFQYDVISCLNLLDRCDQPLTLLKDIRSVLEPTRGRVILALVLPFHPYVENVGGKWEKPSEILEIKGQNWEEQVNSLPEVFRKAGFVIEAFTRLPYLCEGDMYNDYYVLDDAVFVLKPV

SEQ ID NO: 20007 - protein, 142 aa, Artificial Sequence
  Synthetic polypeptide
SQHFGRPRQSDRLRVLGINEWQNTGFQYDVISCLNLLDRCDQPLTLLKDIRSVLEPTRGRVILALVLPFHPYVENGGKWEKPSEILEIKGQNWEEQVNSLPEVFRKAGFVIEAFTRLPYLCEGDMYNDYYVLDDAVFVLKPV

SEQ ID NO: 20008 - protein, 75 aa, Artificial Sequence
  Synthetic polypeptide
SQHFGRPRQSDRLRVLGINEWQNTGFQYDVISCLNLLDRCDQPLTLLKDIRSVLEPTRGRVILALVLPFHPYVEN

SEQ ID NO: 20009 - protein, 93 aa, Artificial Sequence
  Synthetic polypeptide
SQHFGRPRQSDRLRVLGINEWQNTGFQYDVISCLNLLDRCDQPLTLLKDIRSVLEPTRGRVILALVLPFHPYVENVGGKWEKPSEILEIKGQN

SEQ ID NO: 20010 - protein, 82 aa, Artificial Sequence
  Synthetic polypeptide
SQHFGRPRQSDRLRVLGINEWQNTGFQYDVISCLNLLDRCDQPLTLLKDIRSVLEPTRGRVILALVLPFHPYVENGKCGQSG

SEQ ID NO: 20011 - protein, 635 aa, Artificial Sequence
  Synthetic polypeptide
GGAAAPGRPRAADGTSTYKQHCRTPSSSSTLAYSPRDEEDSMPPISTPRRSDSAISVRSLHSESSMSLRSTFSLPEEEEEPEPLVFAEQPSVKLCCQLCCSVFKDPVITTCGHTFCRRCALKSEKCPVDNVKLTVVVNNIAVAEQIGELFIHCRHGCRVAGSGKPPIFEVDPRGCPFTIKLSARKDHEGSCDYRPVRCPNNPSCPPLLRMNLEAHLKECEHIKCPHSKYGCTFIGNQDTYETHLETCRFEGLKEFLQQTDDRFHEMHVALAQKDQEIAFLRSMLGKLSEKIDQLEKSLELKFDVLDENQSKLSEDLMEFRRDASMLNDELSHINARLNMGILGSYDPQQIFKCKGTFVGHQGPVWCLCVYSMGDLLFSGSSDKTIKVWDTCTTYKCQKTLEGHDGIVLALCIQGCKLYSGSADCTIIVWDIQNLQKVNTIRAHDNPVCTLVSSHNVLFSGSLKAIKVWDIVGTELKLKKELTGLNHWVRALVAAQSYLYSGSYQTIKIWDIRTLDCIHVLQTSGGSVYSIAVTNHHIVCGTYENLIHVWDIESKEQVRTLTGHVGTVYALAVISTPDQTKVFSASYDRSLRVWSMDNMICTQTLLRHQGSVTALAVSRGRLFSGAVDSTVKVWTC

SEQ ID NO: 20012 - protein, 91 aa, Artificial Sequence
  Synthetic polypeptide
AALPLPGGRGRLTGPAPTSSTAGHPPPPAPLPTPRGTRRTACPPSALPAAPTPPSLSAPCTQSPACLCAPHSHCPRRRRSRSHWCLRSSPR

SEQ ID NO: 20013 - protein, 11 aa, Artificial Sequence
  Synthetic polypeptide
RRCRSRAAAGG

SEQ ID NO: 20014 - protein, 12 aa, Artificial Sequence
  Synthetic polypeptide
GGAAAPGRPRAA

SEQ ID NO: 20015 - protein, 12 aa, Artificial Sequence
  Synthetic polypeptide
AALPLPGGRGRL

SEQ ID NO: 20016 - protein, 112 aa, Artificial Sequence
  Synthetic polypeptide
GGAAAPGRPRAADGTSTYKQHCRTPSSSSTLAYSPRDEEDSMPPISTPRRSDSAISVRSLHSESSMSLRSTFSLPEEEEEPEPLVFAEQPSVKLCCQLCCSVFKDPVITTCG

SEQ ID NO: 20017 - protein, 18 aa, Artificial Sequence
  Synthetic polypeptide
RCQEGTCIPRQQRQRWKP

SEQ ID NO: 20018 - protein, 45 aa, Artificial Sequence
  Synthetic polypeptide
TSPPSLMLNCNHHCEGVKRGLVYPGSRGSDGSHEGPTGQPVLPKG

SEQ ID NO: 20019 - protein, 46 aa, Artificial Sequence
  Synthetic polypeptide
TVITTVKVSRGDLYTQAAEAAMEAMKGRLANQYYQKAEEAWAQMEE

SEQ ID NO: 20020 - protein, 6 aa, Artificial Sequence
  Synthetic polypeptide
PCVSST

SEQ ID NO: 20021 - protein, 8 aa, Artificial Sequence
  Synthetic polypeptide
CLNEPDPV

SEQ ID NO: 20022 - protein, 601 aa, Artificial Sequence
  Synthetic polypeptide
RIGLPSDVLMSLTLCELHLTPLHGILQLRPSFSYLDKADAKHREREAANEAGDSSQDEAEDDVKQITVRFSRPESEQARQRRVQSYEFLQKKHAEEPWVHLHYYGLRDSRSEHERQYLLCPGSSGVENTELVKSPSEYLMMLMPPSQEEEKDKPVAPSNVLSMAQLRTLPLADQIKILMKNVKVMPFANLMSLLGPSIDSVAVLRGIQKVAMLVQGNWVVKSDILYPKDSSSPHSGVPAEVLCRGRDFVMWKFTQSRWVVRKEVATVTKLCAEDVKDFLEHMAVVRINKGWEFILPYDGEFIKKHPDVVQRQHMLWTGIQAKLEKVYNLVKETMPKKPDAQSGPAGLVCGDQRIQVAKTKAQQNHALLERELQRRKEQLRVPAVPPGVRIKEEPVSEEGEEDEEQEAEEEPMDTSPSGLHSKLANGLPLGRAAGTDSFNGHPPQGCASTPVARELKAFVEATFQRQFVLTLSELKRLFNLHLASLPPGHTLFSGISDRMLQDTVLAAGCKQILVPFPPQTAASPDEQKVFALWESGDMSDQHRQVLLEIFSKNYRVRRNMIQSRLTQECGEDLSKQEVDKVLKDCCVSYGGMWYLKGTVQS

SEQ ID NO: 20023 - protein, 580 aa, Artificial Sequence
  Synthetic polypeptide
RIGLPSDVLMSLTLCELHLTPLHGILQLRPSFSYLDKADAKHREREAANEAGDSSQDEAEDDVKQITVRFSRPESEQARQRRVQSYEFLQKKHAEEPWVHLHYYGLRDSRSEHERQYLLCPGSSGVENTELVKSPSEYLMMLMPPSQEEEKDKPVAPSNVLSMAQLRTLPLADQIKILMKNVKVMPFANLMSLLGPSIDSVAVLRGIQKVAMLVQGNWVVKSDILYPKDSSSPHSGVPAEVLCRGRDFVMWKFTQSRWVVRKEVATVTKLCAEDVKDFLEHMAVVRINKGWEFILPYDGEFIKKHPDVVQRQHMLWTGIQAKLEKVYNLVKETMPKKPDAQSGPAGLVCGDQRIQVAKTKAQQNHALLERELQRRKEQLRVPAVPPGVRIKEEPVSEEGEEDEEQEAEEEPMDTSPSGLHSKLANGLPLGRAAGTDSFNGHPPQGCASTPVARELKAFVEATFQRQFVLTLSELKRLFNLHLASLPPGHTLFSGISDRMLQDTVLAAGCKQILVPFPPQTAASPDEQKVFALWESGDMSDQSRLTQECGEDLSKQEVDKVLKDCCVSYGGMWYLKGTVQS

SEQ ID NO: 20024 - protein, 26 aa, Artificial Sequence
  Synthetic polypeptide
RIGLPSDVLMSLTLCELHLTPLHGIL

SEQ ID NO: 20025 - protein, 559 aa, Artificial Sequence
  Synthetic polypeptide
RIGLPSDVLMSLTLCELHLTPLHGILQLRPSFSYLDKADAKHREREAANEAGDSSQDEAEDDVKQITVRFSRPESEQARQRRVQSYEFLQKKHAEEPWVHLHYYGLRDSRSEHERQYLLCPGSSGVENTELVKSPSEYLMMLMPPSQEEEKDKPVAPSNVLSMAQLRTLPLADQIKILMKNVKVMPFANLMSLLGPSIDSVAVLRGIQKVAMLVQGNWVVKSDILYPKDSSSPHSGVPAEVLCRGRDFVMWKFTQSRWVVRKEVATVTKLCAEDVKDFLEHMAVVRINKGWEFILPYDGEFIKKHPDVVQRQHMLWTGIQAKLEKVYNLVKETMPKKPDAQSGPAGLVCGDQRIQVAKTKAQQNHALLERELQRRKEQLRVPAVPPGVRIKEEPVSEEGEEDEEQEAEEEPMDTSPSGLHSKLANGLPLGRAAGTDSFNGHPPQGCASTPVARELKAFVEATFQRQFVLTLSELKRLFNLHLASLPPGHTLFSGISDRMLQDTVLAAGCKQILVPFPPQTAASPDEQKVFALWESGDMSDQDCCVSYGGMWYLKGTVQS

SEQ ID NO: 20026 - protein, 28 aa, Artificial Sequence
  Synthetic polypeptide
RIGLPSDVLMSLTLCELHLTPLHGILQL

SEQ ID NO: 20027 - protein, 20 aa, Artificial Sequence
  Synthetic polypeptide
NNRTTKKYGLLCKLWWHVVP

SEQ ID NO: 20028 - protein, 29 aa, Artificial Sequence
  Synthetic polypeptide
EPKTIEQQKNMDCCVSYGGMWYLKGTVQS

SEQ ID NO: 20029 - protein, 9 aa, Artificial Sequence
  Synthetic polypeptide
NNKKIWTAV

SEQ ID NO: 20030 - protein, 213 aa, Artificial Sequence
  Synthetic polypeptide
APFGSAFSRARAGHTMNTSPGTVGSDPVILATAGYDHTVRFWQAHSGICTRTVQHQDSQVNALEVTPDRSMIAAAGYQHIRMYDLNSNNPNPIISYDGVNKNIASVGFHEDGRWMYTGGEDCTARIWDLRSRNLQCQRIFQVNAPINCVCLHPNQAELIVGDQSGAIHIWDLKTDHNEQLIPEPEVSITSAHIDPDASYMAAVNSTAPRHLLG

SEQ ID NO: 20031 - protein, 20 aa, Artificial Sequence
  Synthetic polypeptide
NGNDKRHSAAPSLGPVQATP

SEQ ID NO: 20032 - protein, 46 aa, Artificial Sequence
  Synthetic polypeptide
VGRGWSTRPGAPEPGITRVTRVPEPTCASCPNSKMGMISAIRQRLL

SEQ ID NO: 20033 - protein, 648 aa, Artificial Sequence
  Synthetic polypeptide
LTMTVGATMHVKKYLLKGLHRLQKGPGYTYKELLVWYCDNTNTHGPKRIICEGPKKKAMWFLLTLLFAALVCWQWGIFIRTYLSWEVSVSLSVGFKTMDFPAVTICNASPFKYSKIKHLLKDLDELMEAVLERILAPELSHANATRNLNFSIWNHTPLVLIDERNPHHPMVLDLFGDNHNGLTSSSASEKICNAHGCKMAMRLCSLNRTQCTFRNFTSATQALTEWYILQATNIFAQVPQQELVEMSYPGEQMILACLFGAEPCNYRNFTSIFYPHYGNCYIFNWGMTEKALPSANPGTEFGLKLILDIGQEDYVPFLASTAGVRLMLHEQRSYPFIRDEGIYAMSGTETSIGVLVDKLQRMGEPYSPCTVNGSEVPVQNFYSDYNTTYSIQACLRSCFQDHMIRNCNCGHYLYPLPRGEKYCNNRDFPDWAHCYSDLQMSVAQRETCIGMCKESCNDTQYKMTISMADWPSEASEDWIFHVLSQERDQSTNITLSRKGIVKLNIYFQEFNYRTIEESAANNIVWLLSNLGGQFGFWMGGSVLCLIEFGEIIIDFVWITIIKLVALAKSLRQRRAQASYAGPPPTVAELVEAHTNFGFQPDTAPRSPNTGPYPSEQALPIPGTPPPNYDSLRLQPLDVIESDSEGDAI

SEQ ID NO: 20034 - protein, 7 aa, Artificial Sequence
  Synthetic polypeptide
LWVPLCT

SEQ ID NO: 20035 - protein, 71 aa, Artificial Sequence
  Synthetic polypeptide
VGERWPEARQSGFYFQTCPLTHHDCGCHYAREEVPAEGPASAAEGPRLHVQGAAGVVLRQHQHPRPQAHHL

SEQ ID NO: 20036 - protein, 152 aa, Artificial Sequence
  Synthetic polypeptide
GQEFKTSLANMIGQYIMSLPLNLEPFVTQEDSALELALHAGKLPFPPEQGDELPELDNMADNWLGSIARATMQTYCDAILQIPELSPHSAKQLATDIDYLINVMDALGLQPSRTLQHIVTLLKTRPEDYRQVSKGLPRRLATTVATMRSVNY

SEQ ID NO: 20037 - protein, 36 aa, Artificial Sequence
  Synthetic polypeptide
SQHFGRPRWADHLRSGVQDQPGQHDRAVHHVPPPES

SEQ ID NO: 20038 - protein, 85 aa, Artificial Sequence
  Synthetic polypeptide
GWVWWLTLVIPALWVAEAGGSLEVRSSKPPWSTWRSSSLLKMQKSGMCLISPALSSPYERSANWTTFLPTPSSRKIGRLFRTPLG

SEQ ID NO: 20039 - protein, 8 aa, Artificial Sequence
  Synthetic polypeptide
KCKNQVCV

SEQ ID NO: 20040 - protein, 362 aa, Artificial Sequence
  Synthetic polypeptide
GQEFETTLVNVAKLISTKNAKIRYVSDFTSTLQSIRKKCKLDHIPPNSLFQEDWTAFQNSIRIIATCGELLRHCGDFEQQLANRILSTAGKYLSDSCSPRSLAGFQESILTDKKNSAKNPWQEYNYLQKDNPAEYASLMEILYTLKEKGSSNHNLLAAPRAALTRLNQQAHQLAFDSVFLRIKQQLLLISKMDSWNTAGIGETLTDELPAFSLTPLEYISNIGQYIMSLPLNLEPFVTQEDSALELALHAGKLPFPPEQGDELPELDNMADNWLGSIARATMQTYCDAILQIPELSPHSAKQLATDIDYLINVMDALGLQPSRTLQHIVTLLKTRPEDYRQVSKGLPRRLATTVATMRSVNY

SEQ ID NO: 20041 - protein, 27 aa, Artificial Sequence
  Synthetic polypeptide
NAVPGLDLLNQDCLELGLESFRIQQAA

SEQ ID NO: 20042 - protein, 24 aa, Artificial Sequence
  Synthetic polypeptide
IKTAWSWAWSLSESSRLHEDLPPD

SEQ ID NO: 20043 - protein, 314 aa, Artificial Sequence
  Synthetic polypeptide
WFLVPGQLYQNHLEHWLKCGPWLGPSESRLLGAGPGVFQNPAGCMKTCPLIDLEVDNGPAQMGTVVPSLLHQDLAALGISDAPVTGMVSGQNCCEEKRNPSSSTLPGGGVQNPSADRNLLDLLSAQPAPCPLNYVSQKSVPKEVPPGTKSSPGWSWEAGPLAPSPSSQNTPLAQVFVPLESVKPSSLPPLIVYDRNGFRILLHFSQTGAPGHPEVQVLLLTMMSTAPQPVWDIMFQVAVPKSMRVKLQPASSSKLPAFSPLMPPAVISQMLLLDNPHKEPIRLRYKLTFNQGGQPFSEVGEVKDFPDLAVLGAA

SEQ ID NO: 20044 - protein, 45 aa, Artificial Sequence
  Synthetic polypeptide
NAVSTKNTKISWASRLMRAPAGAVLLGPTSNLSGWSCMPRPQKRC

SEQ ID NO: 20045 - protein, 41 aa, Artificial Sequence
  Synthetic polypeptide
SQHFERPRQVDHLRSGVQDQPGQHGETLSLLKIQKLAGHPA

SEQ ID NO: 20046 - protein, 426 aa, Artificial Sequence
  Synthetic polypeptide
LGIPPDESPRRGGPAGPYQQSQRLELYAQATEALLKTGAAYPCFCSPQRLELLKKEALRNHQTPRYDNRCRNMSQEQVAQKLAKDPKPAIRFRLEQVVPAFQDLVYGWNRHEVASVEGDPVIMKSDGFPTYHLACVVDDHHMGISHVLRGSEWLVSTAKHLLLYQALGWQPPHFAHLPLLLNRDGSKLSKRQGDVFLEHFAADGFLPDSLLDIITNCGSGFAENQMGRTLPELITQFNLTQVTCHSALLDLEKLPEFNRLHLQRLVSNESQRRQLVGKLQVLVEEAFGCQLQNRDVLNPVYVERILLLRQGHICRLQDLVSPVYSYLWTRPAVGRAQLDAISEKVDVIAKRVLGLLERSSMSLTQDMLNGELKKLSEGLEGTKYSNVMKLLRMALSGQQQGPPVAEMMLALGPKEVRERIQKVVSS

SEQ ID NO: 20047 - protein, 409 aa, Artificial Sequence
  Synthetic polypeptide
LGIPPDESPRRGGPAGPYQQSQRLELYAQATEALLKTGAAYPCFCSPQRLELLKKEALRNHQTPRYDNRCRNMSQEQVAQKLAKDPKPAIRFRLEQVVPAFQDLVYGWNRHEVASVEGDPVIMKSDGFPTYHLACVVDDHHMGISHVLRGSEWLVSTAKHLLLYQALGWQPPHFAHLPLLLNRDGSKLSKRQGDVFLEHFAADGFLPDSLLDIITNCGSGFAENQMGRTLPELITQFNLTQVTCHSALLDLEKLPEFNRLHLQRLVSNESQRRQLVGKLQVLVEEAFGCQLQNRDVLNPVYVERILLLRQGHICRLQDLVSPVYSYLWTRPAVGRAQLDAISEKVDVIAKRVLGLLERSSMSLTQDMLNGELKKLSEGLEGTKYSNVMKLLRMALSGQQALSSILSIQR

SEQ ID NO: 20048 - protein, 437 aa, Artificial Sequence
  Synthetic polypeptide
LGIPPDESPRRGGPAGPYQQSQRLELYAQATEALLKTGAAYPCFCSPQRLELLKKEALRNHQTPRYDNRCRNMSQEQVAQKLAKDPKPAIRFRLEQVVPAFQDLVYGWNRHEVASVEGDPVIMKSDGFPTYHLACVVDDHHMGISHVLRGSEWLVSTAKHLLLYQALGWQPPHFAHLPLLLNRDGSKLSKRQGDVFLEHFAADGFLPDSLLDIITNCGSGFAENQMGRTLPELITQFNLTQVTCHSALLDLEKLPEFNRLHLQRLVSNESQRRQLVGKLQVLVEEAFGCQLQNRDVLNPVYVERILLLRQGHICRLQDLVSPVYSYLWTRPAVGRAQLDAISEKVDVIAKRVLGLLERSSMSLTQDMLNGELKKLSEGLEGTKYSNVMKLLRMALSGQQVRQGHGLDCSLEPLIDPLNLHFLAGTELNIEYTKVNET

SEQ ID NO: 20049 - protein, 43 aa, Artificial Sequence
  Synthetic polypeptide
GQARWLTLVIPALWEAEASCTWVASALPCTTTSLLRSTRGASS

SEQ ID NO: 20050 - protein, 25 aa, Artificial Sequence
  Synthetic polypeptide
SQHFGRQRLLAPGWPPHCLVQLHLC

SEQ ID NO: 20051 - protein, 493 aa, Artificial Sequence
  Synthetic polypeptide
PGAVAHACNPSTLGGRGFLHLGGLRTALYNYIFAKKYQGSFILRLEDTDQTRVVPGAAENIEDMLEWAGIPPDESPRRGGPAGPYQQSQRLELYAQATEALLKTGAAYPCFCSPQRLELLKKEALRNHQTPRYDNRCRNMSQEQVAQKLAKDPKPAIRFRLEQVVPAFQDLVYGWNRHEVASVEGDPVIMKSDGFPTYHLACVVDDHHMGISHVLRGSEWLVSTAKHLLLYQALGWQPPHFAHLPLLLNRDGSKLSKRQGDVFLEHFAADGFLPDSLLDIITNCGSGFAENQMGRTLPELITQFNLTQVTCHSALLDLEKLPEFNRLHLQRLVSNESQRRQLVGKLQVLVEEAFGCQLQNRDVLNPVYVERILLLRQGHICRLQDLVSPVYSYLWTRPAVGRAQLDAISEKVDVIAKRVLGLLERSSMSLTQDMLNGELKKLSEGLEGTKYSNVMKLLRMALSGQQQGPPVAEMMLALGPKEVRERIQKVVSS

SEQ ID NO: 20052 - protein, 476 aa, Artificial Sequence
  Synthetic polypeptide
PGAVAHACNPSTLGGRGFLHLGGLRTALYNYIFAKKYQGSFILRLEDTDQTRVVPGAAENIEDMLEWAGIPPDESPRRGGPAGPYQQSQRLELYAQATEALLKTGAAYPCFCSPQRLELLKKEALRNHQTPRYDNRCRNMSQEQVAQKLAKDPKPAIRFRLEQVVPAFQDLVYGWNRHEVASVEGDPVIMKSDGFPTYHLACVVDDHHMGISHVLRGSEWLVSTAKHLLLYQALGWQPPHFAHLPLLLNRDGSKLSKRQGDVFLEHFAADGFLPDSLLDIITNCGSGFAENQMGRTLPELITQFNLTQVTCHSALLDLEKLPEFNRLHLQRLVSNESQRRQLVGKLQVLVEEAFGCQLQNRDVLNPVYVERILLLRQGHICRLQDLVSPVYSYLWTRPAVGRAQLDAISEKVDVIAKRVLGLLERSSMSLTQDMLNGELKKLSEGLEGTKYSNVMKLLRMALSGQQALSSILSIQR

SEQ ID NO: 20053 - protein, 504 aa, Artificial Sequence
  Synthetic polypeptide
PGAVAHACNPSTLGGRGFLHLGGLRTALYNYIFAKKYQGSFILRLEDTDQTRVVPGAAENIEDMLEWAGIPPDESPRRGGPAGPYQQSQRLELYAQATEALLKTGAAYPCFCSPQRLELLKKEALRNHQTPRYDNRCRNMSQEQVAQKLAKDPKPAIRFRLEQVVPAFQDLVYGWNRHEVASVEGDPVIMKSDGFPTYHLACVVDDHHMGISHVLRGSEWLVSTAKHLLLYQALGWQPPHFAHLPLLLNRDGSKLSKRQGDVFLEHFAADGFLPDSLLDIITNCGSGFAENQMGRTLPELITQFNLTQVTCHSALLDLEKLPEFNRLHLQRLVSNESQRRQLVGKLQVLVEEAFGCQLQNRDVLNPVYVERILLLRQGHICRLQDLVSPVYSYLWTRPAVGRAQLDAISEKVDVIAKRVLGLLERSSMSLTQDMLNGELKKLSEGLEGTKYSNVMKLLRMALSGQQVRQGHGLDCSLEPLIDPLNLHFLAGTELNIEYTKVNET

SEQ ID NO: 20054 - protein, 43 aa, Artificial Sequence
  Synthetic polypeptide
PGAVAHACNPSTLGGRGFLHLGGLRTALYNYIFAKKYQGSFIL

SEQ ID NO: 20055 - protein, 27 aa, Artificial Sequence
  Synthetic polypeptide
IPGGNRTCLNHLFLTSTSGLRNCPWAP

SEQ ID NO: 20056 - protein, 5 aa, Artificial Sequence
  Synthetic polypeptide
PALAD

SEQ ID NO: 20057 - protein, 112 aa, Artificial Sequence
  Synthetic polypeptide
KFFLNPWTSVAFFPLHIGDHVFIEEDCVVNAAQIGSYVHVGKNCVIGRRCVLKDCCKILDNTVLPPETVVPPFTVFSGCPGLFSGELPECTQELMIDVTKSYYQKFLPLTQV

SEQ ID NO: 20058 - protein, 40 aa, Artificial Sequence
  Synthetic polypeptide
IHGLVLHSFLYILETMSLLRKIVWSTQHRLVPMFMLGRTV

SEQ ID NO: 20059 - protein, 82 aa, Artificial Sequence
  Synthetic polypeptide
KFFLNPWTSVAFFPLHIGDHVFIEEDCVVNAAQIGSYVHVGKNCVIGRRCVLKDCCKILDNTVLPPETVVPPFTVFSGCPAP

SEQ ID NO: 20060 - protein, 23 aa, Artificial Sequence
  Synthetic polypeptide
KFFLNPWTSVAFFPLHIGDHVFI

SEQ ID NO: 20061 - protein, 19 aa, Artificial Sequence
  Synthetic polypeptide
IHGLVLHSFLYILETMSLL

SEQ ID NO: 20062 - protein, 85 aa, Artificial Sequence
  Synthetic polypeptide
KFFLNPWTSVAFFPLHIGDHVFIEEDCVVNAAQIGSYVHVGKNCVIGRRCVLKDCCKILDNTVLPPETVVPPFTVFSGCPGNLGC

SEQ ID NO: 20063 - protein, 71 aa, Artificial Sequence
  Synthetic polypeptide
KFFLNPWTSVAFFPLHIGDHVFIEEDCVVNAAQIGSYVHVGKNCVIGRRCVLKDCCKILDNTVLPPETVVP

SEQ ID NO: 20064 - protein, 627 aa, Artificial Sequence
  Synthetic polypeptide
KLFPPRVFAESGSHCLEYFFFSLHVCCFVVHKRCHEFVTFSCPGADKGPASDDPRSKHKFKIHTYSSPTFCDHCGSLLYGLIHQGMKCDTCMMNVHKRCVMNVPSLCGTDHTERRGRIYIQAHIDRDVLIVLVRDAKNLVPMDPNGLSDPYVKLKLIPDPKSESKQKTKTIKCSLNPEWNETFRFQLKESDKDRRLSVEIWDWDLTSRNDFMGSLSFGISELQKASVDGWFKLLSQEEGEYFNVPVPPEGSEANEELRQKFERAKISQGTKVPEEKTTNTVSKFDNNGNRDRMKLTDFNFLMVLGKGSFGKVMLSERKGTDELYAVKILKKDVVIQDDDVECTMVEKRVLALPGKPPFLTQLHSCFQTMDRLYFVMEYVNGGDLMYHIQQVGRFKEPHAVFYAAEIAIGLFFLQSKGIIYRDLKLDNVMLDSEGHIKIADFGMCKENIWDGVTTKTFCGTPDYIAPEIIAYQPYGKSVDWWAFGVLLYEMLAGQAPFEGEDEDELFQSIMEHNVAYPKSMSKEAVAICKGLMTKHPGKRLGCGPEGERDIKEHAFFRYIDWEKLERKEIQPPYKPKARDKRDTSNFDKEFTRQPVELTPTDKLFIMNLDQNEFAGFSYTNPEFVINV

SEQ ID NO: 20065 - protein, 85 aa, Artificial Sequence
  Synthetic polypeptide
NSFHPGSLQKVVPTAWNTFSSLYMFAALWCTSGAMNLSHSPALALTRVQPPMTPAANTSLRSTRTPAPRFVTTVGHCCMDSSTRG

SEQ ID NO: 20066 - protein, 34 aa, Artificial Sequence
  Synthetic polypeptide
TLSTQGLCRKWFPLPGILFLLFTCLLLCGAQAVP

SEQ ID NO: 20067 - protein, 629 aa, Artificial Sequence
  Synthetic polypeptide
KLFPPRVFAESGSHCLEYFFFSLHVCCFVVHKRCHEFVTFSCPGADKGPASDDPRSKHKFKIHTYSSPTFCDHCGSLLYGLIHQGMKCDTCMMNVHKRCVMNVPSLCGTDHTERRGRIYIQAHIDRDVLIVLVRDAKNLVPMDPNGLSDPYVKLKLIPDPKSESKQKTKTIKCSLNPEWNETFRFQLKESDKDRRLSVEIWDWDLTSRNDFMGSLSFGISELQKASVDGWFKLLSQEEGEYFNVPVPPEGSEANEELRQKFERAKISQGTKVPEEKTTNTVSKFDNNGNRDRMKLTDFNFLMVLGKGSFGKVMLSERKGTDELYAVKILKKDVVIQDDDVECTMVEKRVLALPGKPPFLTQLHSCFQTMDRLYFVMEYVNGGDLMYHIQQVGRFKEPHAVFYAAEIAIGLFFLQSKGIIYRDLKLDNVMLDSEGHIKIADFGMCKENIWDGVTTKTFCGTPDYIAPEIIAYQPYGKSVDWWAFGVLLYEMLAGQAPFEGEDEDELFQSIMEHNVAYPKSMSKEAVAICKGLMTKHPGKRLGCGPEGERDIKEHAFFRYIDWEKLERKEIQPPYKPKACGRNAENFDRFFTRHPPVLTPPDQEVIRNIDQSEFEGFSFVNSEFLKPEVKS

SEQ ID NO: 20068 - protein, 23 aa, Artificial Sequence
  Synthetic polypeptide
LTPVISAPWEAEVGESLEAKSLQ

SEQ ID NO: 20069 - protein, 25 aa, Artificial Sequence
  Synthetic polypeptide
SQHLGKRRLENHLKPRVCSKHWLLA

SEQ ID NO: 20070 - protein, 299 aa, Artificial Sequence
  Synthetic polypeptide
SQEFAVSIGYWHDPYIQHFVRLSKERKAPEINRGYFARVHGVSQLIKAFLRKTECHCQIVNLGAGMDTTFWRLKDEDLLPSKYFEVDFPMIVTRKLHSIKCKPPLSSPILELHSEDTLQMDGHILDSKRYAVIGADLRDLSELEEKLKKCNMNTQLPTLLIAECVLVYMTPEQSANLLKWAANSFERAMFINYEQVNMGDRFGQIMIENLRRRQCDLAGVETCKSLESQKERLLSNGWETASAVDMMELYNRLPRAEVSRIESLEFLDEMELLEQLMRHYCLCWATKGGNELGLKEITY

SEQ ID NO: 20071 - protein, 12 aa, Artificial Sequence
  Synthetic polypeptide
SQEFAVSIGYWH

SEQ ID NO: 20072 - protein, 244 aa, Artificial Sequence
  Synthetic polypeptide
SQEFAVSIGYWHDPYIQHFVRLSKERKAPEINRGYFARVHGVSQLIKAFLRKTECHCQIVNLGAGMDTTFWRLKDEDLLPSKYFEVDFPMIVTRKLHSIKLPTLLIAECVLVYMTPEQSANLLKWAANSFERAMFINYEQVNMGDRFGQIMIENLRRRQCDLAGVETCKSLESQKERLLSNGWETASAVDMMELYNRLPRAEVSRIESLEFLDEMELLEQLMRHYCLCWATKGGNELGLKEITY

SEQ ID NO: 20073 - protein, 76 aa, Artificial Sequence
  Synthetic polypeptide
SQEFAVSIGYWHDPYIQHFVRLSKERKAPEINRGKIFCSSPWCQSAYKGISTEDRMSLSNCQPWGRHGYHLLEIKG

SEQ ID NO: 20074 - protein, 100 aa, Artificial Sequence
  Synthetic polypeptide
SQEFAVSIGYWHDPYIQHFVRLSKERKAPEINRGYFARVHGVSQLIKAFLRKTECHCQIVNLGAGMDTTFWRLKDEDLLPSKYFEVDFPMIVTRKLHSIK

SEQ ID NO: 20075 - protein, 482 aa, Artificial Sequence
  Synthetic polypeptide
FCSSRKTAYRSGVHWGYEETKTFLDILRETRFYEALQACHRKSKLYGAVAEQLRECGFLRTPEQCRTKFKSLQKSYRKVKNGHVLESCAFYKEMDALINSRASAPSPSTPEEVPSPSRQERGGIEVEPQEPTGWEPEETSQEAVIEDSCSERMSEEEIVQEPEFQGPPGLLQSPNDFEIGSSIKEDPTQIVYKDMEQHRALIEKSKRVVSQSTDPSKYRKRECISGRQWENLQGIRQGKPMSQPRDLGKAVVHQRPFVGKRPYRLLKYGESFGRSTRLMCRMTHHKENPYKCGVCGKCFGRSRSLIRHQRIHTGEKPFKCLDCGKSFNDSSNFGAHQRIHTGEKPYRCGECGKCFSQSSSLIIHQRTHTGEKPYQCGECGKSFTNSSHFSAHRRVHTGENPYKCVDCEKSFNNCTRFREHRRIHTGEKPYGCAQCGKRFSKSSVLTKHREVHVREKPLPHPPSLYCPENPHKGKTDEFRKTF

SEQ ID NO: 20076 - protein, 76 aa, Artificial Sequence
  Synthetic polypeptide
MQNIVLSYRSFHLKVEDSMTSKNYSEHSSAPQGRLLTEVACTGAMKKPRLFLISSVRLGFMKRFKPVIGRANCMGL

SEQ ID NO: 20077 - protein, 25 aa, Artificial Sequence
  Synthetic polypeptide
HPKTTLNIVLLLKEDCLQKWRALGL

SEQ ID NO: 20078 - protein, 24 aa, Artificial Sequence
  Synthetic polypeptide
YKCDAQDFGWANNHGEDSKLLCDK

SEQ ID NO: 20079 - protein, 230 aa, Artificial Sequence
  Synthetic polypeptide
SPLDFSLLCQHDYSIPPPGNVMPKTLDGQITMEKTPSYFVTNEAPKRIHSMAKDIKLIVVVRNPVTRAISDYTQTLSKKPEIPTFEVLAFKNRTLGLIDASWSAIRIGIYALHLENWLQYFPLSQILFVSGERLIVDPAGEMAKVQDFLGLKRVVTEKHFYFNKTKGFPCLKKPEDSSAPRCLGKSKGRTHPRIDPDVIHRLRKFYKPFNLMFYQMTGQDFQWEQEEGDK

SEQ ID NO: 20080 - protein, 20 aa, Artificial Sequence
  Synthetic polypeptide
LPWISASCVNMITQSLHLEM

SEQ ID NO: 20081 - protein, 30 aa, Artificial Sequence
  Synthetic polypeptide
LLNPSTWKCDAQDFGWANNHGEDSKLLCDK

SEQ ID NO: 20082 - protein, 332 aa, Artificial Sequence
  Synthetic polypeptide
PTWRNPVSTENTARANSFVGTAQYVSPELLTEKSACKSSDLWALGCIIYQLVAGLPPFRAGNEYLIFQKIIKLEYDFPEKFFPKARDLVEKLLVLDATKRLGCEEMEGYGPLKAHPFFESVTWENLHQQTPPKLTAYLPAMSEDDEDCYGNYDNLLSQFGCMQVSSSSSSHSLSASDTGLPQRSGSNIEQYIHDLDSNSFELDLQFSEDEKRLLLEKQAGGNPWHQFVENNLILKMGPVDKRKGLFARRRQLLLTEGPHLYYVDPVNKVLKGEIPWSQELRPEAKNFKTFFVHTPNRTYYLMDPSGNAHKWCRKIQEVWRQRYQSHPDAAVQ

SEQ ID NO: 20083 - protein, 68 aa, Artificial Sequence
  Synthetic polypeptide
SQHFGRPRQADHLRSGVRDPPDQHGETLSLLKIQPGPTHSWEQRSTFLQSCSRRSPPVRVQTFGLLDA

SEQ ID NO: 20084 - protein, 26 aa, Artificial Sequence
  Synthetic polypeptide
KYSQGQLIRGNSAVRFSRAAHGEVRL

SEQ ID NO: 20085 - protein, 69 aa, Artificial Sequence
  Synthetic polypeptide
PTWRNPVSTENTARANSFVGTAQYVSPELLTEKSACKRPLGSWMHNIPACGRTPTIPSWKRVSYISEDH

SEQ ID NO: 20086 - protein, 99 aa, Artificial Sequence
  Synthetic polypeptide
SQHFGRPRQADHLRSGVRDPPDQHGETLSLLKIQPGPTHSWEQRSTFLQSCSRRSPPVRDLWALGCIIYQLVAGLPPFRAGNEYLIFQKIIKLEYDFPE

SEQ ID NO: 20087 - protein, 230 aa, Artificial Sequence
  Synthetic polypeptide
PTWRNPVSTENTARANSFVGTAQYVSPELLTEKSACKSSDLWALGCIIYQLVAGLPPFRAGNEYLIFQKIIKLEYDFPEKFFPKARDLVEKLLVLDATKRLGCEEMEGYGPLKAHPFFESVTWENLHQQTPPKLTAYLPAMSEDDEDCYGNYDNLLSQFGCMQVSSSSSSHSLSASDTGLPQRSGSNIEQYIHDLDSNSFELDLQFSEDEKRLLLEKQAGGNPCLTGRII

SEQ ID NO: 20088 - protein, 64 aa, Artificial Sequence
  Synthetic polypeptide
HEGRGVHPARPGHPGDGAIHPGDVPRRGEDLQYLSQPPHPGSKLRNLWDQDALTLRGQVLPVEC

SEQ ID NO: 20089 - protein, 116 aa, Artificial Sequence
  Synthetic polypeptide
GREFKTSLANMKEGEFTLHGRAILEMEQYIRETYPDAVKICNICHSLLIQGQSCETCGIRMHLPCVAKYFQSNAEPRCPHCNDYWPHEIPKVFDPEKERESGVLKSNKKSLRSRQH

SEQ ID NO: 20090 - protein, 54 aa, Artificial Sequence
  Synthetic polypeptide
HEGRGVHPARPGHPGDGAIHPGDVPRRGEDLQYLSQPPHPEVFDPEKERESGVL

SEQ ID NO: 20091 - protein, 63 aa, Artificial Sequence
  Synthetic polypeptide
GREFKTSLANMKEGEFTLHGRAILEMEQYIRETYPDAVKICNICHSLLIQKSSTLRRRGSLVS

SEQ ID NO: 20092 - protein, 5 aa, Artificial Sequence
  Synthetic polypeptide
LQSWN

SEQ ID NO: 20093 - protein, 18 aa, Artificial Sequence
  Synthetic polypeptide
VVLRPRCNDNNCRAGTDY

SEQ ID NO: 20094 - protein, 167 aa, Artificial Sequence
  Synthetic polypeptide
WFSGLDAMIITAELELIIDSETGFASSTNILNLVDQLKGKKMRKKEAEQVLQKFVQNKWLIEKEGEFTLHGRAILEMEQYIRETYPDAVKICNICHSLLIQGQSCETCGIRMHLPCVAKYFQSNAEPRCPHCNDYWPHEIPKVFDPEKERESGVLKSNKKSLRSRQH

SEQ ID NO: 20095 - protein, 94 aa, Artificial Sequence
  Synthetic polypeptide
WFSGLDAMIITAELELIIDSETGFASSTNILNLVDQLKGKKMRKKEAEQVLQKFVQNKWLIEEGEFTLHGRAILEMEQYIRETYPDAVKICNIC

SEQ ID NO: 20096 - protein, 45 aa, Artificial Sequence
  Synthetic polypeptide
WFSGLDAMIITAELELIIDSETGFASSTNILNLVDQLKGKKMRKK

SEQ ID NO: 20097 - protein, 39 aa, Artificial Sequence
  Synthetic polypeptide
WFSGLDAMIITAELELIIDSETGFASSTNILNLVDQLKG

SEQ ID NO: 20098 - protein, 58 aa, Artificial Sequence
  Synthetic polypeptide
PGCSKCHLGKAAAAASPGSLLERPGPSPHSRLLSPNLHFCQVPTESFARAHLTAGTDY

SEQ ID NO: 20099 - protein, 155 aa, Artificial Sequence
  Synthetic polypeptide
QLELIIDSETGFASSTNILNLVDQLKGKKMRKKEAEQVLQKFVQNKWLIEKEGEFTLHGRAILEMEQYIRETYPDAVKICNICHSLLIQGQSCETCGIRMHLPCVAKYFQSNAEPRCPHCNDYWPHEIPKVFDPEKERESGVLKSNKKSLRSRQH

SEQ ID NO: 20100 - protein, 11 aa, Artificial Sequence
  Synthetic polypeptide
ILCTCTFDSWN

SEQ ID NO: 20101 - protein, 82 aa, Artificial Sequence
  Synthetic polypeptide
QLELIIDSETGFASSTNILNLVDQLKGKKMRKKEAEQVLQKFVQNKWLIEEGEFTLHGRAILEMEQYIRETYPDAVKICNIC

SEQ ID NO: 20102 - protein, 33 aa, Artificial Sequence
  Synthetic polypeptide
QLELIIDSETGFASSTNILNLVDQLKGKKMRKK

SEQ ID NO: 20103 - protein, 27 aa, Artificial Sequence
  Synthetic polypeptide
QLELIIDSETGFASSTNILNLVDQLKG

SEQ ID NO: 20104 - protein, 1640 aa, Artificial Sequence
  Synthetic polypeptide
SHRFGRPRQEDLFSPEIQDQLRQHSQTLRKAERSWSCSREKKEGYAKDMVTDFDEKHDEYLILLQQRNRILKHLKSKDPVQLRLEHLEQGFSVYVNGANSELKSSPRKAIHSDFSRSASHTEGTHDYGRRTLFREAEEALRRSSRTAPSKVQRRGWHQKSVQIRTEAGPRLHIEPPVDYSDDFELCGDVTLQANNTSEDRPQELRRSLELSVNLQRKQKDCSSDEYDSIEEDILSEPEPEDPALVGHPRHDRPPSSGDWTQKDVHGEQETEGRSSPGPDTLVVLEFNPASKSHKRERNLSAKRKDNAEVFVPTKPEPNLTPQAPAVFPDQERMCSRPGSRRERPLSATRKTLCEAEYPEEDASAVLQAIQVENAALQRALLSRKAEQPASPLQDAEGPPAKPWTSLLEEKEETLELLPITTATTTQEPAGAAGGARAINQAMDRIGLLGSRQQQKLLKVLQAVESDSAHLGRVVSPTKEQVSDTEDKQRMRADEIKDAIYVTMEILSNWGNSWWVGLTEVEFFDLNDTKLYVSPHDVDIRNTATPGELGRLVNRNLAGKKDSSPWTCPFHPPLQLFFVIRNTRQLGDFHLAKIKVRNYWTADGDLDIGAKNVKLYVNRNLIFNGKLDKGDREAPADHSILVDQKNEKSEQLEEAMNAHSEESKGTHEMAGASGDKELGLGCSPPAETLADAKLSSQGNVSGKRKNSTNCRKDSLSQLEEYLRLSAVPTSMGDMPSAPATSPPVKCPPVHEEPSLIQQLENLMGRKICEPPGKTPSWLQPSPTGKDRKQGGRKPKPLWLSPEKPLAWKGRLPSDDVIGEGPGETEARDKGLRHEPGWGTSRSVNTKERPQRATTKVHSDDSDIFNQPPNRERPASGRRGSRKDAGSSSHGDDQPASREDTWSSRTPSRSRWRSEQEHTLHESWSSLSAFDRSHRGRISNTELPGDILDELLQQKSSRHSDLPPSKKGEQPGLSRGQDGYSGETDAGGDFKIPVLPYGQRLVIDIKSTWGDRHYVGLNGIEIFSSKGEPVQISNIKADPPDINILPAYGKDPRVVTNLIDGVNRTQDDMHVWLAPFTRGRSHSITIDFTHPCHVALIRIWNYNKSRIHSFRGVKDITMLLDTQCIFEGEIAKASGTLAGAPEHFGDTILFTTDDDILEAIFYSDEMFDLDVGSLDSLQDEEAMRRPSTADGEGDERPFTQAGLGADERIPELELPSSSPVPQVTTPEPGIYHGICLQLNFTASWGDLHYLGLTGLEVVGKEGQALPIHLHQISASPRDLNELPEYSDDSRALDKLIDGTNITMEDEHMWLIPFSPGLDHVVTIRLDRAESIAGLRFWNYNKSPEDTYRGAKIVHVSLDGLCVSPPEGFLIRKGPGNCHFDFAQEILFVDYLRAQLLPQPARRLDMRSLECASMDYEAPLMPCGFIFQFQLLTSWGDPYYIGLTGLELYDERGEKIPLSENNIAAFPDSVNSLEGVGGDVRTPDKLIDQVNDTSDGRHMWLAPILPGLVNRVYVIFDLPTTVSMIKLWNYAKTPHRGVKEFGLLVDDLLVYNGILAMVSHLVGGILPTCEPTVPYHTILFTEDRDIRHQEKHTTISNQAEDQDVQMMNENQIITNAKRKQSVVDPALRPKTCISEKETRRRRC

SEQ ID NO: 20105 - protein, 58 aa, Artificial Sequence
  Synthetic polypeptide
MGSVAHAYSPTALGGQDKRISSAQKFKTSFVNIVRLCERPREAGPAHERKRRVTLRTW

SEQ ID NO: 20106 - protein, 29 aa, Artificial Sequence
  Synthetic polypeptide
QDSTSTKRSDSAKGREKLVLLTREKGGLR

SEQ ID NO: 20107 - protein, 1630 aa, Artificial Sequence
  Synthetic polypeptide
DQPGQHSKTPPLQKGQTLRKAERSWSCSREKKEGYAKDMVTDFDEKHDEYLILLQQRNRILKHLKSKDPVQLRLEHLEQGFSVYVNGANSELKSSPRKAIHSDFSRSASHTEGTHDYGRRTLFREAEEALRRSSRTAPSKVQRRGWHQKSVQIRTEAGPRLHIEPPVDYSDDFELCGDVTLQANNTSEDRPQELRRSLELSVNLQRKQKDCSSDEYDSIEEDILSEPEPEDPALVGHPRHDRPPSSGDWTQKDVHGEQETEGRSSPGPDTLVVLEFNPASKSHKRERNLSAKRKDNAEVFVPTKPEPNLTPQAPAVFPDQERMCSRPGSRRERPLSATRKTLCEAEYPEEDASAVLQAIQVENAALQRALLSRKAEQPASPLQDAEGPPAKPWTSLLEEKEETLELLPITTATTTQEPAGAAGGARAINQAMDRIGLLGSRQQQKLLKVLQAVESDSAHLGRVVSPTKEQVSDTEDKQRMRADEIKDAIYVTMEILSNWGNSWWVGLTEVEFFDLNDTKLYVSPHDVDIRNTATPGELGRLVNRNLAGKKDSSPWTCPFHPPLQLFFVIRNTRQLGDFHLAKIKVRNYWTADGDLDIGAKNVKLYVNRNLIFNGKLDKGDREAPADHSILVDQKNEKSEQLEEAMNAHSEESKGTHEMAGASGDKELGLGCSPPAETLADAKLSSQGNVSGKRKNSTNCRKDSLSQLEEYLRLSAVPTSMGDMPSAPATSPPVKCPPVHEEPSLIQQLENLMGRKICEPPGKTPSWLQPSPTGKDRKQGGRKPKPLWLSPEKPLAWKGRLPSDDVIGEGPGETEARDKGLRHEPGWGTSRSVNTKERPQRATTKVHSDDSDIFNQPPNRERPASGRRGSRKDAGSSSHGDDQPASREDTWSSRTPSRSRWRSEQEHTLHESWSSLSAFDRSHRGRISNTELPGDILDELLQQKSSRHSDLPPSKKGEQPGLSRGQDGYSGETDAGGDFKIPVLPYGQRLVIDIKSTWGDRHYVGLNGIEIFSSKGEPVQISNIKADPPDINILPAYGKDPRVVTNLIDGVNRTQDDMHVWLAPFTRGRSHSITIDFTHPCHVALIRIWNYNKSRIHSFRGVKDITMLLDTQCIFEGEIAKASGTLAGAPEHFGDTILFTTDDDILEAIFYSDEMFDLDVGSLDSLQDEEAMRRPSTADGEGDERPFTQAGLGADERIPELELPSSSPVPQVTTPEPGIYHGICLQLNFTASWGDLHYLGLTGLEVVGKEGQALPIHLHQISASPRDLNELPEYSDDSRALDKLIDGTNITMEDEHMWLIPFSPGLDHVVTIRLDRAESIAGLRFWNYNKSPEDTYRGAKIVHVSLDGLCVSPPEGFLIRKGPGNCHFDFAQEILFVDYLRAQLLPQPARRLDMRSLECASMDYEAPLMPCGFIFQFQLLTSWGDPYYIGLTGLELYDERGEKIPLSENNIAAFPDSVNSLEGVGGDVRTPDKLIDQVNDTSDGRHMWLAPILPGLVNRVYVIFDLPTTVSMIKLWNYAKTPHRGVKEFGLLVDDLLVYNGILAMVSHLVGGILPTCEPTVPYHTILFTEDRDIRHQEKHTTISNQAEDQDVQMMNENQIITNAKRKQSVVDPALRPKTCISEKETRRRRC

SEQ ID NO: 20108 - protein, 44 aa, Artificial Sequence
  Synthetic polypeptide
AHEFETSLDNIARLHLYKKVRLCERPREAGPAHERKRRVTLRTW

SEQ ID NO: 20109 - protein, 65 aa, Artificial Sequence
  Synthetic polypeptide
ALARLHFALSTLPSPPQLTHSSFRFWFCYPLQRSFTCPLLKPLIAPASPTFRALTSYIWVTLRTW

SEQ ID NO: 20110 - protein, 7 aa, Artificial Sequence
  Synthetic polypeptide
RHTFGLR

SEQ ID NO: 20111 - protein, 1655 aa, Artificial Sequence
  Synthetic polypeptide
LSTPPLCFEHSPLSSTINPFILQVLVLLSSAAKLHLPPFKATHRPRLPHLPSTDVIHLGYAKDMVTDFDEKHDEYLILLQQRNRILKHLKSKDPVQLRLEHLEQGFSVYVNGANSELKSSPRKAIHSDFSRSASHTEGTHDYGRRTLFREAEEALRRSSRTAPSKVQRRGWHQKSVQIRTEAGPRLHIEPPVDYSDDFELCGDVTLQANNTSEDRPQELRRSLELSVNLQRKQKDCSSDEYDSIEEDILSEPEPEDPALVGHPRHDRPPSSGDWTQKDVHGEQETEGRSSPGPDTLVVLEFNPASKSHKRERNLSAKRKDNAEVFVPTKPEPNLTPQAPAVFPDQERMCSRPGSRRERPLSATRKTLCEAEYPEEDASAVLQAIQVENAALQRALLSRKAEQPASPLQDAEGPPAKPWTSLLEEKEETLELLPITTATTTQEPAGAAGGARAINQAMDRIGLLGSRQQQKLLKVLQAVESDSAHLGRVVSPTKEQVSDTEDKQRMRADEIKDAIYVTMEILSNWGNSWWVGLTEVEFFDLNDTKLYVSPHDVDIRNTATPGELGRLVNRNLAGKKDSSPWTCPFHPPLQLFFVIRNTRQLGDFHLAKIKVRNYWTADGDLDIGAKNVKLYVNRNLIFNGKLDKGDREAPADHSILVDQKNEKSEQLEEAMNAHSEESKGTHEMAGASGDKELGLGCSPPAETLADAKLSSQGNVSGKRKNSTNCRKDSLSQLEEYLRLSAVPTSMGDMPSAPATSPPVKCPPVHEEPSLIQQLENLMGRKICEPPGKTPSWLQPSPTGKDRKQGGRKPKPLWLSPEKPLAWKGRLPSDDVIGEGPGETEARDKGLRHEPGWGTSRSVNTKERPQRATTKVHSDDSDIFNQPPNRERPASGRRGSRKDAGSSSHGDDQPASREDTWSSRTPSRSRWRSEQEHTLHESWSSLSAFDRSHRGRISNTELPGDILDELLQQKSSRHSDLPPSKKGEQPGLSRGQDGYSGETDAGGDFKIPVLPYGQRLVIDIKSTWGDRHYVGLNGIEIFSSKGEPVQISNIKADPPDINILPAYGKDPRVVTNLIDGVNRTQDDMHVWLAPFTRGRSHSITIDFTHPCHVALIRIWNYNKSRIHSFRGVKDITMLLDTQCIFEGEIAKASGTLAGAPEHFGDTILFTTDDDILEAIFYSDEMFDLDVGSLDSLQDEEAMRRPSTADGEGDERPFTQAGLGADERIPELELPSSSPVPQVTTPEPGIYHGICLQLNFTASWGDLHYLGLTGLEVVGKEGQALPIHLHQISASPRDLNELPEYSDDSRALDKLIDGTNITMEDEHMWLIPFSPGLDHVVTIRLDRAESIAGLRFWNYNKSPEDTYRGAKIVHVSLDGLCVSPPEGFLIRKGPGNCHFDFAQEILFVDYLRAQLLPQPARRLDMRSLECASMDYEAPLMPCGFIFQFQLLTSWGDPYYIGLTGLELYDERGEKIPLSENNIAAFPDSVNSLEGVGGDVRTPDKLIDQVNDTSDGRHMWLAPILPGLVNRVYVIFDLPTTVSMIKLWNYAKTPHRGVKEFGLLVDDLLVYNGILAMVSHLVGGILPTCEPTVPYHTILFTEDRDIRHQEKHTTISNQAEDQDVQMMNENQIITNAKRKQSVVDPALRPKTCISEKETRRRRC

SEQ ID NO: 20112 - protein, 290 aa, Artificial Sequence
  Synthetic polypeptide
LSTPPLCFEHSPLSSTINPFILQVLVLLSSAAKLHLPPFKATHRPRLPHLPSTDVIHLGYAKDMVTDFDEKHDEYLILLQQRNRILKHLKSKDPVQLRLEHLEQGFSVYVNGANSELKSSPRKAIHSDFSRSASHTEGTHDYGRRTLFREAEEALRRSSRTAPSKVQRRGWHQKSVQIRTEAGPRLHIEPPVDYSDDFELCGDVTLQANNTSEDRPQDTKSPTSTKPCGFNFSLLNACGHSDPSSSVDKERILLTIQDVMELRRSLELSVNLQRKQKDCSSDEYDSIEED

SEQ ID NO: 20113 - protein, 1067 aa, Artificial Sequence
  Synthetic polypeptide
GQEMETILANKNLINKMWLGVPSQDKMEIRSCLPKLLLAHHKTLPYFIRNKLCKVIVDIGRQDWPMFYHDFFTNILQLIQSPVTTPLGLIMLKTTSEELACPREDLSVARKEELRKLLLDQVQTVLGLLTGILETVWDKHSVTAATPPPSPTSGESGDLLSNLLQSPSSAKLLNQPIPILDVESEYICSLALECLAHLFSWIPLSASITPSLLTTIFHFARFGCDIRARKMASVNGSSQNCVSGQERGRLGVLAMSCINELMSKNCVPMEFEEYLLRMFQQTFYLLQKITKDNNAHTVKSRLEELDESYIEKFTDFLRLFVSVHLRRIESYSQFPVVEFLTLLFKYTFHQPTHEGYFSCLDIWTLFLDYLTSKIKSRLGDKEAVLNRYEDALVLLLTEVLNRIQFRYNQAQLEELDDETLDDDQQTEWQRYLRQSLEVVAKVMELLPTHAFSTLFPVLQDNLEVYLGLQQFIVTSGSGHRLNITAENDCRRLHCSLRDLSSLLQAVGRLAEYFIGDVFAARFNDALTVVERLVKVTLYGSQIKLYNIETAVPSVLKPDLIDVHAQSLAALQAYSHWLAQYCSEVHRQNTQQFVTLISTTMDAITPLISTKVQDKLLLSACHLLVSLATTVRPVFLISIPAVQKVFNRITDASALRLVDKAQVLVCRALSNILLLPWPNLPENEQQWPVRSINHASLISALSRDYRNLKPSAVAPQRKMPLDDTKLIIHQTLSVLEDIVENISGESTKSRQICYQSLQESVQVSLALFPAFIHQSDVTDEMLSFFLTLFRGLRVQMGVPFTEQIIQTFLNMFTREQLAESILHEGSTGCRVVEKFLKILQVVVQEPGQVFKPFLPSIIALCMEQVYPIIAERPSPDVKAELFELLFRTLHHNWRYFFKSTVLASVQRGIAEEQMENEPQFSAIMQAFGQSFLQPDIHLFKQNLFYLETLNTKQKLYHKKIFRTAMLFQFVNVLLQVLVHKSHDLLQEEIGIAIYNMASVDFDGFFAAFLPEFLTSCDGVDANQKSVLGRNFKMDRDLPSFTQNVHRLVNDLRYYRLCNDSLPPGTVKL

SEQ ID NO: 20114 - protein, 34 aa, Artificial Sequence
  Synthetic polypeptide
PGAVAHACNPSTLGGRGGWINEVRRWRPSWLIRI

SEQ ID NO: 20115 - protein, 98 aa, Artificial Sequence
  Synthetic polypeptide
GQEMETILANKNLINKMWLGVPSQDKMEIRSCLPKLLLAHHKTLPYFIRNKLCKVIVDIGRQDWPMFYHDFFTNILQLIQSPVTTPLGLIMLKTTSEE

SEQ ID NO: 20116 - protein, 23 aa, Artificial Sequence
  Synthetic polypeptide
GQEMETILANKNLINKMWLGVPS

SEQ ID NO: 20117 - protein, 47 aa, Artificial Sequence
  Synthetic polypeptide
DQPGQHGETPALQKIQKSAGCGGVQLWSQLLGRLRHLKKPLSGHWKV

SEQ ID NO: 20118 - protein, 1185 aa, Artificial Sequence
  Synthetic polypeptide
WARWLVPLIPALLEAEAGGSLEPWSLRPAWATWRNPSSTKNTKISWMWWCAAVVPATWEAEASEEASLRALESLMTEFFHDCTTNERKREIEELLNNFAQQIGAWRFCLYFLSSTRNDYVMMYSLTVFENLINKMWLGVPSQDKMEIRSCLPKLLLAHHKTLPYFIRNKLCKVIVDIGRQDWPMFYHDFFTNILQLIQSPVTTPLGLIMLKTTSEELACPREDLSVARKEELRKLLLDQVQTVLGLLTGILETVWDKHSVTAATPPPSPTSGESGDLLSNLLQSPSSAKLLNQPIPILDVESEYICSLALECLAHLFSWIPLSASITPSLLTTIFHFARFGCDIRARKMASVNGSSQNCVSGQERGRLGVLAMSCINELMSKNCVPMEFEEYLLRMFQQTFYLLQKITKDNNAHTVKSRLEELDESYIEKFTDFLRLFVSVHLRRIESYSQFPVVEFLTLLFKYTFHQPTHEGYFSCLDIWTLFLDYLTSKIKSRLGDKEAVLNRYEDALVLLLTEVLNRIQFRYNQAQLEELDDETLDDDQQTEWQRYLRQSLEVVAKVMELLPTHAFSTLFPVLQDNLEVYLGLQQFIVTSGSGHRLNITAENDCRRLHCSLRDLSSLLQAVGRLAEYFIGDVFAARFNDALTVVERLVKVTLYGSQIKLYNIETAVPSVLKPDLIDVHAQSLAALQAYSHWLAQYCSEVHRQNTQQFVTLISTTMDAITPLISTKVQDKLLLSACHLLVSLATTVRPVFLISIPAVQKVFNRITDASALRLVDKAQVLVCRALSNILLLPWPNLPENEQQWPVRSINHASLISALSRDYRNLKPSAVAPQRKMPLDDTKLIIHQTLSVLEDIVENISGESTKSRQICYQSLQESVQVSLALFPAFIHQSDVTDEMLSFFLTLFRGLRVQMGVPFTEQIIQTFLNMFTREQLAESILHEGSTGCRVVEKFLKILQVVVQEPGQVFKPFLPSIIALCMEQVYPIIAERPSPDVKAELFELLFRTLHHNWRYFFKSTVLASVQRGIAEEQMENEPQFSAIMQAFGQSFLQPDIHLFKQNLFYLETLNTKQKLYHKKIFRTAMLFQFVNVLLQVLVHKSHDLLQEEIGIAIYNMASVDFDGFFAAFLPEFLTSCDGVDANQKSVLGRNFKMDRDLPSFTQNVHRLVNDLRYYRLCNDSLPPGTVKL

SEQ ID NO: 20119 - protein, 71 aa, Artificial Sequence
  Synthetic polypeptide
AQEFQAGGGYDSAYVGMTNSWMMARHWASVASPVKQHGHRPQPQWGWPSGQMTPLRPCASSRFPARQSCPM

SEQ ID NO: 20120 - protein, 49 aa, Artificial Sequence
  Synthetic polypeptide
GNFASKGSTTSQPWWHGPVVPATLKAEAGELLEPRSSKLEGAMIALMLG

SEQ ID NO: 20121 - protein, 119 aa, Artificial Sequence
  Synthetic polypeptide
RLCWDDQLLDDGKTLGECGFTSQTARPQAPATVGLAFRADDTFEALCIEPFSSPPELPDVMKPQDSGSSANEQAVHLHVHSQTMAKSRNTSWSQCPGLTACSTREPQDGPTQVHPRWGL

SEQ ID NO: 20122 - protein, 76 aa, Artificial Sequence
  Synthetic polypeptide
RLCWDDQLLDDGKTLGECGFTSQTARPQAPATVGLAFRADDTFEALCIEPFSSPPELPDVMKPQDSGSSANEQAVQ

SEQ ID NO: 20123 - protein, 62 aa, Artificial Sequence
  Synthetic polypeptide
GRRIQEAEAAVSQDHAIALQPGRQGRVPHDPAPQDHHLHGRQGVQHGVRTEAHRRGHPQAAS

SEQ ID NO: 20124 - protein, 173 aa, Artificial Sequence
  Synthetic polypeptide
AKITPLHSSLGDRDVFLMIRRHKTTIFTDAKESSTVFELKRIVEGILKRPPDEQRLYKDDQLLDDGKTLGECGFTSQTARPQAPATVGLAFRADDTFEALCIEPFSSPPELPDVMKPQDSGSSANEQAVHLHVHSQTMAKSRNTSWSQCPGLTACSTREPQDGPTQVHPRWGL

SEQ ID NO: 20125 - protein, 36 aa, Artificial Sequence
  Synthetic polypeptide
SQILGRLRQENPGGRGCSEPRSRHCTPAWETGTCSS

SEQ ID NO: 20126 - protein, 130 aa, Artificial Sequence
  Synthetic polypeptide
AKITPLHSSLGDRDVFLMIRRHKTTIFTDAKESSTVFELKRIVEGILKRPPDEQRLYKDDQLLDDGKTLGECGFTSQTARPQAPATVGLAFRADDTFEALCIEPFSSPPELPDVMKPQDSGSSANEQAVQ

SEQ ID NO: 20127 - protein, 153 aa, Artificial Sequence
  Synthetic polypeptide
AKITPLHSSLGDRDVFLMIRRHKTTIFTDAKESSTVFELKRIVEGILKRPPDEQRLYKLLVRSLWDLPHVGPLPRSCFSPQDDQLLDDGKTLGECGFTSQTARPQAPATVGLAFRADDTFEALCIEPFSSPPELPDVMKPQDSGSSANEQAVQ

SEQ ID NO: 20128 - protein, 78 aa, Artificial Sequence
  Synthetic polypeptide
AKITPLHSSLGDRDVFLMIRRHKTTIFTDAKESSTVFELKRIVEGILKRPPDEQRLYKMTPLRPCASSRFPARQSCPM

SEQ ID NO: 20129 - protein, 79 aa, Artificial Sequence
  Synthetic polypeptide
PHVTGHPPQMRTRRQPRRNGRTKLRRSTTGNPSAWMRRRRRTMKAGSGKGSGAECRWLRRSQKCLPRELRSPMLLLSRN

SEQ ID NO: 20130 - protein, 6 aa, Artificial Sequence
  Synthetic polypeptide
QGTHHR

SEQ ID NO: 20131 - protein, 676 aa, Artificial Sequence
  Synthetic polypeptide
QSLKLLEHHKWTIPHLTSCDRAPTTDEDKKAAEKKREDKAKKKHDRKSKRLDEEEEEDNEGGEWERVRGGVPLVKEKPKMFAKGTEITHAVVIKKLNEILQARGKKGTDRAAQIELLQLLVQIAAENNLGEGVIVKIKFNIIASLYDYNPNLATYMKPEMWGKCLDCINELMDILFANPNIFVGENILEESENLHNADQPLRVRGCILTLVERMDEEFTKIMQNTDPHSQEYVEHLKDEAQVCAIIERVQRYLEEKGTTEEVCRIYLLRILHTYYKFDYKAHQRQLTPPEGSSKSEQDQAENEGEDSAVLMERLCKYIYAKDRTDRIRTCAILCHIYHHALHSRWYQARDLMLMSHLQDNIQHADPPVQILYNRTMVQLGICAFRQGLTKDAHNALLDIQSSGRAKELLGQGLLLRSLQERNQEQEKVERRRQVPFHLHINLELLECVYLVSAMLLEIPYMAAHESDARRRMISKQFHHQLRVGERQPLLGPPESMREHVVAASKAMKMGDWKTCHSFIINEKMNGKVWDLFPEADKVRTMLVRKIQEESLRTYLFTYSSVYDSISMETLSDMFELDLPTVHSIISKMIINEELMASLDQPTQTVVMHRTEPTAQQNLALQLAEKLGSLVENNERVFDHKQGTYGGYFRDQKDGYRKNEGYMRRGGYRQQQSQTAY

SEQ ID NO: 20132 - protein, 18 aa, Artificial Sequence
  Synthetic polypeptide
GQEFETSMANKAIVAERG

SEQ ID NO: 20133 - protein, 893 aa, Artificial Sequence
  Synthetic polypeptide
LLEVKSLRPAWPIRPLLLSEDEEDTKRVVRSAKDKRFEELTNLIRTIRNAMKIRDVTKCLEEFELLGKAYGKAKSIVDKEGVPRFYIRILADLEDYLNELWEDKEGKKKMNKNNAKALSTLRQKIRKYNRDFESHITSYKQNPEQSADEDAEKNEEDSEGSSDEDEDEDGVSAATFLKKKSEAPSGESRKFLKKMDDEDEDSEDSEDDEDWDTGSTSSDSDSEEEEGKQTALASRFLKKAPTTDEDKKAAEKKREDKAKKKHDRKSKRLDEEEEDNEGGEWERVRGGVPLVKEKPKMFAKGTEITHAVVIKKLNEILQARGKKGTDRAAQIELLQLLVQIAAENNLGEGVIVKIKFNIIASLYDYNPNLATYMKPEMWGKCLDCINELMDILFANPNIFVGENILEESENLHNADQPLRVRGCILTLVERMDEEFTKIMQNTDPHSQEYVEHLKDEAQVCAIIERVQRYLEEKGTTEEVCRIYLLRILHTYYKFDYKAHQRQLTPPEGSSKSEQDQAENEGEDSAVLMERLCKYIYAKDRTDRIRTCAILCHIYHHALHSRWYQARDLMLMSHLQDNIQHADPPVQILYNRTMVQLGICAFRQGLTKDAHNALLDIQSSGRAKELLGQGLLLRSLQERNQEQEKVERRRQVPFHLHINLELLECVYLVSAMLLEIPYMAAHESDARRRMISKQFHHQLRVGERQPLLGPPESMREHVVAASKAMKMGDWKTCHSFIINEKMNGKVWDLFPEADKVRTMLVRKIQEESLRTYLFTYSSVYDSISMETLSDMFELDLPTVHSIISKMIINEELMASLDQPTQTVVMHRTEPTAQQNLALQLAEKLGSLVENNERVFDHKQGTYGGYFRDQKDGYRKNEGYMRRGGYRQQQSQTAY

SEQ ID NO: 20134 - protein, 128 aa, Artificial Sequence
  Synthetic polypeptide
LLEVKSLRPAWPIRPLLLSEDEEDTKRVVRSAKDKRFEELTNLIRTIRNAMKIRDVTKCLEEFELLGKAYGKAKSIVDKEGVPRFYIRILADLEDYLNELWEDKEGKKKMNKNNAKALSTLRQKIRKY

SEQ ID NO: 20135 - protein, 883 aa, Artificial Sequence
  Synthetic polypeptide
LLEVKSLRPAWPIRPLLLSEDEEDTKRVVRSAKDKRFEELTNLIRTIRNAMKIRDVTKCLEEFELLGKAYGKAKSIVDKEGVPRFYIRILADLEDYLNEMNKNNAKALSTLRQKIRKYNRDFESHITSYKQNPEQSADEDAEKNEEDSEGSSDEDEDEDGVSAATFLKKKSEAPSGESRKFLKKMDDEDEDSEDSEDDEDWDTGSTSSDSDSEEEEGKQTALASRFLKKAPTTDEDKKAAEKKREDKAKKKHDRKSKRLDEEEEDNEGGEWERVRGGVPLVKEKPKMFAKGTEITHAVVIKKLNEILQARGKKGTDRAAQIELLQLLVQIAAENNLGEGVIVKIKFNIIASLYDYNPNLATYMKPEMWGKCLDCINELMDILFANPNIFVGENILEESENLHNADQPLRVRGCILTLVERMDEEFTKIMQNTDPHSQEYVEHLKDEAQVCAIIERVQRYLEEKGTTEEVCRIYLLRILHTYYKFDYKAHQRQLTPPEGSSKSEQDQAENEGEDSAVLMERLCKYIYAKDRTDRIRTCAILCHIYHHALHSRWYQARDLMLMSHLQDNIQHADPPVQILYNRTMVQLGICAFRQGLTKDAHNALLDIQSSGRAKELLGQGLLLRSLQERNQEQEKVERRRQVPFHLHINLELLECVYLVSAMLLEIPYMAAHESDARRRMISKQFHHQLRVGERQPLLGPPESMREHVVAASKAMKMGDWKTCHSFIINEKMNGKVWDLFPEADKVRTMLVRKIQEESLRTYLFTYSSVYDSISMETLSDMFELDLPTVHSIISKMIINEELMASLDQPTQTVVMHRTEPTAQQNLALQLAEKLGSLVENNERVFDHKQGTYGGYFRDQKDGYRKNEGYMRRGGYRQQQSQTAY

SEQ ID NO: 20136 - protein, 6 aa, Artificial Sequence
  Synthetic polypeptide
QGTHHR

SEQ ID NO: 20137 - protein, 78 aa, Artificial Sequence
  Synthetic polypeptide
PHVTGHPPQMRTRRQPRRNGRTKLRRSTTGNPSAWMRRRRTMKAGSGKGSGAECRWLRRSQKCLPRELRSPMLLLSRN

SEQ ID NO: 20138 - protein, 675 aa, Artificial Sequence
  Synthetic polypeptide
QSLKLLEHHKWTIPHLTSCDRAPTTDEDKKAAEKKREDKAKKKHDRKSKRLDEEEEDNEGGEWERVRGGVPLVKEKPKMFAKGTEITHAVVIKKLNEILQARGKKGTDRAAQIELLQLLVQIAAENNLGEGVIVKIKFNIIASLYDYNPNLATYMKPEMWGKCLDCINELMDILFANPNIFVGENILEESENLHNADQPLRVRGCILTLVERMDEEFTKIMQNTDPHSQEYVEHLKDEAQVCAIIERVQRYLEEKGTTEEVCRIYLLRILHTYYKFDYKAHQRQLTPPEGSSKSEQDQAENEGEDSAVLMERLCKYIYAKDRTDRIRTCAILCHIYHHALHSRWYQARDLMLMSHLQDNIQHADPPVQILYNRTMVQLGICAFRQGLTKDAHNALLDIQSSGRAKELLGQGLLLRSLQERNQEQEKVERRRQVPFHLHINLELLECVYLVSAMLLEIPYMAAHESDARRRMISKQFHHQLRVGERQPLLGPPESMREHVVAASKAMKMGDWKTCHSFIINEKMNGKVWDLFPEADKVRTMLVRKIQEESLRTYLFTYSSVYDSISMETLSDMFELDLPTVHSIISKMIINEELMASLDQPTQTVVMHRTEPTAQQNLALQLAEKLGSLVENNERVFDHKQGTYGGYFRDQKDGYRKNEGYMRRGGYRQQQSQTAY

SEQ ID NO: 20139 - protein, 79 aa, Artificial Sequence
  Synthetic polypeptide
AEIAPLHSSLVESIDDYVNVPESGESAEASLDGSREYVNVSQELHPGAAKTEPAALSSQEAEEVEEEGAPDYENLQELN

SEQ ID NO: 20140 - protein, 34 aa, Artificial Sequence
  Synthetic polypeptide
ELRWEDHLSPGGQGCGEPRLHHCTPAWWSPLMIT

SEQ ID NO: 20141 - protein, 22 aa, Artificial Sequence
  Synthetic polypeptide
AQEVKVAVSRDCTTALQPGGVH

SEQ ID NO: 20142 - protein, 92 aa, Artificial Sequence
  Synthetic polypeptide
AEIAPLHSSLVESIDDYVNVPESGESAEASLDGSREYVNVSQELHPGAAKTEPVEAESVLEPGLPGTAELGSWKWLWGPHMASCPCSSLTTA

SEQ ID NO: 20143 - protein, 13 aa, Artificial Sequence
  Synthetic polypeptide
LCGNGGQDRGSLQ

SEQ ID NO: 20144 - protein, 117 aa, Artificial Sequence
  Synthetic polypeptide
EFCPLLTNYSFVEMVAKIAGLYNDLEPPRKTMRRGVLMTLLQQSAMTLPLWIGKPGDKPPPLCGAIPASGDYVARPGDKPQEDYSILFEDTSYADGYSPHLSVAQRYLVASKEPKKK

SEQ ID NO: 20145 - protein, 30 aa, Artificial Sequence
  Synthetic polypeptide
LTIALWKWWPRSRVSTMTWSHPGRPCAEGC

SEQ ID NO: 20146 - protein, 78 aa, Artificial Sequence
  Synthetic polypeptide
EFCPLLTNYSFVEMVAKIAGLYNDLEPPRKTMRRGVLMTLLQQSAMTLPLWIGKPGDKRLRGQTWRQGGCPGEGRGWG

SEQ ID NO: 20147 - protein, 106 aa, Artificial Sequence
  Synthetic polypeptide
EFCPLLTNYSFVEMVAKIAGLYNDLEPPRKTMRRGVLMTLLQQSAMTLPLWIGKPGDKPPPLCGAIPASGDYVARPGDKVAARVKAVDGDEQWILAEVVSYSHATN

SEQ ID NO: 20148 - protein, 176 aa, Artificial Sequence
  Synthetic polypeptide
GNKGPIANVFHADLQSGLALLLPPVTLAALVDSWLREDCPGLNYAALVSGAGPSQAALWAKSPGVLAGQPFFDAIFTQLNCQVSWFLPEGSKLVPVARVAEVRGPAHCLLLGERVALNTLARCSGIASAAAAAVEAARGAGWTGHVAGTRKTTPGFRLVEKYGLLVGGAASHRYDL

SEQ ID NO: 20149 - protein, 228 aa, Artificial Sequence
  Synthetic polypeptide
IVSKNHVFENYVMTLENTSNIMLSGEKSKLLLCNTYDFSFVIKIPNHICTYRETKDPSQMFSMLISKVAWRCCCRPSPWQPWWTAGSERTAQGSTTQPWSAGQAPRRRRCGPNPLGYWQGSLSSMPYLPNSTAKSPGSSPRDRSWCRWPEWPRSGALPTACCWGNGWPSTRWPAAVALPVLPPLQWRPPGGPAGLGTWQARGRPRQASGWWRSMGSWWAGPPRTATTW

SEQ ID NO: 20150 - protein, 164 aa, Artificial Sequence
  Synthetic polypeptide
SPKWPGAAAAARHPGSPGGQLAPRGLPRAQLRSLGQRGRPLAGGAVGQIPWGTGRAAFLRCHIYPTQLPSLLVPPRGIEAGAGGQSGRGPGPCPLPAAGGTGGPQHAGPLQWHCQCCRRCSGGRQGGRLDWARGRHEEDHARLPAGGEVWAPGGRGRLAPLRPG

SEQ ID NO: 20151 - protein, 309 aa, Artificial Sequence
  Synthetic polypeptide
GNKGPIANVFHADLQSGLALLLPPVTLAALVDSWLREDCPGLNYAALVSGAGPSQAALWAKSPGVLAGQPFFDAIFTQLNCQVSWFLPEGSKLVPVARVAEVRGPAHCLLLGERVALNTLARCSGIASAAAAAVEAARGAGWTGHVAGTRKTTPGFRLVEKYGLLVGGAASHRYDLGGLVMVKDNHVVAAGGVEKAVRAARQAADFTLKVEVECSSLQEAVQAAEAGADLVLLDNFKPEELHPTATVLKAQFPSVAVEASGGITLDNLPQFCGPHIDVISMGMLTQAAPALDFSLKLFAKEVAPVPKIH

SEQ ID NO: 20152 - protein, 231 aa, Artificial Sequence
  Synthetic polypeptide
IVSKNHVFENYVMTLENTSNIMLSGEKSKLLLCNTYDFSFVIKIPNHICTYRETKDPSQMFSMLISKVAWRCCCRPSPWQPWWTAGSERTAQGSTTQPWSAGQAPRRRRCGPNPLGYWQGSLSSMPYLPNSTAKSPGSSPRDRSWCRWPEWPRSGALPTACCWGNGWPSTRWPAAVALPVLPPLQWRPPGGPAGLGTWQARGRPRQASGWWRSMGSWWAGPPRTATTWEGW

SEQ ID NO: 20153 - protein, 171 aa, Artificial Sequence
  Synthetic polypeptide
SPKWPGAAAAARHPGSPGGQLAPRGLPRAQLRSLGQRGRPLAGGAVGQIPWGTGRAAFLRCHIYPTQLPSLLVPPRGIEAGAGGQSGRGPGPCPLPAAGGTGGPQHAGPLQWHCQCCRRCSGGRQGGRLDWARGRHEEDHARLPAGGEVWAPGGRGRLAPLRPGRAGDGEG

SEQ ID NO: 20154 - protein, 161 aa, Artificial Sequence
  Synthetic polypeptide
GNKGPIANVFHADLQSGLALLLPPVTLAALVDSWLREDCPGLNYAALAVRAARQAADFTLKVEVECSSLQEAVQAAEAGADLVLLDNFKPEELHPTATVLKAQFPSVAVEASGGITLDNLPQFCGPHIDVISMGMLTQAAPALDFSLKLFAKEVAPVPKIH

SEQ ID NO: 20155 - protein, 111 aa, Artificial Sequence
  Synthetic polypeptide
IVSKNHVFENYVMTLENTSNIMLSGEKSKLLLCNTYDFSFVIKIPNHICTYRETKDPSQMFSMLISKVAWRCCCRPSPWQPWWTAGSERTAQGSTTQPWRCGRPDRRLTSL

SEQ ID NO: 20156 - protein, 43 aa, Artificial Sequence
  Synthetic polypeptide
SPKWPGAAAAARHPGSPGGQLAPRGLPRAQLRSLGGAGGQTGG

SEQ ID NO: 20157 - protein, 25 aa, Artificial Sequence
  Synthetic polypeptide
GNKGPIANVFHADLQSGGAGGQTGG

SEQ ID NO: 20158 - protein, 182 aa, Artificial Sequence
  Synthetic polypeptide
IVSKNHVFENYVMTLENTSNIMLSGEKSKLLLCNTYDFSFVIKIPNHICTYRETKDPSQMFSMLISKVAVRAARQAADFTLKVEVECSSLQEAVQAAEAGADLVLLDNFKPEELHPTATVLKAQFPSVAVEASGGITLDNLPQFCGPHIDVISMGMLTQAAPALDFSLKLFAKEVAPVPKIH

SEQ ID NO: 20159 - protein, 16 aa, Artificial Sequence
  Synthetic polypeptide
SPKWRCGRPDRRLTSL

SEQ ID NO: 20160 - protein, 135 aa, Artificial Sequence
  Synthetic polypeptide
GFFTEGSGMGSGGVHEPQNLQAVRAARQAADFTLKVEVECSSLQEAVQAAEAGADLVLLDNFKPEELHPTATVLKAQFPSVAVEASGGITLDNLPQFCGPHIDVISMGMLTQAAPALDFSLKLFAKEVAPVPKIH

SEQ ID NO: 20161 - protein, 33 aa, Artificial Sequence
  Synthetic polypeptide
DSLLRDQGWALGEFMNPRICRRCGRPDRRLTSL

SEQ ID NO: 20162 - protein, 14 aa, Artificial Sequence
  Synthetic polypeptide
TPEFAGGAGGQTGG

SEQ ID NO: 20163 - protein, 96 aa, Artificial Sequence
  Synthetic polypeptide
SQLLGRLRQENPLNPGSRGCSELRLWPLHSSLGDTARLRLKPPTEAKQHGPGHAGAPPQLGPSACLPGEPGGPSVEYPKARADGANEDSGREGPRD

SEQ ID NO: 20164 - protein, 256 aa, Artificial Sequence
  Synthetic polypeptide
DCGHCTPAWATQQDSVSNPLQKLSSMDPAMLERLLSLDRLLASQGSQGAPLLSTPKRERMVLMKTVEEKDLEIERLKTKQKELEAKMLAQKAEEKENHCPTMLRPLSHRTVTGAKPLKKAVVMPLQLIQEQAASPNAEIHILKNKGRKRKLESLDALEPEEKAEDCWELQISPELLAHGRQKILDLLNEGSARDLRSLQRIGPKKAQLIVGWRELHGPFSQVEDLERVEGITGKQMESFLKANILGLAAGQRCGAS

SEQ ID NO: 20165 - protein, 24 aa, Artificial Sequence
  Synthetic polypeptide
AEIVAIALQPGRHSKTPSQTPYRS

SEQ ID NO: 20166 - protein, 270 aa, Artificial Sequence
  Synthetic polypeptide
DCGHCTPAWATQQDSVSNPLQKLSSMDPAMLERLLSLDRLLASQGSQGAPLLSTPKRERMVLMKTVEEKDLEIERLKTKQKELEAKMLAQKAEEKENHCPTMLRPLSHRTVTGAKPLKKAVVMPLQLIQEQAASPNAEIHILKNKGRKRKVKVAGGLGYTWSPELESLDALEPEEKAEDCWELQISPELLAHGRQKILDLLNEGSARDLRSLQRIGPKKAQLIVGWRELHGPFSQVEDLERVEGITGKQMESFLKANILGLAAGQRCGAS

SEQ ID NO: 20167 - protein, 395 aa, Artificial Sequence
  Synthetic polypeptide
GGDRGRGGRRGSFSVERGPRKERETAQSGMWKGNSPAGSQGAAMEGTGGELGGQGNWGPEDAPGLLARASLIMLPWPLPLASSALTLLFGALTSLFLWYCYRLGSQDMQALGAGSRAGGVRGGPVGCSEAGGPSPGGPGDPGEGPRTEGLVSRRLRAYARRYSWAGMGRVRRAAQGGPGPGRGPGVLGIQRPGLLFLPDLPSAPFVPRDAQRHDVELLESSFPAILRDFGAVSWDFSGTTPPPRGWSPPLAPGCYQLLLYQAGRCQPSNCRRCPGAYRALRGLRSFMSANTFGNAGFSVLLPGARLEGRCGPTNARVRCHLGLKIPPGCELVVGGEPQCWAEGHCLLVDDSFLHTVAHNGSPEDGPRVVFIVDLWHPNVAGAERQALDFVFAPDP

SEQ ID NO: 20168 - protein, 111 aa, Artificial Sequence
  Synthetic polypeptide
GGSGERERAKSGGGEERGRLRWEREAERERGGCWKEKEEGEEATEGEEEEEGASAWREDRGRRERQPRVECGRETVQRGARGQPWKGQVGSWGDRGTGVRRTPQASWPGPP

SEQ ID NO: 20169 - protein, 165 aa, Artificial Sequence
  Synthetic polypeptide
GGREKQSEREEAAGRRKKRVRRRQRERRKKRELQRGERTAEGERDSPEWNVEGKQSSGEPGGSHGRDRWGAGGTGELGSGGRPRPLGQGLPDHAPVATTPGLLGPHLALRGPHFPVPLVLLPPGLPRHAGPRGWEPSWGCSWWACGMLGGRRAKPRGSWGSRGRT

SEQ ID NO: 20170 - protein, 207 aa, Artificial Sequence
  Synthetic polypeptide
GGDRGRGGRRDLPSAPFVPRDAQRHDVELLESSFPAILRDFGAVSWDFSGTTPPPRGWSPPLAPGCYQLLLYQAGRCQPSNCRRCPGAYRALRGLRSFMSANTFGNAGFSVLLPGARLEGRCGPTNARVRCHLGLKIPPGCELVVGGEPQCWAEGHCLLVDDSFLHTVAHNGSPEDGPRVVFIVDLWHPNVAGAERQALDFVFAPDP

SEQ ID NO: 20171 - protein, 84 aa, Artificial Sequence
  Synthetic polypeptide
GGSGERERAKSGGGEERGRLRWEREAERERGGCWKEKEEGEEATEGEEEEETCLQPPLCRGTPSGTTWSSWRAASLPFCGTSGL

SEQ ID NO: 20172 - protein, 161 aa, Artificial Sequence
  Synthetic polypeptide
GGREKQSEREEAAGRRKKRVRRRQRERRKKRPAFSPLCAAGRPAARRGAPGEQLPCHFAGLRGCELGLLRDYPSASGLVPTSGPRVLPAPAVPSRPVPTQQLPPVPGGLSGTEGASKLYECQHLRQCRLFRSPAWGPARGPLWAHQCPGQMPSGPKDPSWL

SEQ ID NO: 20173 - protein, 62 aa, Artificial Sequence
  Synthetic polypeptide
AQEFETSLGNIVGPDLCGISRGPDLRGDPEHPHLRDSPGPRPSPPGGHRGSSWSWWGWPRGG

SEQ ID NO: 20174 - protein, 113 aa, Artificial Sequence
  Synthetic polypeptide
WLTPVTPGLWEAKAGGSLEPRSSRPAWATSWDLISVEFPEARIFEETLNILIYETPRGPDPALLEATGGAAGAGGAGRGEDEENREHRVRRIHVRRHITHDERPHGQQIVFKD

SEQ ID NO: 20175 - protein, 14 aa, Artificial Sequence
  Synthetic polypeptide
SLWNFQRPGSSRRP

SEQ ID NO: 20176 - protein, 26 aa, Artificial Sequence
  Synthetic polypeptide
KHHLKEASHKAHRVDIKDVRLDGESQ

SEQ ID NO: 20177 - protein, 54 aa, Artificial Sequence
  Synthetic polypeptide
NTVYLYDEILSIKRNEVLTHATMRMHLENTILKKPVTKHTEWTSKTSDWMASPS

SEQ ID NO: 20178 - protein, 22 aa, Artificial Sequence
  Synthetic polypeptide
RSQSQSTQSGHQRRQTGWRVPV

SEQ ID NO: 20179 - protein, 68 aa, Artificial Sequence
  Synthetic polypeptide
KHHLKEASHKAHRVDIKDVRLDASMVFASPQEVSQEEFLDGVLMSAENSAQSWRLQTQLSWGRAVAPS

SEQ ID NO: 20180 - protein, 96 aa, Artificial Sequence
  Synthetic polypeptide
NTVYLYDEILSIKRNEVLTHATMRMHLENTILKKPVTKHTEWTSKTSDWMHRWSSRLLRRSPRRNSWMVSSCRRRTVLRAGACRRSCRGAGRWRLP

SEQ ID NO: 20181 - protein, 64 aa, Artificial Sequence
  Synthetic polypeptide
RSQSQSTQSGHQRRQTGCIDGLRVSSGGLPGGILGWCPHVGGEQCSELALADAAVVGQGGGAFL

SEQ ID NO: 20182 - protein, 181 aa, Artificial Sequence
  Synthetic polypeptide
HPGQHNSDATASSDNSETEGTPKLSDTPAPKRKRSPPLGGAPSPSSLSLPPSTGFPLQASGVPSPYLSSLASSRYPPFPSDYLALQLPEPSPLRPKREKRPRLPRKLKMAVGPPDCPVGGPLTFPGRGSGAGVGTTLTPLPPPKMPPPTILSTVPRQMFSDAGSGDDALDGDDDLVIDIPE

SEQ ID NO: 20183 - protein, 66 aa, Artificial Sequence
  Synthetic polypeptide
ILGNITQMPLHHQITARRRGHPSCLTHRPLRGREALRWGAPPLPPASPCLLQQGFPFRPPGSPPHT

SEQ ID NO: 20184 - protein, 142 aa, Artificial Sequence
  Synthetic polypeptide
HPGQHNSDATASSDNSETEGTPKLSDTPAPKRKRSPPLGGAPSPSSLSLPPSTGFPLQASGVPSPYLSSMAVGPPDCPVGGPLTFPGRGSGAGVGTTLTPLPPPKMPPPTILSTVPRQMFSDAGSGDDALDGDDDLVIDIPE

SEQ ID NO: 20185 - protein, 110 aa, Artificial Sequence
  Synthetic polypeptide
HPGQHNSDATASSDNSETEGTPKLSDTPAPKRKRSPPLGGAPSPSSLSLPPSTGFPLQASGVPSPYLSSLASSRYPPFPSDYLALQLPEPSPLRPKREKRPRLPRKLKVP

SEQ ID NO: 20186 - protein, 74 aa, Artificial Sequence
  Synthetic polypeptide
HPGQHNSDATASSDNSETEGTPKLSDTPAPKRKRSPPLGGAPSPSSLSLPPSTGFPLQASGVPSPYLSSERGQA

SEQ ID NO: 20187 - protein, 164 aa, Artificial Sequence
  Synthetic polypeptide
HPGQHNSDATASSDNSETEGTPKLSDTPAPKRKRSPPLGGAPSPSSLSLPPSTGFPLQASGVPSPYLSSLPEPSPLRPKREKRPRLPRKLKMAVGPPDCPVGGPLTFPGRGSGAGVGTTLTPLPPPKMPPPTILSTVPRQMFSDAGSGDDALDGDDDLVIDIPE

SEQ ID NO: 20188 - protein, 125 aa, Artificial Sequence
  Synthetic polypeptide
HPGQHNSDATASSDNSETEGTPKLSDTPAPKRKRSPPLGGAPSPSSLSLPPSTGFPLQASGVPSPYLSSLASSRYPPFPSDYLALQLPEPSPLRPKREKRPRLPRKLKTLVVREQTERWSELGRE

SEQ ID NO: 20189 - protein, 314 aa, Artificial Sequence
  Synthetic polypeptide
EAALGTLEFDLLYDRASCTLHCSILRAKGLKPMDFNGLADPYVKLHLLPGACKANKLKTKTQRNTLNPVWNEDLTYSGITDDDITHKVLRIAVCDEDKLSHNEFIGEIRVPLRRLKPSQKKHFNICLERQVPLASPSSMSAALRGISCYLKELEQAEQGQGLLEERGRILLSLSYSSRRRGLLVGILRCAHLAAMDVNGYSDPYVKTYLRPDVDKKSKHKTCVKKKTLNPEFNEEFFYEIELSTLATKTLEVTVWDYDIGKSNDFIGGVSLGPGARGEARKHWSDCLQQPDAALERWHTLTSELPPAAGALSSA

SEQ ID NO: 20190 - protein, 15 aa, Artificial Sequence
  Synthetic polypeptide
SRGQEIETILAKKPP

SEQ ID NO: 20191 - protein, 20 aa, Artificial Sequence
  Synthetic polypeptide
HEVRRSRPSWLRSRPRHAGV

SEQ ID NO: 20192 - protein, 132 aa, Artificial Sequence
  Synthetic polypeptide
EAALGTLEFDLLYDRASCTLHCSILRAKGLKPMDFNGLADPYVKLHLLPGACKANKLKTKTQRNTLNPVWNEDLTYSGITDDDITHKVLRIAVCDEDKLSHNEFIGEIRVPLRRLKPSQKKHFNICLERQVP

SEQ ID NO: 20193 - protein, 90 aa, Artificial Sequence
  Synthetic polypeptide
EAALGTLEFDLLYDRASCTLHCSILRAKGLKPMDFNGLADPYVKLHLLPGACKANKLKTKTQRNTLNPVWNEDLTYSGITDDDITHKVLR

SEQ ID NO: 20194 - protein, 31 aa, Artificial Sequence
  Synthetic polypeptide
AEIAPPHSRLGDRVCGDIHGQFYDLKELFRV

SEQ ID NO: 20195 - protein, 20 aa, Artificial Sequence
  Synthetic polypeptide
ATECAATSMDNSMTSKSCSE

SEQ ID NO: 20196 - protein, 31 aa, Artificial Sequence
  Synthetic polypeptide
TQEAELAVSRDRATALQARRQSVRRHPWTIL

SEQ ID NO: 20197 - protein, 270 aa, Artificial Sequence
  Synthetic polypeptide
AEIAPPHSRLGDRVCGDIHGQFYDLKELFRVGGDVPETNYLFMGDFVDRGFYSVETFLLLLALKVRYPDRITLIRGNHESRQITQVYGFYDECLRKYGSVTVWRYCTEIFDYLSLSAIIDGKIFCVHGGLSPSIQTLDQIRTIDRKQEVPHDGPMCDLLWSDPEDTTGWGVSPRGAGYLFGSDVVAQFNAANDIDMICRAHQLVMEGYKWHFNETVLTVWSAPNYCYRCGNVAAILELDEHLQKDFIIFEAAPQETRGIPSKKPVADYFL

SEQ ID NO: 20198 - protein, 83 aa, Artificial Sequence
  Synthetic polypeptide
AEIAPPHSRLGDRVCGDIHGQFYDLKELFRVGGDVPETNYLFMGDFVDRGFYSVETFLLLLALKVAVPGFCTPNLGDLGPGLS

SEQ ID NO: 20199 - protein, 230 aa, Artificial Sequence
  Synthetic polypeptide
AEIAPPHSRLGDRVCGDIHGQFYDLKELFRVRYPDRITLIRGNHESRQITQVYGFYDECLRKYGSVTVWRYCTEIFDYLSLSAIIDGKIFCVHGGLSPSIQTLDQIRTIDRKQEVPHDGPMCDLLWSDPEDTTGWGVSPRGAGYLFGSDVVAQFNAANDIDMICRAHQLVMEGYKWHFNETVLTVWSAPNYCYRCGNVAAILELDEHLQKDFIIFEAAPQETRGIPSKKP

SEQ ID NO: 20200 - protein, 28 aa, Artificial Sequence
  Synthetic polypeptide
ATECAATSMDNSMTSKSCSEFAILIASH

SEQ ID NO: 20201 - protein, 166 aa, Artificial Sequence
  Synthetic polypeptide
AEIAPPHSRLGDRVCGDIHGQFYDLKELFRVRYPDRITLIRGNHESRQITQVYGFYDECLRKYGSVTVWRYCTEIFDYLSLSAIIDGKIFCVHGGLSPSIQTLDQIRTIDRKQEVPHDGPMCDLLWSDPEDTTGWGVSPRGAGYLFGSDVVAQFNAANDIDMICRA

SEQ ID NO: 20202 - protein, 92 aa, Artificial Sequence
  Synthetic polypeptide
SQHFGRPRQADHLRSGVRDQPGYHVTQTVTCSRGATWLRQRRASTGATATSPPVTCQATWDALWTQGHPQPSAAPAAPPRSSRSRCAYASAA

SEQ ID NO: 20203 - protein, 405 aa, Artificial Sequence
  Synthetic polypeptide
PGAVAQPVIPALWEAKAGGSSEVRSSRPAWLPCNPDGDVQPWCYVAETEEGIYWRYCDIPSCHMPGYLGCFVDSGAPPALSGPSGTSTKLTVQVCLRFCRMKGYQLAGVEAGYACFCGSESDLARGRLAPATDCDQICFGHPGQLCGGDGRLGVYEVSVGSCQGNWTAPQGVIYSPDFPDEYGPDRNCSWALGPPGAALELTFRLFELADPRDRLELRDAASGSLLRAFDGARPPPSGPLRLGTAALLLTFRSDARGHAQGFALTYRGLQDAAEDPEAPEGSAQTPAAPLDGANVSCSPRPGAPPAAIGARVFSTVTAVSVLLLLLLGLLRPLRRRSCLLAPGKGPPALGASRGPRRSWAVWYQQPRGVALPCSPGDPQAEGSAAGYRPLSASSQSSLRSLISAL

SEQ ID NO: 20204 - protein, 342 aa, Artificial Sequence
  Synthetic polypeptide
PGAVAQPVIPALWEAKAGGSSEVRSSRPAWLPCNPDGDVQPWCYVAETEEGIYWRYCDIPSCHMPGYLGCFVDSGAPPALSGPSGTSTKLTVQVCLRFCRMKGYQLAGVEAGYACFCGSESDLARGRLAPATDCDQICFGHPGQLCGGDGRLGVYEVSVGSCQGNWTAPQGVIYSPDFPDEYGPDRNCSWALGPPGAALELTFRLFELADPRDRLELRDAASGSLLRAFDGARPPPSGPLRLGTAALLLTFRSDARGHAQGFALTYRGLQDAAEDPEAPEGSAQTPAAPLDGANVSCSPRPGAPPAAIGGEAGARDGSESGSRPLAPILTAAVCPQPGSSRR

SEQ ID NO: 20205 - protein, 366 aa, Artificial Sequence
  Synthetic polypeptide
PGAVAQPVIPALWEAKAGGSSEVRSSRPAWLPCNPDGDVQPWCYVAETEEGIYWRYCDIPSCHMPGYLGCFVDSGAPPALSGPSGTSTKLTVQVCLRFCRMKGYQLCGGDGRLGVYEVSVGSCQGNWTAPQGVIYSPDFPDEYGPDRNCSWALGPPGAALELTFRLFELADPRDRLELRDAASGSLLRAFDGARPPPSGPLRLGTAALLLTFRSDARGHAQGFALTYRGLQDAAEDPEAPEGSAQTPAAPLDGANVSCSPRPGAPPAAIGARVFSTVTAVSVLLLLLLGLLRPLRRRSCLLAPGKGPPALGASRGPRRSWAVWYQQPRGVALPCSPGDPQAEGSAAGYRPLSASSQSSLRSLISAL

SEQ ID NO: 20206 - protein, 324 aa, Artificial Sequence
  Synthetic polypeptide
PGAVAQPVIPALWEAKAGGSSEVRSSRPAWLPCNPDGDVQPWCYVAETEEGIYWRYCDIPSCHMPGYLGCFVDSGAPPALSGPSGTSTKLTVQVCLRFCRMKGYQLCGGDGRLGVYEVSVGSCQGNWTAPQGVIYSPDFPDEYGPDRNCSWALGPPGAALELTFRLFELADPRDRLELRDAASGSLLRAFDGARPPPSGPLRLGTAALLLTFRSDARGHAQGFALTYRGLQDAAEDPEAPEGSAQTPAAPLDGANVSCSPRPGAPPAAIGGAVCWLREKGPRRWGLPGAPGEAGLCGTNSPEGWPCPAPPGTPRLRVLPRATGL

SEQ ID NO: 20207 - protein, 363 aa, Artificial Sequence
  Synthetic polypeptide
PGAVAQPVIPALWEAKAGGSSEVRSSRPAWLPCNPDGDVQPWCYVAETEEGIYWRYCDIPSCHMPGYLGCFVDSGAPPALSGPSGTSTKLTVQVCLRFCRMKGYQLAGVEAGYACFCGSESDLARGRLAPATDCDQICFGHPGQLCGGDGRLGVYEVSVGSCQGNWTAPQGVIYSPDFPDEYGPDRNCSWALGPPGAALELTFRLFELADPRDRLELRDAASGSLLRAFDGARPPPSGPLRLGTAALLLTFRSDARGHAQGFALTYRGLQDAAEDPEAPEGSAQTPAAPLDGANVSCSPRPGAPPAAIGGAVCWLREKGPRRWGLPGAPGEAGLCGTNSPEGWPCPAPPGTPRLRVLPRATGL

SEQ ID NO: 20208 - protein, 367 aa, Artificial Sequence
  Synthetic polypeptide
PGAVAQPVIPALWEAKAGGSSEVRSSRPAWLPCNPDGDVQPWCYVAETEEGIYWRYCDIPSCHMPGYLGCFVDSGAPPALSGPSGTSTKLTVQVCLRFCRMKGYQLAGVEAGYACFCGSESDLARGRLAPATDCDQICFGHPGQLCGGDGRLGVYEVSVGSCQGNWTAPQGVIYSPDFPDEYGPDRNCSWALGPPGAALELTFRLFELADPRDRLELRDAASGSLLRAFDGARPPPSGPLRLGTAALLLTFRSDARGHAQGFALTYRGLQDAAEDPEAPEGSAQTPAAPLDGANVSCSPRPGAPPAAIGARVFSTVTAVSVLLLLLLGLLRPLRRRCGALGQGLRADRWWGAGAPEGNRARKELLGS

SEQ ID NO: 20209 - protein, 13 aa, Artificial Sequence
  Synthetic polypeptide
LCGNGGQDRGSLQ

SEQ ID NO: 20210 - protein, 117 aa, Artificial Sequence; identical to SEQ ID NO: 20144
  Synthetic polypeptide

SEQ ID NO: 20211 - protein, 30 aa, Artificial Sequence; identical to SEQ ID NO: 20145
  Synthetic polypeptide

SEQ ID NO: 20212 - protein, 78 aa, Artificial Sequence; identical to SEQ ID NO: 20146
  Synthetic polypeptide

SEQ ID NO: 20213 - protein, 128 aa, Artificial Sequence
  Synthetic polypeptide
EFCPLLTNYSFVEMVAKIAGLYNDLEPPRKTMRRGVLMTLLQQSAMTLPLWIGKPGDKPPPLCGAIPASGDYVARPGDKVAARVKAVDGDEQWILAEVVSYSHATNKHLLCRRLLPSSQCGPEVPGSF

SEQ ID NO: 20214 - protein, 571 aa, Artificial Sequence
  Synthetic polypeptide
LMPVIQHFGRPSSRPVVDMVTLMSFSPAEIPVHEVECSYSTSNKMKEGVNITICFQIKSLIPQFQGRLVANLTYTLQLDGHRTRRRGLFPGGRHELRRNIAVTTSMSCTDFSFHFPVCVQDLISPINVSLNFSLWEEEGTPRDQRAQGKDIPPILRPSLHSETWEIPFEKNCGEDKKCEANLRVSFSPARSRALRLTAFASLSVELSLSNLEEDAYWVQLDLHFPPGLSFRKVEMLKPHSQIPVSCEELPEESRLLSRALSCNVSSPIFKAGHSVALQMMFNTLVNSSWGDSVELHANVTCNNEDSDLLEDNSATTIIPILYPINILIQDQEDSTLYVSFTPKGPKIHQVKHMYQVRIQPSIHDHNIPTLEAVVGVPQPPSEGPITHQWSVQMEPPVPCHYEDLERLPDAAEPCLPGALFRCPVVFRQEILVQVIGTLELVGEIEASSMFSLCSSLSISFNSSKHFHLYGSNASLAQVVMKVDVVYEKQMLYLYVLSGIGGLLLLLLIFIVLYKVGFFKRNLKEKMEAGRGVPNGIPAEDSEQLASGQEAGDPGCLKPLHEKDSESGGGKD

SEQ ID NO: 20215 - protein, 17 aa, Artificial Sequence
  Synthetic polypeptide
SSTLGGRAPGPWWIWSP

SEQ ID NO: 20216 - protein, 32 aa, Artificial Sequence
  Synthetic polypeptide
PDAMTHACNPALWEAELPARGGYGHPDVLLSS

SEQ ID NO: 20217 - protein, 570 aa, Artificial Sequence
  Synthetic polypeptide
LMPVIQHFGRPSSRPVVDMVTLMSFSPAEIPVHEVECSYSTSNKMKEGVNITICFQIKSLIPQFQGRLVANLTYTLQLDGHRTRRRGLFPGGRHELRRNIAVTTSMSCTDFSFHFPVCVQDLISPINVSLNFSLWEEEGTPRDQRAGKDIPPILRPSLHSETWEIPFEKNCGEDKKCEANLRVSFSPARSRALRLTAFASLSVELSLSNLEEDAYWVQLDLHFPPGLSFRKVEMLKPHSQIPVSCEELPEESRLLSRALSCNVSSPIFKAGHSVALQMMFNTLVNSSWGDSVELHANVTCNNEDSDLLEDNSATTIIPILYPINILIQDQEDSTLYVSFTPKGPKIHQVKHMYQVRIQPSIHDHNIPTLEAVVGVPQPPSEGPITHQWSVQMEPPVPCHYEDLERLPDAAEPCLPGALFRCPVVFRQEILVQVIGTLELVGEIEASSMFSLCSSLSISFNSSKHFHLYGSNASLAQVVMKVDVVYEKQMLYLYVLSGIGGLLLLLLIFIVLYKVGFFKRNLKEKMEAGRGVPNGIPAEDSEQLASGQEAGDPGCLKPLHEKDSESGGGKD

SEQ ID NO: 20218 - protein, 33 aa, Artificial Sequence
  Synthetic polypeptide
FMSVIPALSEAKVGGSLEARNLRPARATKAHQP

SEQ ID NO: 20219 - protein, 531 aa, Artificial Sequence
  Synthetic polypeptide
DQPGQQRPINREMRHLISSLQNHNHQLKGDAQRYKRKLREVQAEIGKLRAQASGSAHSTPNLGHPEDSGVSAPAPGKEEGGPGPVSTPDNRKEMAPVPGTTTTTTSVKKEELVPSEEDFQGITPGAQGPSSRGREPEARPKRELQEREGPSLGPPPVASALSRADREKAKVEETKRKESELLKGLRAELKKAQESQKEMKLLLDMYKSAPKEQRDKVQLMAAERKAKAEVDELRSRIRELEERDRRESKKIADEDALRRIRQAEEQIEHLQRKLGATKQEEEALLSEMDVTGQAFEDMQEQNGRLLQQLREKDDANFKLMSERIKANQIHKLLREEKDELGEQVLGLKSQVDAQLLTVQKLEEKERALQGSLGGVEKELTLRSQALELNKRKAVEAAQLAEDLKVQLEHVQTRLREIQPCLAESRAAREKESFNLKRAQEDISRLRRKLEKQRKVEVYADADEILQEEIKEYKARLTCPCCNTRKKDAVLTKCFHVFCFECVRGRYEARQRKCPKCNAAFGAHDFHRIYIS

SEQ ID NO: 20220 - protein, 20 aa, Artificial Sequence
  Synthetic polypeptide
GQEFETSQGNKGPSTVRCAT

SEQ ID NO: 20221 - protein, 64 aa, Artificial Sequence
  Synthetic polypeptide
GLLPEETFAQVIAAAEEDTEKPLRQFWKDCNTSVTSSRTLLRLGVMSPCGMNAIWRKTLKRLWK

SEQ ID NO: 20222 - protein, 32 aa, Artificial Sequence
  Synthetic polypeptide
MPSGGRHSKDYGNDVRQKANSSDFLIRVKNGS

SEQ ID NO: 20223 - protein, 136 aa, Artificial Sequence
  Synthetic polypeptide
TWGDVTMRYECHLEEDTQKTMEMMLDKKQIQAIFLFELKMGHKAVETLRNINNTLGPGTANEHIVQWWFKKFCKEDKSLEDEKHSVWPSEVDNDQLKALIEADPVKTTQEVAQELNHRPFYGRLAFEANWKGEKAQ

SEQ ID NO: 20224 - protein, 111 aa, Artificial Sequence
  Synthetic polypeptide
PAWPTWWGRGFGLVEHVLGQDSILNQSNSIFGCIFYTLQLLLGCLRTRWASVLMLLSSLVSLAGSVYLAWILFFVLYDFCIVCITTYAINVSLMWLSFRKVQEPQGKAKRH

SEQ ID NO: 20225 - protein, 59 aa, Artificial Sequence
  Synthetic polypeptide
SQHFGRPRRMDHLKSGVDQPGQHGGAGVSGWWSMCWDRTASSINPTAYSVASSTHYSYC

SEQ ID NO: 20226 - protein, 81 aa, Artificial Sequence
  Synthetic polypeptide
SQELTSLANMVGQGFRAGGACAGTGQHPQSIQQHIRLHLLHTTAIVRLPADTLGLCPDAAELPGVSRWFCLPGLDPVLRAL

SEQ ID NO: 20227 - protein, 114 aa, Artificial Sequence
  Synthetic polypeptide
PAWPTWWGRGFGLVEHVLGQDSILNQSNSIFGCIFYTLQLLLGLQAAQRACGQRGPGPPKPQEGNTVPGEWPWQASVRRQGAHICSGSLVADTWVLTAAHCFEKAAATELNSWS

SEQ ID NO: 20228 - protein, 106 aa, Artificial Sequence
  Synthetic polypeptide
SQELTSLANMVGQGFRAGGACAGTGQHPQSIQQHIRLHLLHTTAIVRSSSRSACLWTAWPRPPQASGGQHSPWRVALAGQCEEARSPHLQRLPGGRHLGPHCCPLL

SEQ ID NO: 20229 - protein, 77 aa, Artificial Sequence
  Synthetic polypeptide
PAWPTWWGRGFGLVEHVLGQDSILNQSNSIFGCIFYTLQLLLGCLRTRWASVLMLLSSLVSLAGSVYLAWILFFVLY

SEQ ID NO: 20230 - protein, 104 aa, Artificial Sequence
  Synthetic polypeptide
PAWPTWWGRGFGLVEHVLGQDSILNQSNSIFGCIFYTLQLLLDGVSPCCPGWSQAICLPQPPKVLGGLQALPADTLGLCPDAAELPGVSRWFCLPGLDPVLRAL

SEQ ID NO: 20231 - protein, 84 aa, Artificial Sequence
  Synthetic polypeptide
SQELTSLANMVGQGFRAGGACAGTGQHPQSIQQHIRLHLLHTTAIVRWCLAMLPRLVSSNLSASASQSAGGITGVACGHAGPLS

SEQ ID NO: 20232 - protein, 20 aa, Artificial Sequence
  Synthetic polypeptide
GRFQGKCLVPESDRRIRWIP

SEQ ID NO: 20233 - protein, 38 aa, Artificial Sequence
  Synthetic polypeptide
AGFRGNAWFPNRIAVFAGSPDPLVSRSRMLQFLQQDLA

SEQ ID NO: 20234 - protein, 49 aa, Artificial Sequence
  Synthetic polypeptide
PVSGEMLGSRIGSPYSLDPLIRWSLGPGCCNSYNRTWHRVACGHAGPLS

SEQ ID NO: 20235 - protein, 110 aa, Artificial Sequence
  Synthetic polypeptide
PVSGEMLGSRIGSPYSLDPLIRWSLGPGCCNSYNRTWHRVGQGFRAGGACAGTGQHPQSIQQHIRLHLLHTTAIVRLPADTLGLCPDAAELPGVSRWFCLPGLDPVLRAL

SEQ ID NO: 20236 - protein, 461 aa, Artificial Sequence
  Synthetic polypeptide
GRARRLMPVIPTLWEAEEEEGEDGDPSSGPPGPCHKLPPAPAWHHFPPRCVDMGCAGLRDAHEENPESILDEHVQRVLRTPGRQSPGPGHRSPDSGHVAKMPVALGGAASGHGKHVPKSGAKLDAAGLHHHRHVHHHVHHSTARPKEQVEAEATRRAQSSFAWGLEPHSHGARSRGYSESVGAAPNASDGLAHSGKVGVACKRNAKKAESGKSASTEVPGASEDAEKNQKIMQWIIEGEKEISRHRRTGHGSSGTRKPQPHENSRPLSLEHPWAGPQLRTSVQPSHLFIQDPTMPPHPAPNPLTQLEEARRRLEEEEKRASRAPSKQRYVQEVMRRGRACVRPACAPVLHVVPAVSDMELSETETRSQRKVGGGSAQPCDSIVVAYYFCGEPIPYRTLVRGRAVTLGQFKELLTKKGSYRYYFKKVSDEFDCGVVFEEVREDEAVLPVFEEKIIGKVEKVD

SEQ ID NO: 20237 - protein, 77 aa, Artificial Sequence
  Synthetic polypeptide
AGRGGSCLSSQHFGRPRRRKVRTAIHRQGPQGRVTSCLPPPLGTTSRPAVWTWAVPGSGMHTRRTLRASWTSTYSVC

SEQ ID NO: 20238 - protein, 20 aa, Artificial Sequence
  Synthetic polypeptide
PGAAAHACHPNTLGGRGGGR

SEQ ID NO: 20239 - protein, 425 aa, Artificial Sequence
  Synthetic polypeptide
GRARRLMPVIPTLWEAEEEEGEDGDPSSGPPGPCHKLPPAPAWHHFPPRCVDMGCAGLRDAHEENPESILDEHVQRVLRTPGRQSPGPGHRSPDSGHVAKMPVALGGAASGHGKHVPKSGAKLDAAGLHHHRHVHHHVHHSTARPKEQVEAEATRRAQSSFAWGLEPHSHGARSRGYSESVGAAPNASDGLAHSGKVGVACKRNAKKAESGKSASTEVPGASEDAEKNQKIMQWIIEGEKEISRHRRTGHGSSGTRKPQPHENSRPLSLEHPWAGPQLRTSVQPSHLFIQDPTMPPHPAPNPLTQLEEARRRLEEEEKRASRAPSKQRTRSQRKVGGGSAQPCDSIVVAYYFCGEPIPYRTLVRGRAVTLGQFKELLTKKGSYRYYFKKVSDEFDCGVVFEEVREDEAVLPVFEEKIIGKVEKVD

SEQ ID NO: 20240 - protein, 75 aa, Artificial Sequence
  Synthetic polypeptide
FCYEGCYWSSWQNWNKICHVMLLYQAHVPGAEGGPRGASEVRGGAHPPPGGCAAHAGGRGEAGGAAEARAHGGGR

SEQ ID NO: 20241 - protein, 495 aa, Artificial Sequence
  Synthetic polypeptide
CYCIRRTYRVPKEVRVEPQKFAEELIHRLEAVQRTREAEEKLEERLKRVRMEEEGEDGDPSSGPPGPCHKLPPAPAWHHFPPRCVDMGCAGLRDAHEENPESILDEHVQRVLRTPGRQSPGPGHRSPDSGHVAKMPVALGGAASGHGKHVPKSGAKLDAAGLHHHRHVHHHVHHSTARPKEQVEAEATRRAQSSFAWGLEPHSHGARSRGYSESVGAAPNASDGLAHSGKVGVACKRNAKKAESGKSASTEVPGASEDAEKNQKIMQWIIEGEKEISRHRRTGHGSSGTRKPQPHENSRPLSLEHPWAGPQLRTSVQPSHLFIQDPTMPPHPAPNPLTQLEEARRRLEEEEKRASRAPSKQRYVQEVMRRGRACVRPACAPVLHVVPAVSDMELSETETRSQRKVGGGSAQPCDSIVVAYYFCGEPIPYRTLVRGRAVTLGQFKELLTKKGSYRYYFKKVSDEFDCGVVFEEVREDEAVLPVFEEKIIGKVEKVD

SEQ ID NO: 20242 - protein, 50 aa, Artificial Sequence
  Synthetic polypeptide
DLPRDVIVSGARTGCRRRSAWSLRSSRRSSSTAWRLCSARGRPRRSWRSG

SEQ ID NO: 20243 - protein, 459 aa, Artificial Sequence
  Synthetic polypeptide
CYCIRRTYRVPKEVRVEPQKFAEELIHRLEAVQRTREAEEKLEERLKRVRMEEEGEDGDPSSGPPGPCHKLPPAPAWHHFPPRCVDMGCAGLRDAHEENPESILDEHVQRVLRTPGRQSPGPGHRSPDSGHVAKMPVALGGAASGHGKHVPKSGAKLDAAGLHHHRHVHHHVHHSTARPKEQVEAEATRRAQSSFAWGLEPHSHGARSRGYSESVGAAPNASDGLAHSGKVGVACKRNAKKAESGKSASTEVPGASEDAEKNQKIMQWIIEGEKEISRHRRTGHGSSGTRKPQPHENSRPLSLEHPWAGPQLRTSVQPSHLFIQDPTMPPHPAPNPLTQLEEARRRLEEEEKRASRAPSKQRTRSQRKVGGGSAQPCDSIVVAYYFCGEPIPYRTLVRGRAVTLGQFKELLTKKGSYRYYFKKVSDEFDCGVVFEEVREDEAVLPVFEEKIIGKVEKVD

SEQ ID NO: 20244 - protein, 371 aa, Artificial Sequence
  Synthetic polypeptide
GGSQRLMPVIPALWEAKAGGSLEVGSSRPAWPTCLQGNTVRDDGARSMAEALASNRTLSMLHLQKNSIGPMGAQRMADALKQNRSLKELMFSSNSIGDGGAKALAEALKVNQGLESLDLQSNSISDAGVAALMGALCTNQTLLSLSLRENSISPEGAQAIAHALCANSTLKNLDLTANLLHDQGARAIAVAVRENRTLTSLHLQWNFIQAGAAQALGQALQLNRSLTSLDLQENAIGDDGACAVARALKVNTALTALYLQVASIGASGAQVLGEALAVNRTLEILDLRGNAIGVAGAKALANALKVNSSLRRLNLQENSLGMDGAICIATALSGNHRLQHINLQGNHIGDSGARMISEAIKTNAPTCTVEM

SEQ ID NO: 20245 - protein, 70 aa, Artificial Sequence
  Synthetic polypeptide
SQHFGRPRQVDHLRSGVRDQPGQHASRATPLGMMVPGPWLRPWPPTGPSPCCTCRRTASGPWEPSGWQMP

SEQ ID NO: 20246 - protein, 17 aa, Artificial Sequence
  Synthetic polypeptide
GREFETSLANMPPGQHR

SEQ ID NO: 20247 - protein, 342 aa, Artificial Sequence
  Synthetic polypeptide
GGSQRLMPVIPALWEAKAGGSLEVGSSRPAWPTCLQGNTVRDDGARSMAEALASNRTLSMLHLQKNSIGPMGAQRMADLKQNRSLKELMFSSNSIGDGGAKALAEALKVNQGLESLDLQSNSISDAGVAALMGALCTNQTLLSLSLRENSISPEGAQAIAHALCANSTLKNLDLQWNFIQAGAAQALGQALQLNRSLTSLDLQENAIGDDGACAVARALKVNTALTALYLQVASIGASGAQVLGEALAVNRTLEILDLRGNAIGVAGAKALANALKVNSSLRRLNLQENSLGMDGAICIATALSGNHRLQHINLQGNHIGDSGARMISEAIKTNAPTCTVEM

SEQ ID NO: 20248 - protein, 69 aa, Artificial Sequence
  Synthetic polypeptide
SQHFGRPRQVDHLRSGVRDQPGQHASRATPLGMMVPGPWLRPWPPTGPSPCCTCRRTASGPWEPSGWQI

SEQ ID NO: 20249 - protein, 370 aa, Artificial Sequence
  Synthetic polypeptide
GGSQRLMPVIPALWEAKAGGSLEVGSSRPAWPTCLQGNTVRDDGARSMAEALASNRTLSMLHLQKNSIGPMGAQRMADLKQNRSLKELMFSSNSIGDGGAKALAEALKVNQGLESLDLQSNSISDAGVAALMGALCTNQTLLSLSLRENSISPEGAQAIAHALCANSTLKNLDLTANLLHDQGARAIAVAVRENRTLTSLHLQWNFIQAGAAQALGQALQLNRSLTSLDLQENAIGDDGACAVARALKVNTALTALYLQVASIGASGAQVLGEALAVNRTLEILDLRGNAIGVAGAKALANALKVNSSLRRLNLQENSLGMDGAICIATALSGNHRLQHINLQGNHIGDSGARMISEAIKTNAPTCTVEM

SEQ ID NO: 20250 - protein, 93 aa, Artificial Sequence
  Synthetic polypeptide
GGSQRLMPVIPALWEAKAGGSLEVGSSRPAWPTCLQGNTVRDDGARSMAEALASNRTLSMLHLQKNSIGPMGAQRMADALEAEQESERAHVLQ

SEQ ID NO: 20251 - protein, 362 aa, Artificial Sequence
  Synthetic polypeptide
SQHFGRPRQVDHLRSGVRDQPGQHASRATPLGMMVPGPWLRPWPPTGPSPCCTCRRTASGPWEPSGWQMPLKQNRSLKELMFSSNSIGDGGAKALAEALKVNQGLESLDLQSNSISDAGVAALMGALCTNQTLLSLSLRENSISPEGAQAIAHALCANSTLKNLDLTANLLHDQGARAIAVAVRENRTLTSLHLQWNFIQAGAAQALGQALQLNRSLTSLDLQENAIGDDGACAVARALKVNTALTALYLQVASIGASGAQVLGEALAVNRTLEILDLRGNAIGVAGAKALANALKVNSSLRRLNLQENSLGMDGAICIATALSGNHRLQHINLQGNHIGDSGARMISEAIKTNAPTCTVEM

SEQ ID NO: 20252 - protein, 305 aa, Artificial Sequence
  Synthetic polypeptide
GTATRYRVDDPENMLPEGANRKKNLPPKVPITPMPQYSIMETPVLKKELDRFGVRPLPKRQMVLKLKEIFQYTHQTLDSDSEDESQSSQPLLQAPHCQTLASQTYKPSRAGVHAQQEATTGPGAHRPKGPAKTKGPRHQRKHHESITPPSRSPTKEAPPGLNDDAQIPASQESVATSVDGSDSSLSSQSSSSCEFGAAFESAGEEEGEGEVSASQAAVQAADTDEALRCYIRSKPALYQKVLLYQPFELRELQAELRQNGLRVSSRRLLDFLDTHCITFTTAATRREKLQGRRRQPRGKKKVERN

SEQ ID NO: 20253 - protein, 38 aa, Artificial Sequence
  Synthetic polypeptide
CSATKRSEALPHATAWTTQKTCCRKVLIGRRTCPPKCP

SEQ ID NO: 20254 - protein, 33 aa, Artificial Sequence
  Synthetic polypeptide
TTRKWNSVQPQRGVRHCHTLPRGRPRKHAAGRC

SEQ ID NO: 20255 - protein, 55 aa, Artificial Sequence
  Synthetic polypeptide
PRTTGGPAEQNGAVCCAEFSVHTCSGAGLGERHGLPASAALPSNTCRAGTHRVST

SEQ ID NO: 20256 - protein, 79 aa, Artificial Sequence
  Synthetic polypeptide
EKPTQAPDTWTRILRAAWLSTTSDQEPPEAQQSRTEQSAVPSSQFTPALEQGWEKDTAFLPQRHSRATRAEQGPTGSPP

SEQ ID NO: 20257 - protein, 79 aa, Artificial Sequence
  Synthetic polypeptide
RNPHKPQTRGQEYSEQPGSPQLLTKNHRRPSRAERSSLLCRVLSSHLLWSRAGRKTRPSCLSGTPEQHVPSRDPQGLHL

SEQ ID NO: 20258 - protein, 798 aa, Artificial Sequence
  Synthetic polypeptide
QPLAQILTFGLKTYLISGQRAKESRCSCAEALLSGFEVIDGSQVSSGPRGQGTASSGNVSDLAQTVKTFDNLKTCPSCGITFAPKSEAGAEGGAPQNGCQDEHKNSTKASGGPNPKTQNGLLSPPQEEKLTNSQTSLCEILQEKGRWAGVSLDQSALLPLRFKNIREKTDAHFVDVIKEDSLMKDYFFKPPINQFSLNFLDQELERSYRTSYQEEVIKNSPVKTFASPTFSSLLDVFLSTTVFLTLSTTCFLKYEAATVPPPPAALAVFSAALLLEVLSLAVSIRMVFFLEDVMACTKRLLEWIAGWLPRHCIGAILVSLPALAVYSHVTSEYETNIHFPVFTGSAALIAVVHYCNFCQLSSWMRSSLATVVGAGPLLLLYVSLCPDSSVLTSPLDAVQNFSSERNPCNSSVPRDLRRPASLIGQEVVLVFFLLLLLVWFLNREFEVSYRLHYHGDVEADLHRTKIQSMRDQADWLLRNIIPYHVAEQLKVSQTYSKNHDSGGVIFASIVNFSEFYEENYEGGKECYRVLNELIGDFDELLSKPDYSSIEKIKTIGATYMAASGLNTAQAQDGSHPQEHLQILFEFAKEMMRVVDDFNNNMLWFNFKLRVGFNHGPLTAGVIGTTKLLYDIWGDTVNIASRMDTTGVECRIQVSEESYRVLSKMGYDFDYRGTVNVKGKGQMKTYLYPKCTDHRVIPQHQLSISPDIRVQVDGSIGRSPTDEIANLVPSVQYVDKTSLGSDSSTQAKDAHLSPKRPWKEPVKAEERGRFGKAIEKDDCDETGIEEANELTKLNVSKSV

SEQ ID NO: 20259 - protein, 3 aa, Artificial Sequence
  Synthetic polypeptide
PSV

SEQ ID NO: 20260 - protein, 35 aa, Artificial Sequence
  Synthetic polypeptide
TLSPDPNLRFEDIPDIGSESQGVSLQLCRGLAFWL

SEQ ID NO: 20261 - protein, 174 aa, Artificial Sequence
  Synthetic polypeptide
QPLAQILTFGLKTYLISGQRAKESRCSCAEALLSGFEVIDGSQVSSGPRGQGTASSGNVSDLAQTVKTFDNLKTCPSCGITFAPKSEAGAEGGAPQNGCQDEHKNSTKVTSSWLLFLSVPLLAHPPKASGGPNPKTQNGLLSPPQEEKLTNSQTSLCEILQEKGRWAGVSLDQS

SEQ ID NO: 20262 - protein, 94 aa, Artificial Sequence
  Synthetic polypeptide
GRARWLMPVIPTLWEAESWQPMGTWCRAPSGAEMEPWWARRARTSSCGSLTPEQSRGPLRARRPMRTAGIAGWHGWAPGSTLCLLDSTRCVSAK

SEQ ID NO: 20263 - protein, 40 aa, Artificial Sequence
  Synthetic polypeptide
SQHSGRPRAGSPWGPGAERRLEPRWSPGGHGVQGQAAADL

SEQ ID NO: 20264 - protein, 902 aa, Artificial Sequence
  Synthetic polypeptide
PGAVAHACNPNTLGGRELAAHGDLVQSAVWSRDGALVGTACKDKQLRIFDPRTKPRASQSTQAHENSRDSRLAWMGTWEHLVSTGFNQMREREVKLWDTRFFSSALASLTLDTSLGCLVPLLDPDSGLLVLAGKGERQLYCYEVVPQQPALSPVTQCVLESVLRGAALVPRQALAVMSCEVLRVLQLSDTAIVPIGYHVPRKAVEFHEDLFPDTAGCVPATDPHSWWAGDNQQVQKVSLNPACRPHPSFTSCLVPPAEPLPDTAQPAVMETPVGDADASEGFSSPPSSLTSPSTPSSLGPSLSSTSGIGTSPSLRSLQSLLGPSSKFRHAQGTVLHRDSHITNLKGLNLTTPGESDGFCANKLRVAVPLLSSGGQVAVLELRKPGRLPDTALPTLQNGAAVTDLAWDPFDPHRLAVAGEDARIRLWRVPAEGLEEVLTTPETVLTGHTEKICSLRFHPLAANVLASSSYDLTVRIWDLQAGADRLKLQGHQDQIFSLAWSPDGQQLATVCKDGRVRVYRPRSGPEPLQEGPGPKGGRGARIVWVCDGRCLLVSGFDSQSERQLLLYEAEALAGGPLAVLGLDVAPSTLLPSYDPDTGLVLLTGKGDTRVFLYELLPESPFFLECNSFTSPDPHKGLVLLPKTECDVREVELMRCLRLRQSSLEPVAFRLPRVRKEFFQDDVFPDTAVIWEPVLSAEAWLQGANGQPWLLSLQPPDMSPVSQAPREAPARRAPSSAQYLEEKSDQQKKEELLNAMVAKLGNREDPLPQDSFEGVDEDEWAKYLAQIIVMGVQVVGRAFARALRQEFAASRAAADARGRAGHRSAAASNLSGLSLQEAQQILNVSKLSPEEVQKNYEHLFKVNDKSVGGSFYLQSKVVRAKERLDEELKIQAQEDREKGQMPHT

SEQ ID NO: 20265 - protein, 389 aa, Artificial Sequence
  Synthetic polypeptide
PGAVAHACNPNTLGGRELAAHGDLVQSAVWSRDGALVGTACKDKQLRIFDPRTKPRASQSTQAHENSRDSRLAWMGTWEHLVSTGFNQMREREVKLWDTRFFSSALASLTLDTSLGCLVPLLDPDSGLLVLAGKGERQLYCYEVVPQQPALSPVTQCVLESVLRGAALVPRQALAVMSCEVLRVLQLSDTAIVPIGYHVPRKAVEFHEDLFPDTAGCVPATDPHSWWAGDNQQVQKVSLNPACRPHPSFTSCLVPPAEPLPDTAQPAVMETPVGDADASEGFSSPPSSLTSPSTPSSLGPSLSSTSGIGTSPSLRSLQSLLGPSSKFRHAQGTVLHRDSHITNLKGLNLTTPGESDGFCANKLRVAVPLLSSGGQVAVLEMREKRHREV

SEQ ID NO: 20266 - protein, 779 aa, Artificial Sequence
  Synthetic polypeptide
PGAVAHACNPNTLGGRELAAHGDLVQSAVWSRDGALVGTACKDKQLRIFDPRTKPRASQSTQAHENSRDSRLAWMGTWEHLVSTGFNQMREREVKLWDTRFFSSALASLTLDTSLGCLVPLLDPDSGLLVLAGKGERQLYCYEVVPQQPALSPVTQCVLESVLRGAALVPRQALAVMSCEVLRVLQLSDTAIVPIGYHVPRKAVEFHEDLFPDTAGCVPATDPHSWWAGDNQQVQKVSLNPACRPHPSFTSCLVPPAEPLPDTAQPAVMETPVGDADASEGFSSPPSSLTSPSTPSSLGPSLSSTSGIGTSPSLRSLQSLLGPSSKFRHAQGTVLHRDSHITNLKGLNLTTPGESDGFCANKLRVAVPLLSSGGQVAVLELRKPGRLPDTALPTLQNGAAVTDLAWDPFDPHRLAVAGEDARIRLWRVPAEGLEEVLTTPETVLTGHTEKICSLRFHPLAANVLASSSYDLTVRIWDLQAGADRLKLQGHQDQIFSLAWSPDGQQLATVCKDGRVRVYRPRSGPEPLQEGPGPKGGRGARIVWVCDGRCLLVSGFDSQSERQLLLYEAEALAGGPLAVLGLDVAPSTLLPSYDPDTGLVLLTGKGDTRVFLYELLPESPFFLECNSFTSPDPHKGLVLLPKTECDVREVELMRCLRLRQSSLEPVAFRLPRVRKEFFQDDVFPDTAVIWEPVLSAEAWLQGANGQPWLLSLQPPDMSPVSQAPREAPARRAPSSAQYLEEKSDQQKKEELLNAMVAKLGNREDPLPQDSFEGVDEDEWD

SEQ ID NO: 20267 - protein, 94 aa, Artificial Sequence
  Synthetic polypeptide
PGAVAHACNPNTLGGRELAAHGDLVQSAVWSRDGALVGTACKDKQLRIFDPRTKPRASQSTQAHENSRDSRLAWMGTWEHLVSTGFNQMREREV

SEQ ID NO: 20268 - protein, 76 aa, Artificial Sequence
  Synthetic polypeptide
GRARWLMPVIPTLWEAESWQPMGTWCRAPSGAEMEPWWARRARTSSCGSLTPEQSRGPLRARRPMRTAGIAGWHGW

SEQ ID NO: 20269 - protein, 75 aa, Artificial Sequence
  Synthetic polypeptide
PGAVAHACNPNTLGGRELAAHGDLVQSAVWSRDGALVGTACKDKQLRIFDPRTKPRASQSTQAHENSRDSRLAWM

SEQ ID NO: 20270 - protein, 54 aa, Artificial Sequence
  Synthetic polypeptide
GRARWLMPVIPTLWEAESWQPMGTWCRAPSGAEMEPWWARRARRSLSLFPRLEC

SEQ ID NO: 20271 - protein, 45 aa, Artificial Sequence
  Synthetic polypeptide
SQHSGRPRAGSPWGPGAERRLEPRWSPGGHGVQDGVSVCFPGWSV

SEQ ID NO: 20272 - protein, 53 aa, Artificial Sequence
  Synthetic polypeptide
PGAVAHACNPNTLGGRELAAHGDLVQSAVWSRDGALVGTACKTESQSVSQAGV

SEQ ID NO: 20273 - protein, 48 aa, Artificial Sequence
  Synthetic polypeptide
GRARWLMPVIPTLWEAESWQPMGTWCRAPSGAEMEPWWARRARTSSCG

SEQ ID NO: 20274 - protein, 39 aa, Artificial Sequence
  Synthetic polypeptide
SQHSGRPRAGSPWGPGAERRLEPRWSPGGHGVQGQAAAD

SEQ ID NO: 20275 - protein, 47 aa, Artificial Sequence
  Synthetic polypeptide
PGAVAHACNPNTLGGRELAAHGDLVQSAVWSRDGALVGTACKDKQLR

SEQ ID NO: 20276 - protein, 36 aa, Artificial Sequence
  Synthetic polypeptide
GRARWLMPVIPTLWEAESWQPMGTWCRAPSGAEMEP

SEQ ID NO: 20277 - protein, 27 aa, Artificial Sequence
  Synthetic polypeptide
SQHSGRPRAGSPWGPGAERRLEPRWSP

SEQ ID NO: 20278 - protein, 35 aa, Artificial Sequence
  Synthetic polypeptide
PGAVAHACNPNTLGGRELAAHGDLVQSAVWSRDGA

SEQ ID NO: 20279 - protein, 35 aa, Artificial Sequence
  Synthetic polypeptide
AAINIELFTVVRLRWKTVCCSVRRPESQCGHQQSF

SEQ ID NO: 20280 - protein, 20 aa, Artificial Sequence
  Synthetic polypeptide
PSANTILISKQPSTLSCSPW

SEQ ID NO: 20281 - protein, 28 aa, Artificial Sequence
  Synthetic polypeptide
FWSPSYRLRKLLCFALFHGRREIRHPPP

SEQ ID NO: 20282 - protein, 38 aa, Artificial Sequence
  Synthetic polypeptide
MESQLQIEETTLLRTFSWEERNSTPPTLKVTSLERTWI

SEQ ID NO: 20283 - protein, 34 aa, Artificial Sequence
  Synthetic polypeptide
REWRPTPVIPELWEAETSGSLEVRNSTDQPGQHE

SEQ ID NO: 20284 - protein, 685 aa, Artificial Sequence
  Synthetic polypeptide
SQNFGRPRRVDHLKSGIQLTSLANMNKERVEEEGGKPKHVLSTSGVQSDAREPGEESQKADVLEGTAERLPPIRASGLGADPAQAVVSPGQGDGVPGPAQAFPGHLPLPTKVEAKAPETPSENLRTGLELAPAPGRVNVVSPSLEVAPGAGQGASSSRPDPEPLEEGTRLTPGPGPQCPGPPGLPAQARATHSGGETPPRISIHIQEMDTPGEMLMTGRGSLGPTLTTEAPAAAQPGKQGPPGTGRCLQAPGTEPGEQTPEGARELSPLQESSSPGGVKAEEEQRAGAEPGTRPSLARSDDNDHEVGALGLQQGKSPGAGNPEPEQDCAARAPVRAEAVRRMPPGAEAGSVVLDDSPAPPAPFEHRVVSVKETSISAGYEVCQHEVLGGGRFGQVHRCTEKSTGLPLAAKIIKVKSAKDREDVKNEINIMNQLSHVNLIQLYDAFESKHSCTLVMEYVDGGELFDRITDEKYHLTELDVVLFTRQICEGVHYLHQHYILHLDLKPENILCVNQTGHQIKIIDFGLARRYKPREKLKVNFGTPEFLAPEVVNYEFVSFPTDMWSVGVITYMLLSGLSPFLGETDAETMNFIVNCSWDFDADTFEGLSEEAKDFVSRLLVKEKSCRMSATQCLKHEWLNNLPAKASRSKTRLKSQLLLQKYIAQRKWKKHFYVVTAANRLRKFPTSP

SEQ ID NO: 20285 - protein, 52 aa, Artificial Sequence
  Synthetic polypeptide
RNKPRKDLWIQDKEKQEKEIDIYANLSDEKAFVFSVALAEINRKIINQRLIL

SEQ ID NO: 20286 - protein, 76 aa, Artificial Sequence
  Synthetic polypeptide
CEGRLKIFSDIQGLKKFATNTAFLRKPLQVTCYQNEEINQERIFGFKTKRNRKRKLTSMLTCLMKRLSCFQSPWQK

SEQ ID NO: 20287 - protein, 17 aa, Artificial Sequence
  Synthetic polypeptide
TKKGSLDSRQRETGKGN

SEQ ID NO: 20288 - protein, 42 aa, Artificial Sequence
  Synthetic polypeptide
LDHPNLMTTVKLHVCRNRKRKLTSMLTCLMKRLSCFQSPWQK

SEQ ID NO: 20289 - protein, 14 aa, Artificial Sequence
  Synthetic polypeptide
LQSSSTYVETGKGN

SEQ ID NO: 20290 - protein, 40 aa, Artificial Sequence
  Synthetic polypeptide
LDHPNLMTTVKLHRNRKRKLTSMLTCLMKRLSCFQSPWQK

SEQ ID NO: 20291 - protein, 12 aa, Artificial Sequence
  Synthetic polypeptide
LQSSSTETGKGN

SEQ ID NO: 20292 - protein, 47 aa, Artificial Sequence
  Synthetic polypeptide
SDDYSQAPQKQEKEIDIYANLSDEKAFVFSVALAEINRKIINQRLIL

SEQ ID NO: 20293 - protein, 31 aa, Artificial Sequence
  Synthetic polypeptide
NETLSKKPGTKQKVHRRCDPLCLGREALSPG

SEQ ID NO: 20294 - protein, 269 aa, Artificial Sequence
  Synthetic polypeptide
AKIMPLHSSLGNRMRPCLKSQVQSRKCIEDVIHFAWEEKLFLLADEVYQDNVYSPDCRFHSFKKVLYEMGPEYSSNVELASFHSTSKGYMGECGYRGGYMEVINLHPEIKGQLVKLLSVRLCPPVSGQAAMDIVVNPPVAGEESFEQFSREKESVLGNLAKKAKLTEDLFNQVPGIHCNPLQGAMYAFPRIFIPAKAVEAAQAHQMAPDMFYCMKLLEETGICVVPGSGFGQREGTYHFRMTILPPVEKLKTVLQKVKDFHINFLEKYA

SEQ ID NO: 20295 - protein, 9 aa, Artificial Sequence
  Synthetic polypeptide
KARYKAESA

SEQ ID NO: 20296 - protein, 13 aa, Artificial Sequence
  Synthetic polypeptide
TQKVTCCAIPSEL

SEQ ID NO: 20297 - protein, 468 aa, Artificial Sequence
  Synthetic polypeptide
KRGSGRHLRTGVQCSAAHRSQDTGPARCPSQRNACTACGYPHSACYLARKRKAAPMRAAPWVNFGNIPRHRRSPVVQFHLNFDLDRGVFPVVIQAVVDEGDVVEVTGHAHVLLAAFEKHMDGSFSVKPLKQKQIVDRVSYLLQEIYGIENKNNQETKPSDDENSDNSNECVVCLSDLRDTLILPCRHLCLCTSCADTLRYQANNCPICRLPFRALLQIRAVRKKPGALSPVSFSPVLAQSLEHDEHSCPFKKSKPHPASLASKKPKRETNSDSVPPGYEPISLLEALNGLRAVSPAIPSAPLYEEITYSGISDGLSQASCPLAAIDHILDSSRQKGRPQSKAPDSTLRSPSSPIHEEDEEKLSEDVDAPPPLGGAELALRESSSPESFITEEVDESSSPQQGTRAASIENVLQDSSPEHCGRGPPADIYLPGRPTSMETAHGLATTSPTWPPLGGPSPDPSAAELTPL

SEQ ID NO: 20298 - protein, 17 aa, Artificial Sequence
  Synthetic polypeptide
TLETYLDTEGHLLCNSI

SEQ ID NO: 20299 - protein, 423 aa, Artificial Sequence
  Synthetic polypeptide
KRGSGRHLRTGVQCSAAHRSQDTGPARCPSQRNACTACGYPHSACYLARKRKAAPMRAAPWVNFGNIPRHRRSPVVQFHLNFDLDRGVFPVVIQAVVDEGDAVVEVTGHAHVLLAAFEKHMDGSFSVKPLKQKQIVDRVSYLLQEIYGIENKNNQETKPSDDENSDNSNECVVCLSDLRDTLILPCRHLCLCTSCADTLRYQANNCPICRLPFRALLQIRAVRKKPGALSPVSFSPVLAQSLEHDEHSNSDSVPPGYEPISLLEALNGLRAVSPAIPSAPLYEEITYSGISDGLSQASCPLAAIDHILDSSRQKGRPQSKAPDSTLRSPSSPIHEEDEEKLSEDVDAPPPLGGAELALRESSSPESFITEEVDESSSPQQGTRAASIENVLQDSSPEHCGRGPPADIYLPALGPDSCSVGIDE

SEQ ID NO: 20300 - protein, 212 aa, Artificial Sequence
  Synthetic polypeptide
KRGSGRHLRTGVQCSAAHRSQDTGPARCPSQRNACTACGYPHSACYLARKRKAAPMRAAPWVNFGNIPRHRRSPVVQFHLNFDLDRGVFPVVIQAVVDEGDVVEVTGHAHVLLAAFEKHMDGSFSVKPLKQKQIVDRVSYLLQEIYGIENKNNQETKPSDDENSDNSNECVVCLSDLRDTLILPCRHLCLCTSCADTLRYQANNCPICRLQL

SEQ ID NO: 20301 - protein, 486 aa, Artificial Sequence
  Synthetic polypeptide
KRGSGRHLRTGVQCSAAHRSQDTGPARCPSQRNACTACGYPHSACYLARKRKAAPMRAAPWVNFGNIPRHRRSPVVQFHLNFDLDRGVFPVVIQAVVDEGDVVEVTGHAHVLLAAFEKHMDGSFSVKPLKQKQIVDRVSYLLQEIYGIENKNNQETKISWKVSQARFIMASGPRTTGAAPRGGSGAPGRASPQPREPSDDENSDNSNECVVCLSDLRDTLILPCRHLCLCTSCADTLRYQANNCPICRLPFRALLQIRAVRKKPGALSPVSFSPVLAQSLEHDEHSCPFKKSKPHPASLASKKPKRETNSDSVPPGYEPISLLEALNGLRAVSPAIPSAPLYEEITYSGISDGLSQASCPLAAIDHILDSSRQKGRPQSKAPDSTLRSPSSPIHEEDEEKLSEDVDAPPPLGGAELALRESSSPESFITEEVDESSSPQQGTRAASIENVLQDSSPEHCGRGPPADIYLPGRPTSMETAHGLATTS

SEQ ID NO: 20302 - protein, 444 aa, Artificial Sequence
  Synthetic polypeptide
KRGSGRHLRTGVQCSAAHRSQDTGPARCPSQRNACTACGYPHSACYLARKRKAAPMRAAPWVNFGNIPRHRRSPVVQFHLNFDLDRGVFPVVIQAVVDEGDVVEVTGHAHVLLAAFEKHMDGSFSVKPLKQKQIVDRVSYLLQEIYGIENKNNQETKPSDDENSDNSNECVVCLSDLRDTLILPCRHLCLCTSCADTLRYQANNCPICRLPFRALLQIRAVRKKPGALSPVSFSPVLAQSLEHDEHSCPFKKSKPHPASLASKKPKRETNSDSVPPGYEPISLLEALNGLRAVSPAIPSAPLYEEITYSGISDGLSQASCPLAAIDHILDSSRQKGRPQSKAPDSTLRSPSSPIHEEDEEKLSEDVDAPPPLGGAELALRESSSPESFITEEVDESSSPQQGTRAASIENVLQDSSPEHCGRGPPADIYLPALGPDSCSVGIDE

SEQ ID NO: 20303 - protein, 446 aa, Artificial Sequence
  Synthetic polypeptide
KRGSGRHLRTGVQCSAAHRSQDTGPARCPSQRNACTACGYPHSACYLARKRKAAPMRAAPWVNFGNIPRHRRSPVVQFHLNFDLDRGVFPVVIQAVVDEGDVVEVTGHAHVLLAAFEKHMDGSFSVKPLKQKQIVDRVSYLLQEIYGIENKNNQETKPSDDENSDNSNECVVCLSDLRDTLILPCRHLCLCTSCADTLRYQANNCPICRLPFRALLQIRAVRKKPGALSPVSFSPVLAQSLEHDEHSNSDSVPPGYEPISLLEALNGLRAVSPAIPSAPLYEEITYSGISDGLSQASCPLAAIDHILDSSRQKGRPQSKAPDSTLRSPSSPIHEEDEEKLSEDVDAPPPLGGAELALRESSSPESFITEEVDESSSPQQGTRAASIENVLQDSSPEHCGRGPPADIYLPGRPTSMETAHGLATTSPTWPPLGGPSPDPSAAELTPL

SEQ ID NO: 20304 - protein, 422 aa, Artificial Sequence
  Synthetic polypeptide
KRGSGRHLRTGVQCSAAHRSQDTGPARCPSQRNACTACGYPHSACYLARKRKAAPMRAAPWVNFGNIPRHRRSPVVQFHLNFDLDRGVFPVVIQAVVDEGDVVEVTGHAHVLLAAFEKHMDGSFSVKPLKQKQIVDRVSYLLQEIYGIENKNNQETKPSDDENSDNSNECVVCLSDLRDTLILPCRHLCLCTSCADTLRYQANNCPICRLPFRALLQIRAVRKKPGALSPVSFSPVLAQSLEHDEHSNSDSVPPGYEPISLLEALNGLRAVSPAIPSAPLYEEITYSGISDGLSQASCPLAAIDHILDSSRQKGRPQSKAPDSTLRSPSSPIHEEDEEKLSEDVDAPPPLGGAELALRESSSPESFITEEVDESSSPQQGTRAASIENVLQDSSPEHCGRGPPADIYLPALGPDSCSVGIDE

SEQ ID NO: 20305 - protein, 260 aa, Artificial Sequence
  Synthetic polypeptide
KRGSGRHLRTGVQCSAAHRSQDTGPARCPSQRNACTACGYPHSACYLARKRKAAPMRAAPWVNFGNIPRHRRSPVVQFHLNFDLDRGVFPVVIQAVVDEGDAVVEVTGHAHVLLAAFEKHMDGSFSVKPLKQKQIVDRVSYLLQEIYGIENKNNQETKPSDDENSDNSNECVVCLSDLRDTLILPCRHLCLCTSCADTLRYQANNCPICRLPFRALLQIRAVRKKPGALSPVSFSPVLAQSLEHDEHSCPFKKSKPHPAS

SEQ ID NO: 20306 - protein, 11 aa, Artificial Sequence
  Synthetic polypeptide
LHLYKIQTLLT

SEQ ID NO: 20307 - protein, 44 aa, Artificial Sequence
  Synthetic polypeptide
NIMLSEISQTQKHKYDSIYIRSRLYLPRRYFKSHSRLSVRALGS

SEQ ID NO: 20308 - protein, 37 aa, Artificial Sequence
  Synthetic polypeptide
NIMLSEISQTQKHKYDSIYIRSRLYLPRRLSVRALGS

SEQ ID NO: 20309 - protein, 523 aa, Artificial Sequence
  Synthetic polypeptide
PPPPSPLTSLLLITVLVVEGIAVAQKTQDGQNIGIKHIPATQCGIWVRTSNGGHFASPNYPDSYPPNKECIYILEAAPRQRIELTFDEHYYIEPSFECRFDHLEVRDGPFGFSPLIDRYCGVKSPPLIRSTGRFMWIKFSSDEELEGLGFRAKYSFIPDPDFTYLGGILNPIPDCQFELSGADGIVRSSQVEQEEKTKPGQAVDCIWTIKATPKAKIYLRFLDYQMEHSNECKRNFVAVYDGSSSIENLKAKFCSTVANDVMLKTGIGVIRMWADEGSRLSRFRMLFTSFVEPPCTSSTFFCHSNMCINNSLVCNGVQNCAYPWDENHCKEKKKAGVFEQITKTHGTIIGITSGIVLVLLIISILVQVKQPRKKVMACKTAFNKTGFQEVFDPPHYELFSLRDKEISADLADLSEELDNYQKMRRSSTASRCIHDHHCGSQASSVKQSRTNLSSMELPFRNDFAQPQPMKTFNSTFKKSSYTFKQGHECPEQALEDRVMEEIPCEIYVRGREDSAQASISIDF

SEQ ID NO: 20310 - protein, 11 aa, Artificial Sequence
  Synthetic polypeptide
LHLPHPSRPCC

SEQ ID NO: 20311 - protein, 60 aa, Artificial Sequence
  Synthetic polypeptide
STSLTPHVLVVNNSTGSGRDCRGPKNPRWTKYWNQAYSCNPVWHLGSNQQWRSFCFAKLS

SEQ ID NO: 20312 - protein, 516 aa, Artificial Sequence
  Synthetic polypeptide
PPPPSPLTSLLLITVLVVEGIAVAQKTQDGQNIGIKHIPATQCGIWVRTSNGGHFASPNYPDSYPPNKECIYILEAAPRQRIELTFDEHYYIEPSFECRFDHLEVRDGPFGFSPLIDRYCGVKSPPLIRSTGRFMWIKFSSDEELEGLGFRAKYSFIPDPDFTYLGDCQFELSGADGIVRSSQVEQEEKTKPGQAVDCIWTIKATPKAKIYLRFLDYQMEHSNECKRNFVAVYDGSSSIENLKAKFCSTVANDVMLKTGIGVIRMWADEGSRLSRFRMLFTSFVEPPCTSSTFFCHSNMCINNSLVCNGVQNCAYPWDENHCKEKKKAGVFEQITKTHGTIIGITSGIVLVLLIISILVQVKQPRKKVMACKTAFNKTGFQEVFDPPHYELFSLRDKEISADLADLSEELDNYQKMRRSSTASRCIHDHHCGSQASSVKQSRTNLSSMELPFRNDFAQPQPMKTFNSTFKKSSYTFKQGHECPEQALEDRVMEEIPCEIYVRGREDSAQASISIDF

SEQ ID NO: 20313 - protein, 29 aa, Artificial Sequence
  Synthetic polypeptide
NPVSTKIEKMSWPWWRMPVVPATQETECC

SEQ ID NO: 20314 - protein, 59 aa, Artificial Sequence
  Synthetic polypeptide
SQLLRKLSVVNNSTGSGRDCRGPKNPRWTKYWNQAYSCNPVWHLGSNQQWRSFCFAKLS

SEQ ID NO: 20315 - protein, 80 aa, Artificial Sequence
  Synthetic polypeptide
GWAQWLTPVIPALREAEVGRSLEPRSLISAWPTWWTGSATSCRRSMALRTRTTRRPSPRTTRTATTATSVWCACPTCGTR

SEQ ID NO: 20316 - protein, 20 aa, Artificial Sequence
  Synthetic polypeptide
YQLGQHGGPGQLPPAGDLWH

SEQ ID NO: 20317 - protein, 345 aa, Artificial Sequence
  Synthetic polypeptide
AQEFDISLANMVDRVSYLLQEIYGIENKNNQETKPSDDENSDNSNECVVCLSDLRDTLILPCRHLCLCTSCADTLRYQANNCPICRLPFRALLQIRAVRKKPGALSPVSFSPVLAQSLEHDEHSCPFKKSKPHPASLASKKPKRETNSDSVPPGYEPISLLEALNGLRAVSPAIPSAPLYEEITYSGISDGLSQASCPLAAIDHILDSSRQKGRPQSKAPDSTLRSPSSPIHEEDEEKLSEDVDAPPPLGGAELALRESSSPESFITEEVDESSSPQQGTRAASIENVLQDSSPEHCGRGPPADIYLPGRPTSMETAHGLATTSPTWPPLGGPSPDPSAAELTPL

SEQ ID NO: 20318 - protein, 299 aa, Artificial Sequence
  Synthetic polypeptide
AQEFDISLANMVDRVSYLLQEIYGIENKNNQETKPSDDENSDNSNECVVCLSDLRDTLILPCRHLCLCTSCADTLRYQANNCPICRLPFRALLQIRAVRKKPGALSPVSFSPVLAQSLEHDEHSNSDSVPPGYEPISLLEALNGLRAVSPAIPSAPLYEEITYSGISDGLSQASCPLAAIDHILDSSRQKGRPQSKAPDSTLRSPSSPIHEEDEEKLSEDVDAPPPLGGAELALRESSSPESFITEEVDESSSPQQGTRAASIENVLQDSSPEHCGRGPPADIYLPALGPDSCSVGIDE

SEQ ID NO: 20319 - protein, 89 aa, Artificial Sequence
  Synthetic polypeptide
AQEFDISLANMVDRVSYLLQEIYGIENKNNQETKPSDDENSDNSNECVVCLSDLRDTLILPCRHLCLCTSCADTLRYQANNCPICRLQL

SEQ ID NO: 20320 - protein, 119 aa, Artificial Sequence
  Synthetic polypeptide
GWAQWLTPVIPALREAEVGRSLEPRSLISAWPTWWTGSATSCRRSMALRTRTTRRPRSLGKSHRPASLWHLGPGQLEQLHVAGAEHLAGPRLNPGNPRTTRTATTATSVWCACPTCGTR

SEQ ID NO: 20321 - protein, 363 aa, Artificial Sequence
  Synthetic polypeptide
AQEFDISLANMVDRVSYLLQEIYGIENKNNQETKISWKVSQARFIMASGPRTTGAAPRGGSGAPGRASPQPREPSDDENSDNSNECVVCLSDLRDTLILPCRHLCLCTSCADTLRYQANNCPICRLPFRALLQIRAVRKKPGALSPVSFSPVLAQSLEHDEHSCPFKKSKPHPASLASKKPKRETNSDSVPPGYEPISLLEALNGLRAVSPAIPSAPLYEEITYSGISDGLSQASCPLAAIDHILDSSRQKGRPQSKAPDSTLRSPSSPIHEEDEEKLSEDVDAPPPLGGAELALRESSSPESFITEEVDESSSPQQGTRAASIENVLQDSSPEHCGRGPPADIYLPGRPTSMETAHGLATTS

SEQ ID NO: 20322 - protein, 321 aa, Artificial Sequence
  Synthetic polypeptide
AQEFDISLANMVDRVSYLLQEIYGIENKNNQETKPSDDENSDNSNECVVCLSDLRDTLILPCRHLCLCTSCADTLRYQANNCPICRLPFRALLQIRAVRKKPGALSPVSFSPVLAQSLEHDEHSCPFKKSKPHPASLASKKPKRETNSDSVPPGYEPISLLEALNGLRAVSPAIPSAPLYEEITYSGISDGLSQASCPLAAIDHILDSSRQKGRPQSKAPDSTLRSPSSPIHEEDEEKLSEDVDAPPPLGGAELALRESSSPESFITEEVDESSSPQQGTRAASIENVLQDSSPEHCGRGPPADIYLPALGPDSCSVGIDE

SEQ ID NO: 20323 - protein, 323 aa, Artificial Sequence
  Synthetic polypeptide
AQEFDISLANMVDRVSYLLQEIYGIENKNNQETKPSDDENSDNSNECVVCLSDLRDTLILPCRHLCLCTSCADTLRYQANNCPICRLPFRALLQIRAVRKKPGALSPVSFSPVLAQSLEHDEHSNSDSVPPGYEPISLLEALNGLRAVSPAIPSAPLYEEITYSGISDGLSQASCPLAAIDHILDSSRQKGRPQSKAPDSTLRSPSSPIHEEDEEKLSEDVDAPPPLGGAELALRESSSPESFITEEVDESSSPQQGTRAASIENVLQDSSPEHCGRGPPADIYLPGRPTSMETAHGLATTSPTWPPLGGPSPDPSAAELTPL

SEQ ID NO: 20324 - protein, 136 aa, Artificial Sequence
  Synthetic polypeptide
AQEFDISLANMVDRVSYLLQEIYGIENKNNQETKPSDDENSDNSNECVVCLSDLRDTLILPCRHLCLCTSCADTLRYQANNCPICRLPFRALLQIRAVRKKPGALSPVSFSPVLAQSLEHDEHSCPFKKSKPHPAS

SEQ ID NO: 20325 - protein, 13 aa, Artificial Sequence
  Synthetic polypeptide
FYIMLANSANPHI

SEQ ID NO: 20326 - protein, 42 aa, Artificial Sequence
  Synthetic polypeptide
LQEDKLRAPTDSTLCWPTQPIRTFSSPTTIQRAWFRSERKFS

SEQ ID NO: 20327 - protein, 156 aa, Artificial Sequence
  Synthetic polypeptide
SVTVSHHPQMGLSSCRKTSSGLPLILHYAGQLSQSAHLALQLPYNVLGLGRSANFLDHLYVGIPRPSGEKSIRKQEWTAIIPNSQLIVIPYPHNVPRSWSAKLYLTPSNIVLLTAIALIGVCVFILAIIGILHWQEKKADDREKRQEAHRFHFDAM

SEQ ID NO: 20328 - protein, 121 aa, Artificial Sequence
  Synthetic polypeptide
SVTVSHHPQMGLSSCRKTSSGLPLILHYAGQLSQSAHLALQLPYNVLGLGRSANFLDHLYVGIPRPSGEKSIRKQEWTAIIPNSQLIVIPYPHNVPRSSHRCLCFHLGNNWHFTLAGKESR

SEQ ID NO: 20329 - protein, 878 aa, Artificial Sequence
  Synthetic polypeptide
VYHLFPSLILQHEHNTAPPGSGNGHQDTPGKAFWFQPKGQKRKHLKPREYIKGICEPELEERECYPKDMHCIFVGAESLFLKSLIQDTCADLCILDIGLLGIRGSAEAVVMARSHIQQFVKLFENKENLPSSQKESEVKREFKQFVEAHADNYTMDLLILPTSLKKELLTLTQGEENLFETGDDEVIEMRDSQQTEFTQNAATGLNISRDETVLQEEARNKAGTPVSELTKQMDTVLSSSPDVLFDPINGLTPDEEALSNERICQKRRFSDSEERHTKKQFSLENVQEGEILHDAKTLAGNVIADLSDSSADSENLSPDIKETTEEMEYNILVNFFKTMGYSQEIVEKVIKVYGPSTEPLLLLEEIEKENKRFQEDREFSAGTVYPETNKTKNKGVYSSTNELTTDSTPKKTQAHTQQNMVEKFSQLPFKVEAKPCTSNCRINTFRTVPIEQKHEVWGSNQNYICNTDPETDGLSPSVASPSPKEVNFVSRGASSHQPRVPLFPENGLHQQPEPLLPNNMKSACEKRLGCCSSPHSKPNCSTLSPPMPLPQLLPSVTDARSAGPSDHIDSSVTGVQRFRDTLKIPYKLELKNEPGRTDLKHIVIDGSNVAITHGLKKFFSCRGIAIAVEYFWKLGNRNITVFVPQWRTRRDPNVTEQHFLTQLQELGILSLTPARMVFGERIASHDDRFLLHLADKTGGIIVTNDNFREFVNESVSWREIITKRLLQYTFVGDIFMVPDDPLGRSGPRLEEFLQKEVCLRDMQPLLSALPNVGMFDPSFRVPGTQAASTSHQPPTRIQGAPSSHWLPQQPHFPLLPALPSLQQNLPMPAQRSSAETNELREALLKIFPDSEQRLKIDQILVAHPYMKDLNALSAMVLD

SEQ ID NO: 20330 - protein, 13 aa, Artificial Sequence
  Synthetic polypeptide
NRENILKESVNLN

SEQ ID NO: 20331 - protein, 38 aa, Artificial Sequence
  Synthetic polypeptide
TQHSSTWKWKWAPGHTRKSLLVSAQGTEKETSKTERIY

SEQ ID NO: 20332 - protein, 28 aa, Artificial Sequence
  Synthetic polypeptide
GKSSGLVTSLMCIQCLDQSGTAEAISCS

SEQ ID NO: 20333 - protein, 488 aa, Artificial Sequence
  Synthetic polypeptide
CAFSAWIKVEQLKPYHAHKEEMIKINKGKRFQQAVDAVEEFLRRAKGKDQTSSHNSSDDKNRRNSSEERSRPNSGDEKRKLSLSEGKVKKNMGEGKKRVSSGSSERGSKSPLKRAQEQSPRKRGRPPKDEKDLTIPESSTVKGMMAGPMAAFKWQPTASEPVKDADPHFHHFLLSQTEKETGSTSIQAADSTAVNGSITPTDKKIGFLGLGLMGSGIVSNLLKMGHTVTVWNRTAEKCDLFIQEGARLGRTPAEVVSTCDITFACVSDPKAAKDLVLGPSGVLQGIRPGKCYVDMSTVDADTVTELAQVIVSRGGRFLEAPVSGNQQLSNDGMLVILAAGDRGLYEDCSSCFQAMGKTSFFLGEVGNAAKMMLIVNMVQGSFMATIAEGLTLAHVTGQSQQTLLDILNQGQLASIFLDQKCQNILQGNFKPDFYLKYIQKDLRLAIALGDAVNHPTPMAAAANEVYKRAKALDQSDNDMSAVYRAYIH

SEQ ID NO: 20334 - protein, 21 aa, Artificial Sequence
  Synthetic polypeptide
KELWIGYQPNVHSVPGSKWNS

SEQ ID NO: 20335 - protein, 424 aa, Artificial Sequence
  Synthetic polypeptide
CAFSAWIKVEQLKPYHAHKEEMIKINKGKRFQQAVDAVEEFLRRAKGKDQDLTIPESSTVKGMMAGPMAAFKWQPTASEPVKDADPHFHHFLLSQTEKPAVCYQAITKKLKICEEETGSTSIQAADSTAVNGSITPTDKKIGFLGLGLMGSGIVSNLLKMGHTVTVWNRTAEKCDLFIQEGARLGRTPAEVVSTCDITFACVSDPKAAKDLVLGPSGVLQGIRPGKCYVDMSTVDADTVTELAQVIVSRGGRFLEAPVSGNQQLSNDGMLVILAAGDRGLYEDCSSCFQAMGKTSFFLGEVGNAAKMMLIVNMVQGSFMATIAEGLTLAHVTGQSQQTLLDILNQGQLASIFLDQKCQNILQGNFKPDFYLKYIQKDLRLAIALGDAVNHPTPMAAAANEVYKRAKALDQSDNDMSAVYRAYIH

SEQ ID NO: 20336 - protein, 505 aa, Artificial Sequence
  Synthetic polypeptide
CAFSAWIKVEQLKPYHAHKEEMIKINKGKRFQQAVDAVEEFLRRAKGKDQTSSHNSSDDKNRRNSSEERSRPNSGDEKRKLSLSEGKVKKNMGEGKKRVSSGSSERGSKSPLKRAQEQSPRKRGRPPKDEKDLTIPESSTVKGMMAGPMAAFKWQPTASEPVKDADPHFHHFLLSQTEKPAVCYQAITKKLKICEEETGSTSIQAADSTAVNGSITPTDKKIGFLGLGLMGSGIVSNLLKMGHTVTVWNRTAEKCDLFIQEGARLGRTPAEVVSTCDITFACVSDPKAAKDLVLGPSGVLQGIRPGKCYVDMSTVDADTVTELAQVIVSRGGRFLEAPVSGNQQLSNDGMLVILAAGDRGLYEDCSSCFQAMGKTSFFLGEVGNAAKMMLIVNMVQGSFMATIAEGLTLAHVTGQSQQTLLDILNQGQLASIFLDQKCQNILQGNFKPDFYLKYIQKDLRLAIALGDAVNHPTPMAAAANEVYKRAKALDQSDNDMSAVYRAYIH

SEQ ID NO: 20337 - protein, 499 aa, Artificial Sequence
  Synthetic polypeptide
CAFSAWIKVEQLKPYHAHKEEMIKINKGKRFQQAVDAVEEFLRRAKGKDQTSSHNSSDDKNRRNSSEERSRPNSGDEKRKLSLSEGKVKKNMGEGKKRVSSGSSERGSKSPLKRAQEQSPRKRGRPPKDEKDLTIPESSTVKGMMAGPMAAFKWQPTASEPVKDADPHFHHFLLSQTEKPAVCYQAITKKLKICEEETGSTSIQAADSTAVNGSITPTDKKIGFLGLGLMGSGIVSNLLKMGHTVTVWNRTAEKEGARLGRTPAEVVSTCDITFACVSDPKAAKDLVLGPSGVLQGIRPGKCYVDMSTVDADTVTELAQVIVSRGGRFLEAPVSGNQQLSNDGMLVILAAGDRGLYEDCSSCFQAMGKTSFFLGEVGNAAKMMLIVNMVQGSFMATIAEGLTLAHVTGQSQQTLLDILNQGQLASIFLDQKCQNILQGNFKPDFYLKYIQKDLRLAIALGDAVNHPTPMAAAANEVYKRAKALDQSDNDMSAVYRAYIH

SEQ ID NO: 20338 - protein, 137 aa, Artificial Sequence
  Synthetic polypeptide
CAFSAWIKVEQLKPYHAHKEEMIKINKGKRFQQAVDAVEEFLRRAKGKDQDLTIPESSTVKGMMAGPMAAFKWQPTASEPVKDADPHFHHFLLSQTEKETGSTSIQAADSTAVNGSITPTDKKIGFLGLGLMGSGIV

SEQ ID NO: 20339 - protein, 31 aa, Artificial Sequence
  Synthetic polypeptide
GRAWCLRPAIPVLWEAKCLDQSGTAEAISCS

SEQ ID NO: 20340 - protein, 501 aa, Artificial Sequence
  Synthetic polypeptide
AGHGASGLQSQYFGRPSAWIKVEQLKPYHAHKEEMIKINKGKRFQQAVDAVEEFLRRAKGKDQTSSHNSSDDKNRRNSSEERSRPNSGDEKRKLSLSEGKVKKNMGEGKKRVSSGSSERGSKSPLKRAQEQSPRKRGRPPKDEKDLTIPESSTVKGMMAGPMAAFKWQPTASEPVKDADPHFHHFLLSQTEKETGSTSIQAADSTAVNGSITPTDKKIGFLGLGLMGSGIVSNLLKMGHTVTVWNRTAEKCDLFIQEGARLGRTPAEVVSTCDITFACVSDPKAAKDLVLGPSGVLQGIRPGKCYVDMSTVDADTVTELAQVIVSRGGRFLEAPVSGNQQLSNDGMLVILAAGDRGLYEDCSSCFQAMGKTSFFLGEVGNAAKMMLIVNMVQGSFMATIAEGLTLAHVTGQSQQTLLDILNQGQLASIFLDQKCQNILQGNFKPDFYLKYIQKDLRLAIALGDAVNHPTPMAAAANEVYKRAKALDQSDNDMSAVYRAYIH

SEQ ID NO: 20341 - protein, 24 aa, Artificial Sequence
  Synthetic polypeptide
PGMVPQACNPSTLGGQVPGSKWNS

SEQ ID NO: 20342 - protein, 437 aa, Artificial Sequence
  Synthetic polypeptide
AGHGASGLQSQYFGRPSAWIKVEQLKPYHAHKEEMIKINKGKRFQQAVDAVEEFLRRAKGKDQDLTIPESSTVKGMMAGPMAAFKWQPTASEPVKDADPHFHHFLLSQTEKPAVCYQAITKKLKICEEETGSTSIQAADSTAVNGSITPTDKKIGFLGLGLMGSGIVSNLLKMGHTVTVWNRTAEKCDLFIQEGARLGRTPAEVVSTCDITFACVSDPKAAKDLVLGPSGVLQGIRPGKCYVDMSTVDADTVTELAQVIVSRGGRFLEAPVSGNQQLSNDGMLVILAAGDRGLYEDCSSCFQAMGKTSFFLGEVGNAAKMMLIVNMVQGSFMATIAEGLTLAHVTGQSQQTLLDILNQGQLASIFLDQKCQNILQGNFKPDFYLKYIQKDLRLAIALGDAVNHPTPMAAAANEVYKRAKALDQSDNDMSAVYRAYIH

SEQ ID NO: 20343 - protein, 518 aa, Artificial Sequence
  Synthetic polypeptide
AGHGASGLQSQYFGRPSAWIKVEQLKPYHAHKEEMIKINKGKRFQQAVDAVEEFLRRAKGKDQTSSHNSSDDKNRRNSSEERSRPNSGDEKRKLSLSEGKVKKNMGEGKKRVSSGSSERGSKSPLKRAQEQSPRKRGRPPKDEKDLTIPESSTVKGMMAGPMAAFKWQPTASEPVKDADPHFHHFLLSQTEKPAVCYQAITKKLKICEEETGSTSIQAADSTAVNGSITPTDKKIGFLGLGLMGSGIVSNLLKMGHTVTVWNRTAEKCDLFIQEGARLGRTPAEVVSTCDITFACVSDPKAAKDLVLGPSGVLQGIRPGKCYVDMSTVDADTVTELAQVIVSRGGRFLEAPVSGNQQLSNDGMLVILAAGDRGLYEDCSSCFQAMGKTSFFLGEVGNAAKMMLIVNMVQGSFMATIAEGLTLAHVTGQSQQTLLDILNQGQLASIFLDQKCQNILQGNFKPDFYLKYIQKDLRLAIALGDAVNHPTPMAAAANEVYKRAKALDQSDNDMSAVYRAYIH

SEQ ID NO: 20344 - protein, 512 aa, Artificial Sequence
  Synthetic polypeptide
AGHGASGLQSQYFGRPSAWIKVEQLKPYHAHKEEMIKINKGKRFQQAVDAVEEFLRRAKGKDQTSSHNSSDDKNRRNSSEERSRPNSGDEKRKLSLSEGKVKKNMGEGKKRVSSGSSERGSKSPLKRAQEQSPRKRGRPPKDEKDLTIPESSTVKGMMAGPMAAFKWQPTASEPVKDADPHFHHFLLSQTEKPAVCYQAITKKLKICEEETGSTSIQAADSTAVNGSITPTDKKIGFLGLGLMGSGIVSNLLKMGHTVTVWNRTAEKEGARLGRTPAEVVSTCDITFACVSDPKAAKDLVLGPSGVLQGIRPGKCYVDMSTVDADTVTELAQVIVSRGGRFLEAPVSGNQQLSNDGMLVILAAGDRGLYEDCSSCFQAMGKTSFFLGEVGNAAKMMLIVNMVQGSFMATIAEGLTLAHVTGQSQQTLLDILNQGQLASIFLDQKCQNILQGNFKPDFYLKYIQKDLRLAIALGDAVNHPTPMAAAANEVYKRAKALDQSDNDMSAVYRAYIH

SEQ ID NO: 20345 - protein, 150 aa, Artificial Sequence
  Synthetic polypeptide
AGHGASGLQSQYFGRPSAWIKVEQLKPYHAHKEEMIKINKGKRFQQAVDAVEEFLRRAKGKDQDLTIPESSTVKGMMAGPMAAFKWQPTASEPVKDADPHFHHFLLSQTEKETGSTSIQAADSTAVNGSITPTDKKIGFLGLGLMGSGIV

SEQ ID NO: 20346 - protein, 19 aa, Artificial Sequence
  Synthetic polypeptide
PVVVTLPVIPATQEAECFL

SEQ ID NO: 20347 - protein, 28 aa, Artificial Sequence
  Synthetic polypeptide
SQLLRRLSASYSGICLYSYWCLELVNRP

SEQ ID NO: 20348 - protein, 84 aa, Artificial Sequence
  Synthetic polypeptide
PVVVTLPVIPATQEAEVSFFTSLWNHPFFTISCITLIGLFFAGIHKRVVAPSIIAARCRTVLAEYNMSCDDTGKLILKPRPHVQ

SEQ ID NO: 20349 - protein, 27 aa, Artificial Sequence
  Synthetic polypeptide
SQLLRRLRCPSSHHYGITHFSPLAVSL

SEQ ID NO: 20350 - protein, 31 aa, Artificial Sequence
  Synthetic polypeptide
PVVVTLPVIPATQEAEVSFFTSLWNHPFFTI

SEQ ID NO: 20351 - protein, 23 aa, Artificial Sequence
  Synthetic polypeptide
SQLLRRLRCPSSHHYGITHFSPL

SEQ ID NO: 20352 - protein, 67 aa, Artificial Sequence
  Synthetic polypeptide
PVVVTLPVIPATQEAEVSFFTSLWNHPFFTISCITLIGLFFAGIHKRVVAPSICSMSNGISRIQYVL

SEQ ID NO: 20353 - protein, 71 aa, Artificial Sequence
  Synthetic polypeptide
PVVVTLPVIPATQEAEVSFFTSLWNHPFFTISCITLIGLFFAGIHKRVVAPSIIAARCRTVLAEYNMSCDD

SEQ ID NO: 20354 - protein, 28 aa, Artificial Sequence
  Synthetic polypeptide
GTVRRIKRSEIETGWRMRQKKISSVTPL

SEQ ID NO: 20355 - protein, 619 aa, Artificial Sequence
  Synthetic polypeptide
GWKFETSLGNIARPCLCKINYKNFQSLVVCTCVPAIQEAEVGGSLEPRSLRYSEEDKKKRDRDRVENEAEKDLQCHAPVRLDLPPEKPLTSSLAKQEEVEQTPLQEALNQLMRQLQRKDPSAFFSFPVTDFIAPGYSMIIKHPMDFSTMKEKIKNNDYQSIEELKDNFKLMCTNAMIYNKPETIYYKAAKKLLHSGMKILSQERIQSLKQSIDFMADLQKTRKQKDGTDTSQSGEDGGCWQREREDSGDAEAHAFKSPSKENKKKDKDMLEDKFKSNNLEREQEQLDRIVKESGGKLTRRLVNSQCEFERRKPDGTTTLGLLHPVDPIVGEPGYCPVRLGMTTGRLQSGVNTLQGFKEDKRNKVTPVLYLNYGPYSSYAPHYDSTFANISKDDSDLIYSTYGEDSDLPSDFSIHEFLATCQDYPYVMADSLLDVLTKGGHSRTLQEMEMSLPEDEGHTRTLDTAKEMEITEVEPPGRLDSSTQDRLIALKAVTNFGVPVEVFDSEEAEIFQKKLDETTRLLRELQEAQNERLSTRPPPNMICLLGPSYREMHLAEQVTNNLKELAQQVTPGDIVSTYGVRKAMGISIPSPVMENNFVDLTEDTEEPKKTDVAECGPGGS

SEQ ID NO: 20356 - protein, 620 aa, Artificial Sequence
  Synthetic polypeptide
GWKFETSLGNIARPCLCKINYKNFQSLVVCTCVPAIQEAEVGGSLEPRSLRYSEEDKKKRDRDRVENEAEKDLQCHAPVRLDLPPEKPLTSSLAKQEEVEQTPLQEALNQLMRQLQRKDPSAFFSFPVTDFIAPGYSMIIKHPMDFSTMKEKIKNNDYQSIEELKDNFKLMCTNAMIYNKPETIYYKAAKKLLHSGMKILSQERIQSLKQSIDFMADLQKTRKQKDGTDTSQSGEDGGCWQREREDSGDAEAHAFKSPSKENKKKDKDMLEDKFKSNNLEREQEQLDRIVKESGGKLTRRLVNSQCEFERRKPDGTTTLGLLHPVDPIVGEPGYCPVRLGMTTGRLQSGVNTLQGFKEDKRNKVTPVLYLNYGPYSSYAPHYDSTFANISKDDSDLIYSTYGEDSDLPSDFSIHEFLATCQDYPYVMADSLLDVLTKGGHSRTLQEMEMSLPEDEGHTRTLDTAKEMEQITEVEPPGRLDSSTQDRLIALKAVTNFGVPVEVFDSEEAEIFQKKLDETTRLLRELQEAQNERLSTRPPPNMICLLGPSYREMHLAEQVTNNLKELAQQVTPGDIVSTYGVRKAMGISIPSPVMENNFVDLTEDTEEPKKTDVAECGPGGS

SEQ ID NO: 20357 - protein, 570 aa, Artificial Sequence
  Synthetic polypeptide
AQEFEEDKKKRDRDRVENEAEKDLQCHAPVRLDLPPEKPLTSSLAKQEEVEQTPLQEALNQLMRQLQRKDPSAFFSFPVTDFIAPGYSMIIKHPMDFSTMKEKIKNNDYQSIEELKDNFKLMCTNAMIYNKPETIYYKAAKKLLHSGMKILSQERIQSLKQSIDFMADLQKTRKQKDGTDTSQSGEDGGCWQREREDSGDAEAHAFKSPSKENKKKDKDMLEDKFKSNNLEREQEQLDRIVKESGGKLTRRLVNSQCEFERRKPDGTTTLGLLHPVDPIVGEPGYCPVRLGMTTGRLQSGVNTLQGFKEDKRNKVTPVLYLNYGPYSSYAPHYDSTFANISKDDSDLIYSTYGEDSDLPSDFSIHEFLATCQDYPYVMADSLLDVLTKGGHSRTLQEMEMSLPEDEGHTRTLDTAKEMEITEVEPPGRLDSSTQDRLIALKAVTNFGVPVEVFDSEEAEIFQKKLDETTRLLRELQEAQNERLSTRPPPNMICLLGPSYREMHLAEQVTNNLKELAQQVTPGDIVSTYGVRKAMGISIPSPVMENNFVDLTEDTEEPKKTDVAECGPGGS

SEQ ID NO: 20358 - protein, 75 aa, Artificial Sequence
  Synthetic polypeptide
GWKFETSLGNIARPCLCKINYKNFQSLVVCTCVPAIQEAEVGGSLEPRSLRRIKRSEIETGWRMRQKKISSVTPL

SEQ ID NO: 20359 - protein, 571 aa, Artificial Sequence
  Synthetic polypeptide
AQEFEEDKKKRDRDRVENEAEKDLQCHAPVRLDLPPEKPLTSSLAKQEEVEQTPLQEALNQLMRQLQRKDPSAFFSFPVTDFIAPGYSMIIKHPMDFSTMKEKIKNNDYQSIEELKDNFKLMCTNAMIYNKPETIYYKAAKKLLHSGMKILSQERIQSLKQSIDFMADLQKTRKQKDGTDTSQSGEDGGCWQREREDSGDAEAHAFKSPSKENKKKDKDMLEDKFKSNNLEREQEQLDRIVKESGGKLTRRLVNSQCEFERRKPDGTTTLGLLHPVDPIVGEPGYCPVRLGMTTGRLQSGVNTLQGFKEDKRNKVTPVLYLNYGPYSSYAPHYDSTFANISKDDSDLIYSTYGEDSDLPSDFSIHEFLATCQDYPYVMADSLLDVLTKGGHSRTLQEMEMSLPEDEGHTRTLDTAKEMEQITEVEPPGRLDSSTQDRLIALKAVTNFGVPVEVFDSEEAEIFQKKLDETTRLLRELQEAQNERLSTRPPPNMICLLGPSYREMHLAEQVTNNLKELAQQVTPGDIVSTYGVRKAMGISIPSPVMENNFVDLTEDTEEPKKTDVAECGPGGS

SEQ ID NO: 20360 - protein, 20 aa, Artificial Sequence
  Synthetic polypeptide
AMITPLHSSLGHHQLAAHHL

SEQ ID NO: 20361 - protein, 324 aa, Artificial Sequence
  Synthetic polypeptide
SHPCTPAWDITSLLHTIYEVVDSSVNHSPTSSKMLRVKLTVAPDGSQSKRSVLVNQADLQSARPRAETKPTEDLRSWEKKQRAPLRFQGDSRLEQSGCYHHCVDENIERRNHYLDLAGIENYTSQFGPGSPSVAQKSELPPRTSNPTRSRSHEPEAIHIPHRKPQGVDPASFHFLDTPIAKVSELQQRLRGTQDGSKHFVRSPKAQGKSVGVGHVARGARNKPPLGPAIPAVSPSAHLAASPALLPSLAPLGHKKHKHRAKESQQGCRGLQAPLASGGPVLGREHLRELPALVVYESQAGQPVQRHEHHHHHEHHHHYHHFYQT

SEQ ID NO: 20362 - protein, 53 aa, Artificial Sequence
  Synthetic polypeptide
GWRIAWDWEFKSAVSHDHTPALQPGTSPACCTPSMRWWTPLSTTPQHPARCCG

SEQ ID NO: 20363 - protein, 329 aa, Artificial Sequence
  Synthetic polypeptide
AMITPLHSSLGDRDITSLLHTIYEVVDSSVNHSPTSSKMLRVKLTVAPDGSQSKRSVLVNQADLQSARPRAETKPTEDLRSWEKKQRAPLRFQGDSRLEQSGCYHHCVDENIERRNHYLDLAGIENYTSQFGPGSPSVAQKSELPPRTSNPTRSRSHEPEAIHIPHRKPQGVDPASFHFLDTPIAKVSELQQRLRGTQDGSKHFVRSPKAQGKSVGVGHVARGARNKPPLGPAIPAVSPSAHLAASPALLPSLAPLGHKKHKHRAKESQQGCRGLQAPLASGGPVLGREHLRELPALVVYESQAGQPVQRHEHHHHHEHHHHYHHFYQT

SEQ ID NO: 20364 - protein, 39 aa, Artificial Sequence
  Synthetic polypeptide
SHPCTPAWVTETSPACCTPSMRWWTPLSTTPQHPARCCG

SEQ ID NO: 20365 - protein, 11 aa, Artificial Sequence
  Synthetic polypeptide
QRHHQLAAHHL

SEQ ID NO: 20366 - protein, 17 aa, Artificial Sequence
  Synthetic polypeptide
RNCGPSSLPQNWSEQSS

SEQ ID NO: 20367 - protein, 1601 aa, Artificial Sequence
  Synthetic polypeptide
VDKETVAQARCHRIGQNKAVKVYRLVTRNSYEREMFDRASLKLGLDKAVLQSMSGRESNVGGIQQLSKKEIEDLLRRGAYGAIMEEEDEGSKFCEEDIDQILLRRTKTITIESEGRGSTFAKASFVASGNRTDISLDDPNFWQKWAKKAEIDIEAISGRNSLVIDTPRIRKQTRPFSATKDELAELSEAESEGDEKPKLRRPCDRSNGYGRTECFRVEKNLLVYGWGRWREILSHGRFKRQLNEHDVEIICRALLAYCLVHYRGDEKIKGFIWDLITPTEDGQTRELQNHLGLSAPVPRGRKGKKVKTQTSSFDIQKAEWLRKYNPEQLLQDEGYKKHIKHHCNKVLLRVRMLYYLKQEVIGNECQKVFDGVDASDIDVWVPEPDHSEVPAEWWDFDADKSLLIGVFKHGYEKYNTIRADPALCFLERVGKPDEKAVAAEQRANDYMDGDVEDPEYKPAPAIFKDDIEDDVSSPGDLVIADGDGQLMEGDKVYWPTQSALTTRLRRLITAYQRTNKNRQIQQIQPTFSVPTSVMQPIYEEATLNPKMAAKIERQQRWTRREEADFYRVVSTFGVVFDPDRGQFDWTKFRAMARLHKKTDDSLEKYLYAFMSMCRRVCRLPSKEELVDPNIFIQPITEERASRTLYRIELLRKVREQALRHPQLFERLKLCHPNPDLPVWWECGPHDRDLLIGAAKHGVSRTDYHILRDPELSFMAAQRNYSQSKMAHSRTSTPLLQQYQVALSASPLTSLPRLLDAKGIILEEMKVKSENLKEEPQSSEEESMSSVETRTLIKSEPVSPKNGVLPQATGDQKSGGKCETDRRMVAARTEPLTPNPASKKPRVHKRGSESSSDSDSDSERSSCSSRSSSSSSSSSCSHSRSGSSSSSSSSCSSASSSSSSSTSSSSSSSSSSSEESDSDEEEAQKRAESTTHMKAYDEESVASLSTTQDETQDSFQMNNGTPESAYILQGGYMLAASYWPKDRVMINRLDSICQTVLKGKWPSARRSYDANTVASFYTTKLLDSPGAATEYSDPSVPTPPGAGVKEEHDQSTQMSKEGGLKLTFQKQGLAQKRPFDGEDGALGQQQYLTRLRELQSASETSLVNFPKSIPVSGTSIQPTLGANGVILDNQPIVKKRRGRRKNVEGVDIFFFNRNKPPNHVSLGLTSSQISTGINPALSYTQPQGIPDTESPVPVINLKDGTRLAGDDAPKRKDLEKWLKEHPGYVEDLGAFIPRMQLHEGRPKQKRHRCRNPNKLDVNSLTGEERVQLINRRNARKVGGAFAPPLKDLCRFLKENSEYGVAPEWGDVVKQSGFLPESMYERILTGPVVREEVSRRGRRPKSGIAKATAAAAAASATSVSGNPLLANGLLPGVDLTTLQALQQNLQNLQSLQVTAGLMGMPTGLPSGGEAKNMAAMFPMLLSGMAGLPNLLGMGGLLTKPTESGTEDKKGSDSKESEGKTERTESQSSENGGENSVSSSPSTSSTAALNTAAAANPLALNPLLLSNILYPGMLLTPGLNLHIPTLSQSNTFDVQNKNSDLGSSKSVEVKEEDSRIKDQEDKGGTEPSPLNENSTDEGSEKADASSGSDSTSSSSEDSDSSNED

SEQ ID NO: 20368 - protein, 62 aa, Artificial Sequence
  Synthetic polypeptide
KENKSLFEKDTWTHMFIVAQFTIAKLWNQPKCPSINEWIKKLWPKLVATELVRTKQLKSTDW

SEQ ID NO: 20369 - protein, 1600 aa, Artificial Sequence
  Synthetic polypeptide
VDKETVAQARCHRIGQNKAVKVYRLVTRNSYEREMFDRASLKLGLDKAVLQSMSGRESNVGGIQQLSKKEIEDLLRRGAYGAIMEEEDEGSKFCEEDIDQILLRRTKTITIESEGRGSTFAKASFVASGNRTDISLDDPNFWQKWAKKAEIDIEAISGRNSLVIDTPRIRKQTRPFSATKDELAELSEAESEGDEKPKLRRPCDRSNGYGRTECFRVEKNLLVYGWGRWREILSHGRFKRQLNEHDVEIICRALLAYCLVHYRGDEKIKGFIWDLITPTEDGQTRELQNHLGLSAPVPRGRKGKKVKTQTSSFDIQKAEWLRKYNPEQLLQDEGYKKHIKHHCNKVLLRVRMLYYLKQEVIGNECQKVFDGVDASDIDVWVPEPDHSEVPAEWWDFDADKSLLIGVFKHGYEKYNTIRADPALCFLERVGKPDEKAVAAEQRANDYMDGDVEDPEYKPAPAIFKDDIEDDVSSPGDLVIADGDGQLMEGDKVYWPTQSALTTRLRRLITAYQRTNKNRQIQQIQPTFSVPTSVMQPIYEEATLNPKMAAKIERQQRWTRREEADFYRVVSTFGVVFDPDRGQFDWTKFRAMARLHKKTDDSLEKYLYAFMSMCRRVCRLPSKEELVDPNIFIQPITEERASRTLYRIELLRKVREQALRHPQLFERLKLCHPNPDLPVWWECGPHDRDLLIGAAKHGVSRTDYHILRDPELSFMAAQRNYSQSKMAHSRTSTPLLQQYQVALSASPLTSLPRLLDAKGIILEEMKVKSENLKEEPQSSEEESMSSVETRTLIKSEPVSPKNGVLPQATGDQKSGGKCETDRRMVAARTEPLTPNPASKKPRVHKRGSESSSDSDSDSERSSCSSRSSSSSSSSSCSHSRSGSSSSSSSSCSSASSSSSSSTSSSSSSSSSSSEESDSDEEEAQKRESTTHMKAYDEESVASLSTTQDETQDSFQMNNGTPESAYILQGGYMLAASYWPKDRVMINRLDSICQTVLKGKWPSARRSYDANTVASFYTTKLLDSPGAATEYSDPSVPTPPGAGVKEEHDQSTQMSKEGGLKLTFQKQGLAQKRPFDGEDGALGQQQYLTRLRELQSASETSLVNFPKSIPVSGTSIQPTLGANGVILDNQPIVKKRRGRRKNVEGVDIFFFNRNKPPNHVSLGLTSSQISTGINPALSYTQPQGIPDTESPVPVINLKDGTRLAGDDAPKRKDLEKWLKEHPGYVEDLGAFIPRMQLHEGRPKQKRHRCRNPNKLDVNSLTGEERVQLINRRNARKVGGAFAPPLKDLCRFLKENSEYGVAPEWGDVVKQSGFLPESMYERILTGPVVREEVSRRGRRPKSGIAKATAAAAAASATSVSGNPLLANGLLPGVDLTTLQALQQNLQNLQSLQVTAGLMGMPTGLPSGGEAKNMAAMFPMLLSGMAGLPNLLGMGGLLTKPTESGTEDKKGSDSKESEGKTERTESQSSENGGENSVSSSPSTSSTAALNTAAAANPLALNPLLLSNILYPGMLLTPGLNLHIPTLSQSNTFDVQNKNSDLGSSKSVEVKEEDSRIKDQEDKGGTEPSPLNENSTDEGSEKADASSGSDSTSSSSEDSDSSNED

SEQ ID NO: 20370 - protein, 1616 aa, Artificial Sequence
  Synthetic polypeptide
VDKETVAQARCHRIGQNKAVKVYRLVTRNSYEREMFDRASLKLGLDKAVLQSMSGRESNVGGIQQLSKKEIEDLLRRGAYGAIMEEEDEGSKFCEEDIDQILLRRTKTITIESEGRGSTFAKASFVASGNRTDISLDDPNFWQKWAKKAEIDIEAISGRNSLVIDTPRIRKQTRPFSATKDELAELSEAESEGDEKPKLRRPCDRSNGYGRTECFRVEKNLLVYGWGRWREILSHGRFKRQLNEHDVEIICRALLAYCLVHYRGDEKIKGFIWDLITPTEDGQTRELQNHLGLSAPVPRGRKGKKVKTQTSSFDIQKAEWLRKYNPEQLLQDEGYKKHIKHHCNKVLLRVRMLYYLKQEVIGNECQKVFDGVDASDIDVWVPEPDHSEVPAEWWDFDADKSLLIGVFKHGYEKYNTIRADPALCFLERVGKPDEKAVAAEQRANDYMDGDVEDPEYKPAPAIFKDDIEDDVSSPGDLVIADGDGQLMEGDKVYWPTQSALTTRLRRLITAYQRTNKNRQIQQIQPTFSVPTSVMQPIYEEATLNPKMAAKIERQQRWTRREEADFYRVVSTFGVVFDPDRGQFDWTKFRAMARLHKKTDDSLEKYLYAFMSMCRRVCRLPSKEELVDPNIFIQPITEERASRTLYRIELLRKVREQALRHPQLFERLKLCHPNPDLPVWWECGPHDRDLLIGAAKHGVSRTDYHILRDPELSFMAAQRNYSQSKMAHSRTSTPLLQQYQVALSASPLTSLPRLLDAKGIILEEMKVKSENLKEEPQSSEEESMSSVETRTLIKSEPVSPKNGVLPQATGDQKSGGKCETDRRMVAARTEPLTPNPASKKPRVHKRGSESSSDSDSDSERSSCSSRSSSSSSSSSCSHSRSGSSSSSSSSCSSASSSSSSSTSSSSSSSSSSSEESDSDEEEAQKRESTTHMKAYDEESVASLSTTQDETQDSFQMNNGTPESAYILQGGYMLAASYWPKDRVMINRLDSICQTVLKGKWPSARRSYDANTVASFYTTKLLDSPGAATEYSDPSVPTPPGAGVKEEHDQSTQMSKVKKHVREKEFTVKIKDEGGLKLTFQKQGLAQKRPFDGEDGALGQQQYLTRLRELQSASETSLVNFPKSIPVSGTSIQPTLGANGVILDNQPIVKKRRGRRKNVEGVDIFFFNRNKPPNHVSLGLTSSQISTGINPALSYTQPQGIPDTESPVPVINLKDGTRLAGDDAPKRKDLEKWLKEHPGYVEDLGAFIPRMQLHEGRPKQKRHRCRNPNKLDVNSLTGEERVQLINRRNARKVGGAFAPPLKDLCRFLKENSEYGVAPEWGDVVKQSGFLPESMYERILTGPVVREEVSRRGRRPKSGIAKATAAAAAASATSVSGNPLLANGLLPGVDLTTLQALQQNLQNLQSLQVTAGLMGMPTGLPSGGEAKNMAAMFPMLLSGMAGLPNLLGMGGLLTKPTESGTEDKKGSDSKESEGKTERTESQSSENGGENSVSSSPSTSSTAALNTAAAANPLALNPLLLSNILYPGMLLTPGLNLHIPTLSQSNTFDVQNKNSDLGSSKSVEVKEEDSRIKDQEDKGGTEPSPLNENSTDEGSEKADASSGSDSTSSSSEDSDSSNED

SEQ ID NO: 20371 - protein, 291 aa, Artificial Sequence
  Synthetic polypeptide
VDKETVAQARCHRIGQNKAVKVYRLVTRNSYEREMFDRASLKLGLDKAVLQSMSGRESNVGGIQQLSKKEIEDLLRRGAYGAIMEEEDEGSKFCEEDIDQILLRRTKTITIESEGRGSTFAKASFVASGNRTDISLDDPNFWQKWAKKAEIDIEAISGRNSLVIDTPRIRKQTRPFSATKDELAELSEAESEGDEKPKLRRPCDRSNGYGRTECFRVEKNLLVYGWGRWREILSHGRFKRQLNEHDVEIICRALLAYCLVHYRGDEKIKGFIWDLITPTEDGQTRELQNHL

SEQ ID NO: 20372 - protein, 1061 aa, Artificial Sequence
  Synthetic polypeptide
ELGNDLHWLACALYVACRKSVPTVSKGTVEGNYVSLTRILKCSEQSLIEFFNKMKKWEDMANLPPHFRERTERLERNFTVSAVIFKKYEPIFQDIFKYPQEEQPRQQRGRKQRRQPCTVSEIFHFCWVLFIYAKGNFPMISDDLVNSYHLLLCALDLVYGNALQCSNRKELVNPNFKGLSEDFHAKDSKPSSDPPCIIEKLCSLHDGLVLEAKGIKEHFWKPYIRKLYEKKLLKGKEENLTGFLEPGNFGESFKAINKAYEEYVLSVGNLDERIFLGEDAEEEIGTLSRCLNAGSGTETAERVQMKNILQQHFDKSKALRISTPLTGVRYIKENSPCVTPVSTATHSLSRLHTMLTGLRNAPSEKLEQILRTCSRDPTQAIANRLKEMFEIYSQHFQPDEDFSNCAKEIASKHFRFAEMLYYKVLESVIEQEQKRLGDMDLSGILEQDAFHRSLLACCLEVVTFSYKPPGNFPFITEIFDVPLYHFYKVIEVFIRAEDGLCREVVKHLNQIEEQILDHLAWKPESPLWEKIRDNENRVPTCEEVMPPQNLERADEICIAGSPLTPRRVTEVRADTGGLGRSITSPTTLYDRYSSPPASTTRRRLFVENDSPSDGGTPGRMPPQPLVNAVPVQNVSGETVSVTPVPGQTLVTMATATVTANNGQTVTIPVQGIANENGGITFFPVQVNVGGQAQAVTGSIQPLSAQALAGSLSSQQVTGTTLQVPGQVAIQQISPGGQQQKQGQSVTSSSNRPRKTSSLSLFFRKVYHLAAVRLRDLCAKLDISDELRKKIWTCFEFSIIQCPELMMDRHLDQLLMCAIYVMAKVTKEDKSFQNIMRCYRTQPQARSQVYRSVLIKGKRKRRNSGSSDSRSHQNSPTELNKDRTSRDSSPVMRSSSTLPVPQPSSAPPTPTRLTGANSDMEEEERGDLIQFYNNIYIKQIKTFAMKYSQANMDAPPLSPYPFVRTGSPRRIQLSQNHPVYISPHKNETMLSPREKIFYYFSNSPSKRLREINSMIRTGETPTKKRGILLEDGSESPAKRICPENHSALLRRLQDVANDRGSH

SEQ ID NO: 20373 - protein, 21 aa, Artificial Sequence
  Synthetic polypeptide
TSERTNSGHTIFKNWEMIFIG

SEQ ID NO: 20374 - protein, 36 aa, Artificial Sequence
  Synthetic polypeptide
LLKSVSPRTHQKEETLDTSEHLKEQTQDTPSLRTGK

SEQ ID NO: 20375 - protein, 635 aa, Artificial Sequence
  Synthetic polypeptide
ELGNDLHWLACALYVACRKSVPTVSKGTVEGNYVSLTRILKCSEQSLIEFFNKMKKWEDMANLPPHFRERTERLERNFTVSAVIFKKYEPIFQDIFKYPQEEQPRQQRGRKQRRQPCTVSEIFHFCWVLFIYAKGNFPMISDDLVNSYHLLLCALDLVYGNALQCSNRKELVNPNFKGLSEDFHAKDSKPSSDPPCIIEKLCSLHDGLVLEAKGIKEHFWKPYIRKLYEKKLLKGKEENLTGFLEPGNFGESFKAINKAYEEYVLSVGNLDERIFLGEDAEEEIGTLSRCLNAGSGTETAERVQMKNILQQHFDKSKALRISTPLTGVRYIKENSPCVTPVSTATHSLSRLHTMLTGLRNAPSEKLEQILRTCSRDPTQAIANRLKEMFEIYSQHFQPDEDFSNCAKEIASKHFRFAEMLYYKVLESVIEQEQKRLGDMDLSGILEQDAFHRSLLACCLEVVTFSYKPPGNFPFITEIFDVPLYHFYKVIEVFIRAEDGLCREVVKHLNQIEEQILDHLAWKPESPLWEKIRDNENRVPTCEEVMPPQNLERADEICIAGSPLTPRRVTEVRADTGGLGRSITSPTTLYDRYSSPPASTTRRRLFVENDSPSDGGTPGRMPPQPLVNAVPVQNVS

SEQ ID NO: 20376 - protein, 42 aa, Artificial Sequence
  Synthetic polypeptide
HSKTLSLKLKRTCQLLTVMTVLFQVLSPRISNSHQKKFGLRS

SEQ ID NO: 20377 - protein, 202 aa, Artificial Sequence
  Synthetic polypeptide
QDPVSKIEEDMSASDSDDCIIPGPISKNIKQPSEKIRIEIIALSLNDSQVTMDDTIQRLFVECRFYSLPAEETPVSLPKPKSGQWVYYNYSNVIYVDKENNKAKRDILKAILQKQEMPNRSLRFTVVSDPPEDEQDLECEDIGVAHVDLADMFQEGRDLIEQNIDVFDARADGEGIGKLRVTVEALHALQSVYKQYRDDLEA

SEQ ID NO: 20378 - protein, 67 aa, Artificial Sequence
  Synthetic polypeptide
HSKTLSLKLKRTCQLLTVMTVLFQVLSPRISNRVSHCLPGWGAVARSQLTATSASRVPAIFLPQPPK

SEQ ID NO: 20379 - protein, 248 aa, Artificial Sequence
  Synthetic polypeptide
QDPVSKIEEDMSASDSDDCIIPGPISKNIKQSLALSPGLGCSSAISAHCNFRLPGSSDFPASASQVDGITGACHHTQPSEKIRIEIIALSLNDSQVTMDDTIQRLFVECRFYSLPAEETPVSLPKPKSGQWVYYNYSNVIYVDKENNKAKRDILKAILQKQEMPNRSLRFTVVSDPPEDEQDLECEDIGVAHVDLADMFQEGRDLIEQNIDVFDARADGEGIGKLRVTVEALHALQSVYKQYRDDLEA

SEQ ID NO: 20380 - protein, 186 aa, Artificial Sequence
  Synthetic polypeptide
QDPVSKIEEDMSASDSDDCIIPGPISKNIKQPSEKIRIEIIALSLNDSQVTMDDTIQRLFVECRFYSLPAEETPVSLPKPKSGQWVYYNYSNVIYVDKENNKAKRDILKAILQKQEMPNRSLRFTVVSDPPEDEQDLECEDIGVAHVDLADMFQEGRDLIEQNIDGMGESVAQFVQPTIAELQTLY

SEQ ID NO: 20381 - protein, 8 aa, Artificial Sequence
  Synthetic polypeptide
IKLSHEIN

SEQ ID NO: 20382 - protein, 491 aa, Artificial Sequence
  Synthetic polypeptide
NKLRLLEELEDTWLPYLTPKDDEFYQQWQLKYPKLILREASSVSEELHKEVQEAFLTLHKHGCLFRDLVRIQGKDLLTPVSRILIGNPGCTYKYLNTRLFTVPWPVKGSNIKHTEAEIAAACETFLKLNDYLQIETIQALEELAAKEKANEDAVPLCMSADFPRVGMGSSYNGQDEVDIKSRAAYNVTLLNFMDPQKMPYLKEEPYFGMGKMAVSWHHDENLVDRSAVAVYSYSCEGPEEESEDDSHLEGRDPDIWHVGFKISWDIETPGLAIPLHQGDCYFMLDDLNATHQHCVLAGSQPRFSSTHRVAECSTGTLDYILQRCQLALQNVCDDVDNDDVSLKSFEPAVLKQGEEIHNEVEFEWLRQFWFQGNRYRKCTDWWCQPMAQLEALWKKMEGVTNAVLHEVKREGLPVEQRNEILTAILASLTARQNLRREWHARCQSRIARTLPADQKPECRPYWEKDDASMPLPFDLTDIVSELRGQLLEAKP

SEQ ID NO: 20383 - protein, 56 aa, Artificial Sequence
  Synthetic polypeptide
NKLRLLEELEDTWLPYLTPKDDEFYQQALKRKVRMTLISKAGILIFGMLVLRSHGT

SEQ ID NO: 20384 - protein, 204 aa, Artificial Sequence
  Synthetic polypeptide
DVTCSSLPSAMVVRPPQPCGTAHQIQEMFPQVPYHLVLQDLQLTRSVEITTDNILEGRIQVPFPTQRSDSIRPALNSPVERPSSDQEEGETSAQTERVPLDLSPRLEETLDFGEVEVEPSEVEDFEARGSRFSKSADERQRMLVQRKDELLQQARKRFLNKSSEDDAASESFLPSEGASSDPVTLRRRMLAAAAERRLQKQQTS

SEQ ID NO: 20385 - protein, 29 aa, Artificial Sequence
  Synthetic polypeptide
GLLSHVELLIRFKRCFPRFHTIWYCRTSS

SEQ ID NO: 20386 - protein, 65 aa, Artificial Sequence
  Synthetic polypeptide
KEEFTCTSSLSLPATIHVRCDLLLLAFCHGREASSAMWNCSSDSRDVSPGSIPSGTAGPPADTLS

SEQ ID NO: 20387 - protein, 102 aa, Artificial Sequence
  Synthetic polypeptide
DVTCSSLPSAMVVRPPQPCGTAHQIQEMFPQVPYHLVLQDLQLTRSVEITTDNILEGRIQVPFPTQRSDSIRPALNSPVERPSSDQEEGETSAQTERVPLDL

SEQ ID NO: 20388 - protein, 11 aa, Artificial Sequence
  Synthetic polypeptide
FSKCGPLASWF

SEQ ID NO: 20389 - protein, 23 aa, Artificial Sequence
  Synthetic polypeptide
SQNVDLWHPGSSKYRLLCFDVGG

SEQ ID NO: 20390 - protein, 567 aa, Artificial Sequence
  Synthetic polypeptide
LKMWTSGILVLVNTACCVLMLVAKLIQCIVFGPLRVSERQHLKDKFWNFIFYKFIFIFGVLNVQTVEEVVMWCLWFAGLVFLHLMVQLCKDRFEYLSFSPTTPMSSHGRVLSLLVAMLLSCCGLAAVCSITGYTHGMHTLAFMAAESLLVTVRTAHVILRYVIHLWDLNHEGTWEGKGTYVYYTDFVMELTLLSLDLMHHIHMLLFGNIWLSMASLVIFMQLRYLFHEVQRRIRRHKNYLRVVGNMEARFAVATPEELAVNNDDCAICWDSMQAARKLPCGHLFHNSCLRSWLEQDTSCPTCRMSLNIADNNRVREEHQGENLDENLVPVAAAEGRPRLNQHNHFFHFDGSRIASWLPSFSVEVMHTTNILGITQASNSQLNAMAHQIQEMFPQVPYHLVLQDLQLTRSVEITTDNILEGRIQVPFPTQRSDSIRPALNSPVERPSSDQEEGETSAQTERVPLDLSPRLEETLDFGEVEVEPSEVEDFEARGSRFSKSADERQRMLVQRKDELLQQARKRFLNKSSEDDAASESFLPSEGASSDPVTLRRRMLAAAAERRLQKQQTS

SEQ ID NO: 20391 - protein, 15 aa, Artificial Sequence
  Synthetic polypeptide
ELSALCPVPLLSVSV

SEQ ID NO: 20392 - protein, 479 aa, Artificial Sequence
  Synthetic polypeptide
PKFPFSYHPIAVLLLTAEFYSYKSCLHCVQFLSCQSLSDDLKKRREPHISTLRKILFEDFRSWLSDISKIDLESTIDMSCAKYEFTDALLCHDDELEGRRIAFILYLVPPWDRSMGGTLDLYSIDEHFQPKQIVKSLIPSWNKLVFFEVSPVSFHQVSEVLSEEKSRLSISGWFHGPSLTRPPNYFEPPIPRSPHIPQDHEILYDWINPTYLDMDYQVQIQEEFEESSEILLKEFLKPEKFTKVCEALEHGHVEWSSRGPPNKRFYEKAEESKLPEILKECMKLFRSEALFLLLSNFTGLKLHFLAPSEEDEMNDKKEAETTDITEEGTSHSPPEPENNQMAISNNSQQSNEQTDPEPEENETKKESSVPMCQGELRHWKTGHYTLIHDHSKAEFALDLILYCGCEGWEPEYGGFTSYIAKGEDEELLTVNPESNSLALVYRDRETLKFVKHINHRSLEQKKTFPNRTGFWDFSFIYYE

SEQ ID NO: 20393 - protein, 25 aa, Artificial Sequence
  Synthetic polypeptide
QQNFILIRVVCTVSSSSPVSLCLMI

SEQ ID NO: 20394 - protein, 103 aa, Artificial Sequence
  Synthetic polypeptide
PKFPFSYHPIAVLLLTAEFYSYKSCLHCVQFLSCQSLSDDLKKRREPHISTLRKILFEDFRSWLSDISKIDLESTIDMSCAKYEFTDALLCHDDELEGRRIAF

SEQ ID NO: 20395 - protein, 167 aa, Artificial Sequence
  Synthetic polypeptide
PKFPFSYHPIAVLLLTAEFYSYKSCLHCVQFLSCQSLSDDLKKRREPHISTLRKILFEDFRSWLSDISKIDLESTIDMSCAKYEFTDALLCHDDELEGRRIAFILYLVPPWDRSMGGTLDLYSIDEHFQPKQIVKSLIPSWNKLVFFEVSPVSFHQVSEVLSEEKSR

SEQ ID NO: 20396 - protein, 41 aa, Artificial Sequence
  Synthetic polypeptide
PKFPFSYHPIAVLLLTAEFYSYKSCLHCVQFLSCQSLSDDL

SEQ ID NO: 20397 - protein, 436 aa, Artificial Sequence
  Synthetic polypeptide
PKFPFSYHPIAVLLLTAEFYSYKSCLHCVQFLSCQSLSDDLKKRREPHISTLRKILFEDFRSWLSDISKIDLESTIDMSCAKYEFTDALLCHDDELEGRRIAFILYLVPPWDRSMGGTLDLYSIDEHFQPKQIVKSLIPSWNKLVFFEVSPVSFHQHEILYDWINPTYLDMDYQVQIQEEFEESSEILLKEFLKPEKFTKVCEALEHGHVEWSSRGPPNKRFYEKAEESKLPEILKECMKLFRSEALFLLLSNFTGLKLHFLAPSEEDEMNDKKEAETTDITEEGTSHSPPEPENNQMAISNNSQQSNEQTDPEPEENETKKESSVPMCQGELRHWKTGHYTLIHDHSKAEFALDLILYCGCEGWEPEYGGFTSYIAKGEDEELLTVNPESNSLALVYRDRETLKFVKHINHRSLEQKKTFPNRTGFWDFSFIYYE

SEQ ID NO: 20398 - protein, 44 aa, Artificial Sequence
  Synthetic polypeptide
SQHFGRLRRTDHLRSGVRDQPGQHDQAQPLRSASCHHEHLVHTV

SEQ ID NO: 20399 - protein, 90 aa, Artificial Sequence
  Synthetic polypeptide
GQEFETSLANMIRHNLSEVLLATMNILFTQFKRLKGTSPSSSSRPQRVIEDRDSQLRSQARTLITFAGMIPYRTSGDTNARLVQMEVLMN

SEQ ID NO: 20400 - protein, 151 aa, Artificial Sequence
  Synthetic polypeptide
GQEFETSLANMIRHNLSEVLLATMNILFTQFKRLKGTSPSSSSRPQRVIEDRDSGLALLPRLECNDTISAHCNLYLLGSSHPPTSPSQVAGTTATPKSSPHSDYLCWNDTIPNVWGHQCEAGADGGPHELSAMLCGSLGRHTVSTSGTWAH

SEQ ID NO: 20401 - protein, 834 aa, Artificial Sequence
  Synthetic polypeptide
GLAQWLKPVIPALWEAKTGGGGSPEPRSLRPAWTTCFESQHILLRGDKTSRDMWATGSLPDFPAAAKFLGFRQRCIPRSLCLSECPLEPPSLTRLCATLKDCPGPLELQLSCEFLSDQSLETLLDCLPQLPQLSLLQLSQTGLSPKSPFLLANTLSLCPRVKKVDLRSLHHATLHFRSNEEEEGVCCGRFTGCSLSQEHVESLCWLLSKCKDLSQVDLSANLLGDSGLRCLLECLPQVPISGLLDLSHNSISQESALYLLETLPSCPRVREASVNLGSEQSFRIHFSREDQAGKTLRLSECSFRPEHVSRLATGLSKSLQLTELTLTQCCLGQKQLAILLSLVGRPAGLFSLRVQEPWADRARVLSLLEVCAQASGSVTEISISETQQQLCVQLEFPRQEENPEAVALRLAHCDLGAHHSLLVGQLMETCARLQQLSLSQVNLCEDDDASSLLLQSLLLSLSELKTFRLTSSCVSTEGLAHLASGLGHCHHLEELDLSNNQFDEEGTKALMRALEGKWMLKRLDLSHLLLNSSTLALLTHRLSQMTCLQSLRLNRNSIGDVGCCHLSEALRAATSLEELDLSHNQIGDAGVQHLATILPGLPELRKIDLSGNSISSAGGVQLAESLVLCRRLEELMLGCNALGDPTALGLAQELPQHLRVLHLPFSHLGPGGALSLAQALDGSPHLEEISLAENNLAGGVLRFCMELPLLRQIDLVSCKIDNQTAKLLTSSFTSCPALEVILLSWNLLGDEAAAELAQVLPQMGRLKRVDLEKNQITALGAWLLAEGLAQGSSIQVIRLWNNPIPCDMAQHLKSQEPRLDFAFFDNQPQAPWGT

SEQ ID NO: 20402 - protein, 14 aa, Artificial Sequence
  Synthetic polypeptide
DQPGQHALKANTSS

SEQ ID NO: 20403 - protein, 10 aa, Artificial Sequence
  Synthetic polypeptide
EFETSLDNML

SEQ ID NO: 20404 - protein, 805 aa, Artificial Sequence
  Synthetic polypeptide
GLAQWLKPVIPALWEAKTGGGGSPEPRSLRPAWTTCFESQHILLRGDKTSRDMWATGSLPDFPAAAKFLGFRQRCIPRSLCLSECPLEPPSLTRLCATLKDCPGPLELQLSCEFLSDQSLETLLDCLPQLPQLSLLQLSQTGLSPKSPFLLANTLSLCPRVKKVDLRSLHHATLHFRSNEEEEGVCCGLSANLLGDSGLRCLLECLPQVPISGLLDLSHNSISQESALYLLETLPSCPRVREASVNLGSEQSFRIHFSREDQAGKTLRLSECSFRPEHVSRLATGLSKSLQLTELTLTQCCLGQKQLAILLSLVGRPAGLFSLRVQEPWADRARVLSLLEVCAQASGSVTEISISETQQQLCVQLEFPRQEENPEAVALRLAHCDLGAHHSLLVGQLMETCARLQQLSLSQVNLCEDDDASSLLLQSLLLSLSELKTFRLTSSCVSTEGLAHLASGLGHCHHLEELDLSNNQFDEEGTKALMRALEGKWMLKRLDLSHLLLNSSTLALLTHRLSQMTCLQSLRLNRNSIGDVGCCHLSEALRAATSLEELDLSHNQIGDAGVQHLATILPGLPELRKIDLSGNSISSAGGVQLAESLVLCRRLEELMLGCNALGDPTALGLAQELPQHLRVLHLPFSHLGPGGALSLAQALDGSPHLEEISLAENNLAGGVLRFCMELPLLRQIDLVSCKIDNQTAKLLTSSFTSCPALEVILLSWNLLGDEAAAELAQVLPQMGRLKRVDLEKNQITALGAWLLAEGLAQGSSIQVIRLWNNPIPCDMAQHLKSQEPRLDFAFFDNQPQAPWGT

SEQ ID NO: 20405 - protein, 519 aa, Artificial Sequence
  Synthetic polypeptide
GLAQWLKPVIPALWEAKTGGGGSPEPRSLRPAWTTCFESQHILLRGDKTSRDMWATGSLPDFPAAAKFLGFRQRCIPRSLCLSECPLEPPSLTRLCATLKDCPGPLELQLSCEFLSDQSLETLLDCLPQLPQLSLLQLSQTGLSPKSPFLLANTLSLCPRVKKVDLRSLHHATLHFRSNEEEEGVCCGRFTGCSLSQEHVESLCWLLSKCKDLSQVDLSANLLGDSGLRCLLECLPQVPISGLLDLSHNSISQESALYLLETLPSCPRVREASVNLGSEQSFRIHFSREDQAGKTLRLSECSFRPEHVSRLATGLSKSLQLTELTLTQCCLGQKQLAILLSLVGRPAGLFSLRVQEPWADRARVLSLLEVCAQASGSVTEISISETQQQLCVQLEFPRQEENPEAVALRLAHCDLGAHHSLLVGQLMETCARLQQLSLSQVNLCEDDDASSLLLQSLLLSLSELKTFRIQSSQDPGRLLPDLLPFDPHQADLQLCEHRGPRPPGIWSGPLPPLGGAGLV

SEQ ID NO: 20406 - protein, 395 aa, Artificial Sequence
  Synthetic polypeptide
GLAQWLKPVIPALWEAKTGGGGSPEPRSLRPAWTTCFESQHILLRGDKTSRDMWATGSLPDFPAAAKFLGFRQRCIPRSLCLSECPLEPPSLTRLCATLKDCPGPLELQLSCEFLSDQSLETLLDCLPQLPQLSLLQLSQTGLSPKSPFLLANTLSLCPRVKKVDLRSLHHATLHFRSNEEEEGVCCGFTGCSLSQEHVESLCWLLSKCKDLSQVDLSANLLGDSGLRCLLECLPQVPISGLLDLSHNSISQESALYLLETLPSCPRVREASVNLGSEQSFRIHFSREDQAGKTLRLSECSFRPEHVSRLATGLSKSLQLTELTLTQCCLGQKQLAILLSLVGRPAGLFSLRDSTRHTEKLSFPTLEACALGFKKKRKKERKKVSEDTELRTKIN

SEQ ID NO: 20407 - protein, 297 aa, Artificial Sequence
  Synthetic polypeptide
GLAQWLKPVIPALWEAKTGGGGSPEPRSLRPAWTTCFESQHILLRGDKTSRDMWATGSLPDFPAAAKFLGFRQRCIPRSLCLSECPLEPPSLTRLCATLKDCPGPLELQLSCEFLSDQSLETLLDCLPQLPQLSLLQLSQTGLSPKSPFLLANTLSLCPRVKKVDLRSLHHATLHFRSNEEEEGVCCGRFTGCSLSQEHVESLCWLLSKCKDLSQVDLSANLLGDSGLRCLLECLPQVPISGLLDLSHNSISQESALYLLETLPSCPRVREASVKCLGSWHVWAPCFPRPFSLQPGL

SEQ ID NO: 20408 - protein, 346 aa, Artificial Sequence
  Synthetic polypeptide
GLAQWLKPVIPALWEAKTGGGGSPEPRSLRPAWTTCFESQHILLRGDKTSSLSECPLEPPSLTRLCATLKDCPGPLELQLSCEFLSDQSLETLLDCLPQLPQLSLLQLSQTGLSPKSPFLLANTLSLCPRVKKVDLRSLHHATLHFRSNEEEEGVCCGFTGCSLSQEHVESLCWLLSKCKDLSQVDLSANLLGDSGLRCLLECLPQVPISGLLDLSHNSISQESALYLLETLPSCPRVREASVNLGSEQSFRIHFSREDQAGKTLRLSECSFRPEHVSRLATGLSKSLQLTELTLTQCCLGQKQLAILLSLVGRPAGLFSLRDSTRHTEKLSFPTLEACALGFKKK

SEQ ID NO: 20409 - protein, 300 aa, Artificial Sequence
  Synthetic polypeptide
GLAQWLKPVIPALWEAKTGGGGSPEPRSLRPAWTTCFESQHILLRGDKTSSLSECPLEPPSLTRLCATLKDCPGPLELQLSCEFLSDQSLETLLDCLPQLPQLSLLQLSQTGLSPKSPFLLANTLSLCPRVKKVDLRSLHHATLHFRSNEEEEGVCCGRFTGCSLSQEHVESLCWLLSKCKDLSQVDLGSEQSFRIHFSREDQAGKTLRLSECSFRPEHVSRLATGLSKSLQLTELTLTQCCLGQKQLAILLSLVGRPAGLFSLRDSTRHTEKLSFPTLEACALGFKKKRKKERKKVSED

SEQ ID NO: 20410 - protein, 324 aa, Artificial Sequence
  Synthetic polypeptide
GLAQWLKPVIPALWEAKTGGGGSPEPRSLRPAWTTCFESQHILLRGDKTSRDMWATGSLPDFPAAAKFLGFRQRCIPRSLCLSECPLEPPSLTRLCATLKDCPGPLELQLSCEFLSDQSLETLLDCLPQLPQLSLLQLSQTGLSPKSPFLLANTLSLCPRVKKVDLRSLHHATLHFRSNEEEEGVCCGLSANLLGDSGLRCLLECLPQVPISGLLDLSHNSISQESALYLLETLPSCPRVREASVNLGSEQSFRIHFSREDQAGKTLRLSECSFRPEHVSRLATGLSKSLQLTELTLTQCCLGQKQLAILLSLVGRPAGLFSLS

SEQ ID NO: 20411 - protein, 352 aa, Artificial Sequence
  Synthetic polypeptide
GLAQWLKPVIPALWEAKTGGGGSPEPRSLRPAWTTCFESQHILLRGDKTSRDMWATGSLPDFPAAAKFLGFRQRCIPRSLCLSECPLEPPSLTRLCATLKDCPGPLELQLSCEFLSDQSLETLLDCLPQLPQLSLLQLSQTGLSPKSPFLLANTLSLCPRVKKVDLRSLHHATLHFRSNEEEEGVCCGFTGCSLSQEHVESLCWLLSKCKDLSQVDLSANLLGDSGLRCLLECLPQVPISGLLDLSHNSISQESALYLLETLPSCPRVREASVNLGSEQSFRIHFSREDQAGKTLRLSECSFRPEHVSRLATGLSKSLQLTELTLTQCCLGQKQLAILLSLVGRPAGLFSLS

SEQ ID NO: 20412 - protein, 26 aa, Artificial Sequence
  Synthetic polypeptide
AAGCPGISSGMRQLPSWPRCCRRWAG

SEQ ID NO: 20413 - protein, 64 aa, Artificial Sequence
  Synthetic polypeptide
AGWEKEKSGGVGGVGSSLLCGLELLPSSLASPPICKWGRSSLLRHPLKDILTLELQAVLESPRG

SEQ ID NO: 20414 - protein, 97 aa, Artificial Sequence
  Synthetic polypeptide
HLSCRLSWNLLGDEAAAELAQVLPQMGRLKRVDLEKNQITALGAWLLAEGLAQGSSIQVIRLWNNPIPCDMAQHLKSQEPRLDFAFFDNQPQAPWGT

SEQ ID NO: 20415 - protein, 8 aa, Artificial Sequence
  Synthetic polypeptide
GLPSHVEL

SEQ ID NO: 20416 - protein, 59 aa, Artificial Sequence
  Synthetic polypeptide
VLMRSDGLKVAVCPSCAHYLSPAAIEDMLCVSSSFCQDCKFPEASPAMWNCRTPEGEAH

SEQ ID NO: 20417 - protein, 753 aa, Artificial Sequence
  Synthetic polypeptide
KTCFVSPPPSARIVSFLRPPQPCGTVEHLKEKLISQAQEVSRLRSELGGTDLEKHRDLLMVENERLRQEMRRCEAELQELRTKPAGPCPGCEHSQESAQLRDKLSQLQLEMAESKGMLSELNLEVQQKTDRLAEVELRLKDCLAEKAQEEERLSRRLRDSHETIASLRAQSPPVKYVIKTVEVESSKTKQALSESQARNQHLQEQVAMQRQVLKEMEQQLQSSHQLTARLRAQIAMYESELERAHGQMLEEMQSLEEDKNRAIEEAFARAQVEMKAVHENLAGVRTNLLTLQPALRTLTNDYNGLKRQVRGFPLLLQEALRSVKAEIGQAIEEVNSNNQELLRKYRRELQLRKKCHNELVRLKGNIRVIARVRPVTKEDGEGPEATNAVTFDADDDSIIHLLHKGKPVSFELDKVFSPQASQQDVFQEVQALVTSCIDGFNVCIFAYGQTGAGKTYTMEGTAENPGINQRALQLLFSEVQEKASDWEYTITVSAAEIYNEVLRDLLGKEPQEKLEIRLCPDGSGQLYVPGLTEFQVQSVDDINKVFEFGHTNRTTEFTNLNEHSSRSHALLIVTVRGVDCSTGLRTTGKLNLVDLAGSERVGKSGAEGSRLREAQHINKSLSALGDVIAALRSRQGHVPFRNSKLTYLLQDSLSGDSKTLMVVQVSPVEKNTSETLYSLKFAERVRSVELGPGLRRAELGSWSSQEHLEWEPACQTPQPSARAHSAPSSGTSSRPGSIRRKLQPSGKSRPLPV

SEQ ID NO: 20418 - protein, 746 aa, Artificial Sequence
  Synthetic polypeptide
KTCFVSPPPSARIVSFLRPPQPCGTVEHLKEKLISQAQEVSRLRSELGGTDLEKHRDLLMVENERLRQEMRRCEAELQELRTKPAGPCPGCEHSQESAQLRDKLSQLQLEMAESKGMLSELNLEVQQKTDRLAEVELRLKDCLAEKAQEEERLSRRLRDSHETIASLRAQSPPVKYVIKTVEVESSKTKQALSESQARNQHLQEQVAMQRQVLKEMEQQLQSSHQLTARLRAQIAMYESELERAHGQMLEEMQSLEEDKNRAIEEAFARAQVEMKAVHENLAGVRTNLLTLQPALRTLTNDYNGLKRQVRGFPLLLQEALRSVKAEIGQAIEEVNSNNQELLRKYRRELQLRKKCHNELVRLKGNIRVIARVRPVTKEDGEGPEATNAVTFDADDDSIIHLLHKGKPVSFELDKVFSPQASQQDVFQEVQALVTSCIDGFNVCIFAYGQTGAGKTYTMEGTAENPGINQRALQLLFSEVQEKASDWEYTITVSAAEIYNEVLRDLLGKEPQEKLEIRLCPDGSGQLYVPGLTEFQVQSVDDINKVFEFGHTNRTTEFTNLNEHSSRSHALLIVTVRGVDCSTGLRTTGKLNLVDLAGSERVGKSGAEGSRLREAQHINKSLSALGDVIAALRSRQGHVPFRNSKLTYLLQDSLSGDSKTLMVVQVSPVEKNTSETLYSLKFAERVRSVELGPGLRRAELGSWSSQEHLEWEPACQTPQPSARAHSAPSSGTSSRPGSIRRKLQPSA

SEQ ID NO: 20419 - protein, 145 aa, Artificial Sequence
  Synthetic polypeptide
KTCFVSPPPSARIVSFLRPPQPCGTVEHLKEKLISQAQEVSRLRSELGGTDLEKHRDLLMVENERLRQEMRRCEAELQELRTKPAGPCPGCEHSQESAQLRDKLSQLQLEMAESKGMLSELNLEVQQKTDRLAEVELRLKDCLAE

SEQ ID NO: 20420 - protein, 126 aa, Artificial Sequence
  Synthetic polypeptide
KTCFVSPPPSARIVSFLRPPQPCGTVEHLKEKLISQAQEVSRLRSELHRDLLMVENERLRQEMRRCEAELQELRTKPAGPCPGCEHSQESAQLRDKLSQLQLEMAESKGMLSELNLEVQQKTDRLA

SEQ ID NO: 20421 - protein, 82 aa, Artificial Sequence
  Synthetic polypeptide
KTCFVSPPPSARIVSFLRPPQPCGTVEHLKEKLISQAQEVSRLRSELGGTDLEKHRDLLMVENERLRQEMRRCEAELQELRT

SEQ ID NO: 20422 - protein, 66 aa, Artificial Sequence
  Synthetic polypeptide
KTCFVSPPPSARIVSFLRPPQPCGTVEHLKEKLISQAQEVSRLRSELGGTDLEKHRDLLMVENERL

SEQ ID NO: 20423 - protein, 52 aa, Artificial Sequence
  Synthetic polypeptide
KTCFVSPPPSARIVSFLRPPQPCGTVEHLKEKLISQAQEVSRLRSELGGTDL

SEQ ID NO: 20424 - protein, 24 aa, Artificial Sequence
  Synthetic polypeptide
EDRLSPGVHDQPGQYSRTPEGEAH

SEQ ID NO: 20425 - protein, 739 aa, Artificial Sequence
  Synthetic polypeptide
AQEFTTSLDNIVEHLKEKLISQAQEVSRLRSELGGTDLEKHRDLLMVENERLRQEMRRCEAELQELRTKPAGPCPGCEHSQESAQLRDKLSQLQLEMAESKGMLSELNLEVQQKTDRLAEVELRLKDCLAEKAQEEERLSRRLRDSHETIASLRAQSPPVKYVIKTVEVESSKTKQALSESQARNQHLQEQVAMQRQVLKEMEQQLQSSHQLTARLRAQIAMYESELERAHGQMLEEMQSLEEDKNRAIEEAFARAQVEMKAVHENLAGVRTNLLTLQPALRTLTNDYNGLKRQVRGFPLLLQEALRSVKAEIGQAIEEVNSNNQELLRKYRRELQLRKKCHNELVRLKGNIRVIARVRPVTKEDGEGPEATNAVTFDADDDSIIHLLHKGKPVSFELDKVFSPQASQQDVFQEVQALVTSCIDGFNVCIFAYGQTGAGKTYTMEGTAENPGINQRALQLLFSEVQEKASDWEYTITVSAAEIYNEVLRDLLGKEPQEKLEIRLCPDGSGQLYVPGLTEFQVQSVDDINKVFEFGHTNRTTEFTNLNEHSSRSHALLIVTVRGVDCSTGLRTTGKLNLVDLAGSERVGKSGAEGSRLREAQHINKSLSALGDVIAALRSRQGHVPFRNSKLTYLLQDSLSGDSKTLMVVQVSPVEKNTSETLYSLKFAERVRSVELGPGLRRAELGSWSSQEHLEWEPACQTPQPSARAHSAPSSGTSSRPGSIRRKLQPSGKSRPLPV

SEQ ID NO: 20426 - protein, 732 aa, Artificial Sequence
  Synthetic polypeptide
AQEFTTSLDNIVEHLKEKLISQAQEVSRLRSELGGTDLEKHRDLLMVENERLRQEMRRCEAELQELRTKPAGPCPGCEHSQESAQLRDKLSQLQLEMAESKGMLSELNLEVQQKTDRLAEVELRLKDCLAEKAQEEERLSRRLRDSHETIASLRAQSPPVKYVIKTVEVESSKTKQALSESQARNQHLQEQVAMQRQVLKEMEQQLQSSHQLTARLRAQIAMYESELERAHGQMLEEMQSLEEDKNRAIEEAFARAQVEMKAVHENLAGVRTNLLTLQPALRTLTNDYNGLKRQVRGFPLLLQEALRSVKAEIGQAIEEVNSNNQELLRKYRRELQLRKKCHNELVRLKGNIRVIARVRPVTKEDGEGPEATNAVTFDADDDSIIHLLHKGKPVSFELDKVFSPQASQQDVFQEVQALVTSCIDGFNVCIFAYGQTGAGKTYTMEGTAENPGINQRALQLLFSEVQEKASDWEYTITVSAAEIYNEVLRDLLGKEPQEKLEIRLCPDGSGQLYVPGLTEFQVQSVDDINKVFEFGHTNRTTEFTNLNEHSSRSHALLIVTVRGVDCSTGLRTTGKLNLVDLAGSERVGKSGAEGSRLREAQHINKSLSALGDVIAALRSRQGHVPFRNSKLTYLLQDSLSGDSKTLMVVQVSPVEKNTSETLYSLKFAERVRSVELGPGLRRAELGSWSSQEHLEWEPACQTPQPSARAHSAPSSGTSSRPGSIRRKLQPSA

SEQ ID NO: 20427 - protein, 131 aa, Artificial Sequence
  Synthetic polypeptide
AQEFTTSLDNIVEHLKEKLISQAQEVSRLRSELGGTDLEKHRDLLMVENERLRQEMRRCEAELQELRTKPAGPCPGCEHSQESAQLRDKLSQLQLEMAESKGMLSELNLEVQQKTDRLAEVELRLKDCLAE

SEQ ID NO: 20428 - protein, 112 aa, Artificial Sequence
  Synthetic polypeptide
AQEFTTSLDNIVEHLKEKLISQAQEVSRLRSELHRDLLMVENERLRQEMRRCEAELQELRTKPAGPCPGCEHSQESAQLRDKLSQLQLEMAESKGMLSELNLEVQQKTDRLA

SEQ ID NO: 20429 - protein, 68 aa, Artificial Sequence
  Synthetic polypeptide
AQEFTTSLDNIVEHLKEKLISQAQEVSRLRSELGGTDLEKHRDLLMVENERLRQEMRRCEAELQELRT

SEQ ID NO: 20430 - protein, 52 aa, Artificial Sequence
  Synthetic polypeptide
AQEFTTSLDNIVEHLKEKLISQAQEVSRLRSELGGTDLEKHRDLLMVENERL

SEQ ID NO: 20431 - protein, 38 aa, Artificial Sequence
  Synthetic polypeptide
AQEFTTSLDNIVEHLKEKLISQAQEVSRLRSELGGTDL

SEQ ID NO: 20432 - protein, 147 aa, Artificial Sequence
  Synthetic polypeptide
HTYTYFYKGTKYWKFDNERLRMEPGYPKSILRDFMGCQEHVEPGPRWPDVARPPFNPHGGAEPGADSAEGDVGDGDGDFGAGVNKDGGSRVVVQMEEVARTVNVVMVLVPLLLLLCVLGLTYALVQMQRKGAPRVLLYCKRSLQEWV

SEQ ID NO: 20433 - protein, 111 aa, Artificial Sequence
  Synthetic polypeptide
VQEFETSLNNIPTPTSTRAPNTGNSTMSACGWSPATPSPSCGTSWAARSTWSQAPDGPTWPGRPSTPTGVQSPGRTAQRATWGMGMGTLGPGSTRTGAAAWWCRWRRWHGR

SEQ ID NO: 20434 - protein, 18 aa, Artificial Sequence
  Synthetic polypeptide
ITYLHLLLQGHQILEIRQ

SEQ ID NO: 20435 - protein, 11 aa, Artificial Sequence
  Synthetic polypeptide
MDQLCKLCSQN

SEQ ID NO: 20436 - protein, 346 aa, Artificial Sequence
  Synthetic polypeptide
WTSYVNSALKTETEMFEKYYAKLEPRDQRPPRLSEIKISAADYAQFRGRRRSKSRTGMDRGVGLTADQKLELVQKEVADMKDDLRHTRANAERDLQHHEAIIEEAEIRWSEVSREVHEFEKDILKAISKKKGSILATQKVMKYIEDMNRRRDNMKEKLRLKNVSLKVQRKKMLLQLRQKEEVSEALHDVDFQQLKIENAQFLETIEARNQELTQLKLSSGNTLQVLNAYKSKLHKAMEIYLNLDKEILLRKELLEKIEKETLQVEEDRAKAEAVNKRLRKQLAEFRAPQVMTYVREKILNADLEKSIRMWERKVEIAEMSLKGHRKAWNRMKITNEQLQADYLAGK

SEQ ID NO: 20437 - protein, 4 aa, Artificial Sequence
  Synthetic polypeptide
GPAM

SEQ ID NO: 20438 - protein, 292 aa, Artificial Sequence
  Synthetic polypeptide
WTSYVNSALKTETEMFEKYYAKLEPRDQRPPRLSEIKISAADYAQAIIEEAEIRWSEVSREVHEFEKDILKAISKKKGSILATQKVMKYIEDMNRRRDNMKEKLRLKNVSLKVQRKKMLLQLRQKEEVSEALHDVDFQQLKIENAQFLETIEARNQELTQLKLSSGNTLQVLNAYKSKLHKAMEIYLNLDKEILLRKELLEKIEKETLQVEEDRAKAEAVNKRLRKQLAEFRAPQVMTYVREKILNADLEKSIRMWERKVEIAEMSLKGHRKAWNRMKITNEQLQADYLAGK

SEQ ID NO: 20439 - protein, 43 aa, Artificial Sequence
  Synthetic polypeptide
RPRPCPPTPAQAGPGDLVPARGQRRLLYHPPPGTSQGSPGLPQ

SEQ ID NO: 20440 - protein, 69 aa, Artificial Sequence
  Synthetic polypeptide
APAPAPPPLHRQVLVILSQLEGNAGFSITHRLAHRKAAQAFLSDWTASKGTHSPPLTPEVAGLHGPRPL

SEQ ID NO: 20441 - protein, 14 aa, Artificial Sequence
  Synthetic polypeptide
PPPLPPHPCTGRSW

SEQ ID NO: 20442 - protein, 35 aa, Artificial Sequence
  Synthetic polypeptide
RPRPCPPTPAQVPPPLPRCTHTQLVPPHPCTGRSW

SEQ ID NO: 20443 - protein, 63 aa, Artificial Sequence
  Synthetic polypeptide
APAPAPPPLHRCPLPYPAAPTPNSCPPTPAQAGPGDLVPARGQRRLLYHPPPGTSQGSPGLPQ

SEQ ID NO: 20444 - protein, 89 aa, Artificial Sequence
  Synthetic polypeptide
PPPLPPHPCTGAPSPTPLHPHPTRAPPPLHRQVLVILSQLEGNAGFSITHRLAHRKAAQAFLSDWTASKGTHSPPLTPEVAGLHGPRPL

SEQ ID NO: 20445 - protein, 256 aa, Artificial Sequence
  Synthetic polypeptide
KTTWPIARYNRTSYFYPTFSESSEHSHLLVSPVLVASAVIGVVIILSCITIIVGSIRRDRQARLQRHRHRHHRHHHHHHHHRRRRHREYEHGYVSDEHTYSRSSRRMRYACSSSEDWPPPLDISSDGDVDATVLRELYPDSPPGYEECVGPGATQLYVPTDAPPPYSLTDSCPTLDGTSDSGSGHSPGRHQQEQRTPAQGGLHTVSMDTLPPYEAVCGAGPPSGLLPLPGPDPGPRGSQGSPTPTRAPASGPERIV

SEQ ID NO: 20446 - protein, 149 aa, Artificial Sequence
  Synthetic polypeptide
ALPEVWIGVPLRDVNGMTHTHTQIKDYMANSTIQPHQLLLPHILRELGAQPSARVPRAGGECRHRCGHHPLLHHHHCGQHPQGQAGPASAAPPPPPPPPPPPSSPPPASTPRVRARLRVGRAHIQPLKPQDALCLQLLRGLAPTLGHQL

SEQ ID NO: 20447 - protein, 145 aa, Artificial Sequence
  Synthetic polypeptide
WLILVIPALWEAEGEGSLEARSSRPAWATNGKMPEVDYVVLSEWFDWILRNMDVSVDLIVYLRTNPETCYQRLKKRCREEEKVIPLEYLEAIHHLHEEWLIKGSLFPMAAPVLVIEADHHMERMLELFEQNRDRILTPENRKHCP

SEQ ID NO: 20448 - protein, 33 aa, Artificial Sequence
  Synthetic polypeptide
SQHFGRQKGKDHLKPGVRDQPGQQMGRCQKWTM

SEQ ID NO: 20449 - protein, 26 aa, Artificial Sequence
  Synthetic polypeptide
SQEFETSLGNKWEDARSGLCSSVGMV

SEQ ID NO: 20450 - protein, 162 aa, Artificial Sequence
  Synthetic polypeptide
WLILVIPALWEAEGEGSLEARSSRPAWATNGKMPEVDYVVLSEWFDWILRNMDVSVDLIVYLRTNPETCYQRLKKRCREEEKVIPLVGSALSTPDRLLVFPWQEYLEAIHHLHEEWLIKGSLFPMAAPVLVIEADHHMERMLELFEQNRDRILTPENRKHCP

SEQ ID NO: 20451 - protein, 107 aa, Artificial Sequence
  Synthetic polypeptide
WLILVIPALWEAEGEGSLEARSSRPAWATNGKMPEVDYVVLSEWFDWILRNMDVSVDLIVYLRTNPETCYQRLKKRCREEEKVIPLEYLEAIHHLHEEWLIKGSLFP

SEQ ID NO: 20452 - protein, 65 aa, Artificial Sequence
  Synthetic polypeptide
WLILVIPALWEAEGEGSLEARSSRPAWATNGKMPEVDYVVLSEWFDWILRNMDVSVDLIVYLRTN

SEQ ID NO: 20453 - protein, 42 aa, Artificial Sequence
  Synthetic polypeptide
NPISTKNTKKISQAWWRMPVISATREAEAGESLEPERQRLRH

SEQ ID NO: 20454 - protein, 139 aa, Artificial Sequence
  Synthetic polypeptide
GRRITGTGETEVEALTVTSMTFFIIAQAPEPYIVITGFEVTVILFFILLYVLRLDRLMKWLFWPLLDIINSLVTTVFMLIVSVLALIPETTTLTVGGGVFALVTAVCCLADGALIYRKLLFNPSGPYQKKPVHEKKEVL

SEQ ID NO: 20455 - protein, 107 aa, Artificial Sequence
  Synthetic polypeptide
GRRITGTGETEVEALTVTSMTFFIIAQAPEPYIVITGFEVTVILFFILLYVLRLDRLMKWLFWPLLVFALVTAVCCLADGALIYRKLLFNPSGPYQKKPVHEKKEVL

SEQ ID NO: 20456 - protein, 100 aa, Artificial Sequence
  Synthetic polypeptide
GRRITGTGETEVEALTVTSMTFFIIAQAPEPYIVITGFEVTVILFFILLYVLRLDRLMKWLFWPLLDIINSLVTTVFMLIVSVLALIPETTTLTVGGGLF

SEQ ID NO: 20457 - protein, 252 aa, Artificial Sequence
  Synthetic polypeptide
KDIIYYILSEGSEQEITELKTVCLILTNDKEQEKEKKSVICVEGNIASGKTTCLEFFSNATDVEVLTEPVSKWRNVRGHNPLGLMYHDASRWGLTLQTYVQLTMLDRHTRPQVSSVRLMERSIHSARYIFVENLYRSGKMPEVDYVVLSEWFDWILRNMDVSVDLIVYLRTNPETCYQRLKKRCREEEKVIPLEYLEAIHHLHEEWLIKGSLFPMAAPVLVIEADHHMERMLELFEQNRDRILTPENRKHCP

SEQ ID NO: 20458 - protein, 12 aa, Artificial Sequence
  Synthetic polypeptide
QMIKNRKKRKNQ

SEQ ID NO: 20459 - protein, 65 aa, Artificial Sequence
  Synthetic polypeptide
KDIIYYILSEGSEQEITELKTVCLILTNDKEQEKEKKSVRRRLAVLPRLASNSWAQVILWHQPPE

SEQ ID NO: 20460 - protein, 227 aa, Artificial Sequence
  Synthetic polypeptide
KDIIYYILSEGSEQEITELKTVCLILTNDKEQEKEKKSVVLTEPVSKWRNVRGHNPLGLMYHDASRWGLTLQTYVQLTMLDRHTRPQVSSVRLMERSIHSARYIFVENLYRSGKMPEVDYVVLSEWFDWILRNMDVSVDLIVYLRTNPETCYQRLKKRCREEEKVIPLEYLEAIHHLHEEWLIKGSLFPMAAPVLVIEADHHMERMLELFEQNRDRILTPENRKHCP

SEQ ID NO: 20461 - protein, 14 aa, Artificial Sequence
  Synthetic polypeptide
QMIKNRKKRKNQWC

SEQ ID NO: 20462 - protein, 269 aa, Artificial Sequence
  Synthetic polypeptide
KDIIYYILSEGSEQEITELKTVCLILTNDKEQEKEKKSVICVEGNIASGKTTCLEFFSNATDVEVLTEPVSKWRNVRGHNPLGLMYHDASRWGLTLQTYVQLTMLDRHTRPQVSSVRLMERSIHSARYIFVENLYRSGKMPEVDYVVLSEWFDWILRNMDVSVDLIVYLRTNPETCYQRLKKRCREEEKVIPLVGSALSTPDRLLVFPWQEYLEAIHHLHEEWLIKGSLFPMAAPVLVIEADHHMERMLELFEQNRDRILTPENRKHCP

SEQ ID NO: 20463 - protein, 164 aa, Artificial Sequence
  Synthetic polypeptide
KDIIYYILSEGSEQEITELKTVCLILTNDKEQEKEKKSVICVEGNIASGKTTCLEFFSNATDVEVLTEPVSKWRNVRGHNPLGLMYHDASRWGLTLQTYVQLTMLDRHTRPQVSSVRLMERSIHSARYIFVENLYRRNTWKQFTISMRSGSSKAAFSPWQPLFW

SEQ ID NO: 20464 - protein, 234 aa, Artificial Sequence
  Synthetic polypeptide
KDIIYYILSEGSEQEITELKTVCLILTNDKEQEKEKKSVICVEGNIASGKTTCLEFFSNATDVEGLMYHDASRWGLTLQTYVQLTMLDRHTRPQVSSVRLMERSIHSARYIFVENLYRSGKMPEVDYVVLSEWFDWILRNMDVSVDLIVYLRTNPETCYQRLKKRCREEEKVIPLEYLEAIHHLHEEWLIKGSLFPMAAPVLVIEADHHMERMLELFEQNRDRILTPENRKHCP

SEQ ID NO: 20465 - protein, 38 aa, Artificial Sequence
  Synthetic polypeptide
WGGGSLIHHFYLLCGVLSICLPHSASAGVPAGLVLPLC

SEQ ID NO: 20466 - protein, 70 aa, Artificial Sequence
  Synthetic polypeptide
GAEGLSFITFICYVASSASAFLTAPLLEFLLALYFLFADAMQLNDKWQGLCWPMMDFLRCVTAALIYFAI

SEQ ID NO: 20467 - protein, 42 aa, Artificial Sequence
  Synthetic polypeptide
GRRVSHSSLLSAMWRPQHLPSSQRLCWSSCWPCTSSLLMPCS

SEQ ID NO: 20468 - protein, 136 aa, Artificial Sequence
  Synthetic polypeptide
GAEGLSFITFICYVASSASAFLTAPLLEFLLALYFLFADAMQLNDKWQGLCWPMMDFLRCVTAALIYFAISITAIAKYSDGASKAAGVFGFFATIVFATDFYLIFNDVAKFLKQGDSADETTAHKTEEENSDSDSD

SEQ ID NO: 20469 - protein, 76 aa, Artificial Sequence
  Synthetic polypeptide
GAEGLSFITFICYVASSASAFLTAPLLEFLLALYFLFADAMQLNDKWQGLCWPMMDFLRCVTAALIYFAISITAIA

SEQ ID NO: 20470 - protein, 104 aa, Artificial Sequence
  Synthetic polypeptide
GAEGLSFITFICYVASSASAFLTAPLLEFLLALYFLFADAMQLNDKWQGLCWPMMVFGFFATIVFATDFYLIFNDVAKFLKQGDSADETTAHKTEEENSDSDSD

SEQ ID NO: 20471 - protein, 119 aa, Artificial Sequence
  Synthetic polypeptide
GAEGLSFITFICYVASSASAFLTAPLLEFLLALYFLFADAMQLNDKWQGLCWPMMDFLRCVTAALIYFAISITAIAKYSDGASKAAGGSVPDTRAVCPSRSEMGREAGAAASRSRESAL

SEQ ID NO: 20472 - protein, 21 aa, Artificial Sequence
  Synthetic polypeptide
ALNLGPDCIHLHRDHHGMLPV

SEQ ID NO: 20473 - protein, 193 aa, Artificial Sequence
  Synthetic polypeptide
GLWFGSHLMSSWVPGVYGRRLILALIAFICIETIMACSPCEGLYFFEFVSCSAFVVTGVLLIMFSLNLHMRIPQINWNLTDLVNTGLSAFLFFIASIVLAALNHRAGAEIAAVIFGFLATAAYAVNTFLAVQKWRVSVRQQSTNDYIRARTESRDVDSRPEIQRLDTFSYSTNVTVRKKSPTNLLSLNHWQLA

SEQ ID NO: 20474 - protein, 167 aa, Artificial Sequence
  Synthetic polypeptide
GLWFGSHLMSSWVPGVYGRRLILALIAFICIETIMACSPCEGLYFFEFVSCSAFVVTGVLLIMFSLNLHMRIPQINWNLTDLVNTGLSAFLFFIASIVLAALNHRAGAEIAAVIFGFLATAAYAVNTFLAVQKWRVSVRQQSTNDYIRARTESRDVDSRPEIQRLDT

SEQ ID NO: 20475 - protein, 181 aa, Artificial Sequence
  Synthetic polypeptide
CLAGCQAYMILALIAFICIETIMACSPCEGLYFFEFVSCSAFVVTGVLLIMFSLNLHMRIPQINWNLTDLVNTGLSAFLFFIASIVLAALNHRAGAEIAAVIFGFLATAAYAVNTFLAVQKWRVSVRQQSTNDYIRARTESRDVDSRPEIQRLDTFSYSTNVTVRKKSPTNLLSLNHWQLA

SEQ ID NO: 20476 - protein, 36 aa, Artificial Sequence
  Synthetic polypeptide
GLWFGSHLMSSWVPGVYDLGPDCIHLHRDHHGMLPV

SEQ ID NO: 20477 - protein, 155 aa, Artificial Sequence
  Synthetic polypeptide
CLAGCQAYMILALIAFICIETIMACSPCEGLYFFEFVSCSAFVVTGVLLIMFSLNLHMRIPQINWNLTDLVNTGLSAFLFFIASIVLAALNHRAGAEIAAVIFGFLATAAYAVNTFLAVQKWRVSVRQQSTNDYIRARTESRDVDSRPEIQRLDT

SEQ ID NO: 20478 - protein, 192 aa, Artificial Sequence
  Synthetic polypeptide
KISYREKAKKDAAAVGNHVAKLLQSIGQAPESISEKELKLLCSNSAFLRVVRCRSLAEEYGLDTINKDEIISSMDNPDNEIVLYLMLRAVDRFHKQQGRYPGVSNYQVEEDIGKLKSCLTGFLQEYGLSVMVKDDYVHEFCRYGAAEPHTIAAFLGGAAAQEVIKIITKQFVIFNNTYIYSGMSQTSATFQL

SEQ ID NO: 20479 - protein, 57 aa, Artificial Sequence
  Synthetic polypeptide
VQEFETIVGNIVRLPSLQIEKLVTVKKQRKMLPLWVIMLPNCCSPLARHQSPFQRKN

SEQ ID NO: 20480 - protein, 14 aa, Artificial Sequence
  Synthetic polypeptide
GQEFETSLGNMVVG

SEQ ID NO: 20481 - protein, 551 aa, Artificial Sequence
  Synthetic polypeptide
ARWLTPVIPALWEAEAGGSPEVRSSRPAWATWLWGDHGQEALESAHVCLINATATGTEILKNLVLPGNVGIGSFTIIDGNQVSGEDAGNNFFLQRSSIGKNRAEAAMEFLQELNSDVSGSFVEESPENLLDNDPSFFCRFTVVVATQLPESTSLRLADVLWNSQIPLLICRTYGLVGYMRIIIKEHPVIESHPDNALEDLRLDKPFPELREHFQSYDLDHMEKKDHSHTPWIVIIAKYLAQWYSETNGRIPKTYKEKEDFRDLIRQGILKNENGAPEDEENFEEAIKNVNTALNTTQIPSSIEDIFNDDRCINITKQTPSFWILARALKEFVAKEGQGNLPVRGTIPDMIADSGKYIKLQNVYREKAKKDAAAVGNHVAKLLQSIGQAPESISEKELKLLCSNSAFLRVVRCRSLAEEYGLDTINKDEIISSMDNPDNEIVLYLMLRAVDRFHKQQGRYPGVSNYQVEEDIGKLKSCLTGFLQEYGLSVMVKDDYVHEFCRYGAAEPHTIAAFLGGAAAQEVIKIITKQFVIFNNTYIYSGMSQTSATFQL

SEQ ID NO: 20482 - protein, 34 aa, Artificial Sequence
  Synthetic polypeptide
SQHFGRPKRADHLRSGVRDQPGQHGCGVIMGKRL

SEQ ID NO: 20483 - protein, 548 aa, Artificial Sequence
  Synthetic polypeptide
ARWLTPVIPALWEAEAGGSPEVRSSRPAWATWLWGDHGQEALESAHVCLINATATGTEILKNLVLPGIGSFTIIDGNQVSGEDAGNNFFLQRSSIGKNRAEAAMEFLQELNSDVSGSFVEESPENLLDNDPSFFCRFTVVVATQLPESTSLRLADVLWNSQIPLLICRTYGLVGYMRIIIKEHPVIESHPDNALEDLRLDKPFPELREHFQSYDLDHMEKKDHSHTPWIVIIAKYLAQWYSETNGRIPKTYKEKEDFRDLIRQGILKNENGAPEDEENFEEAIKNVNTALNTTQIPSSIEDIFNDDRCINITKQTPSFWILARALKEFVAKEGQGNLPVRGTIPDMIADSGKYIKLQNVYREKAKKDAAAVGNHVAKLLQSIGQAPESISEKELKLLCSNSAFLRVVRCRSLAEEYGLDTINKDEIISSMDNPDNEIVLYLMLRAVDRFHKQQGRYPGVSNYQVEEDIGKLKSCLTGFLQEYGLSVMVKDDYVHEFCRYGAAEPHTIAAFLGGAAAQEVIKIITKQFVIFNNTYIYSGMSQTSATFQL

SEQ ID NO: 20484 - protein, 99 aa, Artificial Sequence
  Synthetic polypeptide
ARWLTPVIPALWEAEAGGSPEVRSSRPAWATWLWGDHGQEALESAHVCLINATATGTEILKNLVLPGIGSFTIIDGNQVSGEDAGNKTELKLPWNSYKN

SEQ ID NO: 20485 - protein, 182 aa, Artificial Sequence
  Synthetic polypeptide
ARWLTPVIPALWEAEAGGSPEVRSSRPAWATWLWGDHGQEALESAHVCLINATATGTEILKNLVLPGIGSFTIIDGNQVSGEDAGNNFFLQRSSIGKNRAEAAMEFLQELNSDVSGSFVEESPENLLDNDPSFFCRFTVVVATQLPESTSLRLADVLWNSQIPLLICRTYGLVGYMRIIIKE

SEQ ID NO: 20486 - protein, 146 aa, Artificial Sequence
  Synthetic polypeptide
ARWLTPVIPALWEAEAGGSPEVRSSRPAWATWLWGDHGQEALESAHVCLINATATGTEILKNLVLPGIGSFTIIDGNQVSGEDAGNNFFLQRSSIGKNRAEAAMEFLQELNSDVSGSFVEESPENLLDNDPSFFCRFTVVVATQLP

SEQ ID NO: 20487 - protein, 24 aa, Artificial Sequence
  Synthetic polypeptide
ARWLTPVIPALWEAEAGGSPEVVG

SEQ ID NO: 20488 - protein, 533 aa, Artificial Sequence
  Synthetic polypeptide
SQHFGRPKRADHLRLWGDHGQEALESAHVCLINATATGTEILKNLVLPGNVGIGSFTIIDGNQVSGEDAGNNFFLQRSSIGKNRAEAAMEFLQELNSDVSGSFVEESPENLLDNDPSFFCRFTVVVATQLPESTSLRLADVLWNSQIPLLICRTYGLVGYMRIIIKEHPVIESHPDNALEDLRLDKPFPELREHFQSYDLDHMEKKDHSHTPWIVIIAKYLAQWYSETNGRIPKTYKEKEDFRDLIRQGILKNENGAPEDEENFEEAIKNVNTALNTTQIPSSIEDIFNDDRCINITKQTPSFWILARALKEFVAKEGQGNLPVRGTIPDMIADSGKYIKLQNVYREKAKKDAAAVGNHVAKLLQSIGQAPESISEKELKLLCSNSAFLRVVRCRSLAEEYGLDTINKDEIISSMDNPDNEIVLYLMLRAVDRFHKQQGRYPGVSNYQVEEDIGKLKSCLTGFLQEYGLSVMVKDDYVHEFCRYGAAEPHTIAAFLGGAAAQEVIKIITKQFVIFNNTYIYSGMSQTSATFQL

SEQ ID NO: 20489 - protein, 530 aa, Artificial Sequence
  Synthetic polypeptide
SQHFGRPKRADHLRLWGDHGQEALESAHVCLINATATGTEILKNLVLPGIGSFTIIDGNQVSGEDAGNNFFLQRSSIGKNRAEAAMEFLQELNSDVSGSFVEESPENLLDNDPSFFCRFTVVVATQLPESTSLRLADVLWNSQIPLLICRTYGLVGYMRIIIKEHPVIESHPDNALEDLRLDKPFPELREHFQSYDLDHMEKKDHSHTPWIVIIAKYLAQWYSETNGRIPKTYKEKEDFRDLIRQGILKNENGAPEDEENFEEAIKNVNTALNTTQIPSSIEDIFNDDRCINITKQTPSFWILARALKEFVAKEGQGNLPVRGTIPDMIADSGKYIKLQNVYREKAKKDAAAVGNHVAKLLQSIGQAPESISEKELKLLCSNSAFLRVVRCRSLAEEYGLDTINKDEIISSMDNPDNEIVLYLMLRAVDRFHKQQGRYPGVSNYQVEEDIGKLKSCLTGFLQEYGLSVMVKDDYVHEFCRYGAAEPHTIAAFLGGAAAQEVIKIITKQFVIFNNTYIYSGMSQTSATFQL

SEQ ID NO: 20490 - protein, 81 aa, Artificial Sequence
  Synthetic polypeptide
SQHFGRPKRADHLRLWGDHGQEALESAHVCLINATATGTEILKNLVLPGIGSFTIIDGNQVSGEDAGNKTELKLPWNSYKN

SEQ ID NO: 20491 - protein, 164 aa, Artificial Sequence
  Synthetic polypeptide
SQHFGRPKRADHLRLWGDHGQEALESAHVCLINATATGTEILKNLVLPGIGSFTIIDGNQVSGEDAGNNFFLQRSSIGKNRAEAAMEFLQELNSDVSGSFVEESPENLLDNDPSFFCRFTVVVATQLPESTSLRLADVLWNSQIPLLICRTYGLVGYMRIIIKE

SEQ ID NO: 20492 - protein, 128 aa, Artificial Sequence
  Synthetic polypeptide
SQHFGRPKRADHLRLWGDHGQEALESAHVCLINATATGTEILKNLVLPGIGSFTIIDGNQVSGEDAGNNFFLQRSSIGKNRAEAAMEFLQELNSDVSGSFVEESPENLLDNDPSFFCRFTVVVATQLP

SEQ ID NO: 20493 - protein, 23 aa, Artificial Sequence
  Synthetic polypeptide
KQQERIPHTRRNHAGGCISTTGL

SEQ ID NO: 20494 - protein, 68 aa, Artificial Sequence
  Synthetic polypeptide
ETRNHESSKKGFLTREGTTQEDALAQQAFEEARRRTREFEDRDRSHREEMEVRVSQLLAVTGKKTTRP

SEQ ID NO: 20495 - protein, 26 aa, Artificial Sequence
  Synthetic polypeptide
TVERQGIMKAARKDSSHAKEPRRRMH

SEQ ID NO: 20496 - protein, 73 aa, Artificial Sequence
  Synthetic polypeptide
ETRNHESSKKGFLTREGTTQEDALAQQAFEEARRRTREFEDRDRSHREEMEARRQQDPSPGSNLGGGDDLKLR

SEQ ID NO: 20497 - protein, 47 aa, Artificial Sequence
  Synthetic polypeptide
ETRNHESSKKGFLTREGTTQEDALAQQAFEEARRRTREFEDRDRSHR

SEQ ID NO: 20498 - protein, 50 aa, Artificial Sequence
  Synthetic polypeptide
TQEDALAQQAFEEARRRTREFEDRDRSHREEMEVRVSQLLAVTGKKTTRP

SEQ ID NO: 20499 - protein, 20 aa, Artificial Sequence
  Synthetic polypeptide
PWSRQKLEQDTKDAKLRRMH

SEQ ID NO: 20500 - protein, 34 aa, Artificial Sequence
  Synthetic polypeptide
RKMRRSFCDLGVGKNLNRTQKMLNSGGCISTTGL

SEQ ID NO: 20501 - protein, 55 aa, Artificial Sequence
  Synthetic polypeptide
TQEDALAQQAFEEARRRTREFEDRDRSHREEMEARRQQDPSPGSNLGGGDDLKLR

SEQ ID NO: 20502 - protein, 29 aa, Artificial Sequence
  Synthetic polypeptide
TQEDALAQQAFEEARRRTREFEDRDRSHR

SEQ ID NO: 20503 - protein, 493 aa, Artificial Sequence
  Synthetic polypeptide
SILDLPGWDKHSYGYHGDDGHSFCSSGTGQPYGPTFTTGDVIGCCVNLINGTCFYTKNGHSLGIAFTDLPANLYPTVGLQTPGEIVDANFGQQPFLFDIEDYMREWRAKVQGTVHCFPISARLGEWQAVLQNMVSSYLVHHGYCATATAFARMTETPIQEEQASIKNRQKIQKLVLEGRVGEAIETTQRFYPGLLEHNPNLLFMLKCRQFVEMVNGTDSEVRSLSSRSPKSQDSYPGSPSLSPRHGPSSSHMHNTGADSPSCSNGVASTKSKQNHSKYPAPSSSSSSSSSSSSSSPSSVNYSESNSTDSTKSQHHSSTSNQETSDSEMEMEAEHYPNGVLGSMSTRIVNGAYKHEDLQTDESSMDDRHPRRQLCGGNQAATERIILFGRELQALSEQLGREYGKNLAHTEMLQDAFSLLAYSDPWSCPVGQQLDPIQREPVCAALNSAILESQNLPKQPPLMLALGQASECLRLMARAGLGSCSFARVDDYLH

SEQ ID NO: 20504 - protein, 46 aa, Artificial Sequence
  Synthetic polypeptide
SLVFFRAYLIYQVGTNIPMVTMVMMGIRSAPRGLASPMVPHSPQET

SEQ ID NO: 20505 - protein, 13 aa, Artificial Sequence
  Synthetic polypeptide
STRLGQTFLWLPW

SEQ ID NO: 20506 - protein, 523 aa, Artificial Sequence
  Synthetic polypeptide
SILDLPGWDKHSYGYHGDDGHSFCSSGTGQPYGPTFTTGDVIGCCVNLINGTCFYTKNGHSLGIAFTDLPANLYPTVGLQTPGEIVDANFGQQPFLFDIEDYMREWRAKVQGTVHCFPISARLGEWQAVLQNMVSSYLVHHGYCATATAFARMTETPIQEEQASIKNRQKIQKLVLEGRVGEAIETTQRFYPGLLEHNPNLLFMLKCRQFVEMVNGTDSEVRSLSSRSPKSQDSYPGSPSLSPRHGPSSSHMHNTGADSPSCSNGVASTKSKQNHSKYPAPSSSSSSSSSSSSSSPSSVNYSESNSTDSTKSQHHSSTSNQETSNPWLQLERRPNQAAPTTPPGPTPTSTPPHSDSEMEMEAEHYPNGVLGSMSTRIVNGAYKHEDLQTDESSMDDRHPRRQLCGGNQAATERIILFGRELQALSEQLGREYGKNLAHTEMLQDAFSLLAYSDPWSCPVGQQLDPIQREPVCAALNSAILESQNLPKQPPLMLALGQASECLRLMARAGLGSCSFARVDDYLH

SEQ ID NO: 20507 - protein, 184 aa, Artificial Sequence
  Synthetic polypeptide
SILDLPGWDKHSYGYHGDDGHSFCSSGTGQPYGPTFTTGDVIGCCVNLINGTCFYTKNGHSLGIAFTDLPANLYPTVGLQTPGEIVDANFGQQPFLFDIEDYMREWRAKVQGTVHCFPISARLGEWQAVLQNMVSSYLVHHGYCATATAFARMTETPIQEEQASIKNRQSKVYSTFPFPFLTCP

SEQ ID NO: 20508 - protein, 17 aa, Artificial Sequence
  Synthetic polypeptide
SILDLPGWDKHSYGYHG

SEQ ID NO: 20509 - protein, 23 aa, Artificial Sequence
  Synthetic polypeptide
SLVFFRAYLIYQVGTNIPMVTMV

SEQ ID NO: 20510 - protein, 750 aa, Artificial Sequence
  Synthetic polypeptide
ASLSLSLKGHGNHRESSPFLSPLEASRGIDYYDRNLALFEEELDIRPKVSSLLGKLVSYTNLTQGAKEHEEAESGEGTRRRAAEAPSMGTLMGVYLPCLQNIFGVILFLRLTWMVGTAGVLQALLIVLICCCCTLLTAISMSAIATNGVVPAGGSYFMISRSLGPEFGGAVGLCFYLGTTFAAAMYILGAIEILLTYIAPPAAIFYPSGAHDTSNATLNNMRVYGTIFLTFMTLVVFVGVKYVNKFASLFLACVIISILSIYAGGIKSIFDPPVFPVCMLGNRTLSRDQFDICAKTAVVDNETVATQLWSFFCHSPNLTTDSCDPYFMLNNVTEIPGIPGAAAGVLQENLWSAYLEKGDIVEKHGLPSADAPSLKESLPLYVVADIATSFTVLVGIFFPSVTGIMAGSNRSGDLRDAQKSIPVGTILAIITTSLVYFSSVVLFGACIEGVVLRDKYGDGVSRNLVVGTLAWPSPWVIVIGSFFSTCGAGLQSLTGAPRLLQAIAKDNIIPFLRVFGHGKVNGEPTWALLLTALIAELGILIASLDMVAPILSMFFLMCYLFVNLACAVQTLLRTPNWRPRFKYYHWALSFLGMSLCLALMFVSSWYYALVAMLIAGMIYKYIEYQGAEKEWGDGIRGLSLSAARYALLRLEEGPPHTKNWRPQLLVLLKLDEDLHVKYPRLLTFASQLKAGKGLTIVGSVIQGSFLESYGEAQAAEQTPCAALRLPTWPCSCPRTSPSTPATTSATWRAT

SEQ ID NO: 20511 - protein, 103 aa, Artificial Sequence
  Synthetic polypeptide
KDMATTERAALFFPPWRLPEELTTMTGTWHCLRKSWTSAQRYRLFWESSSATPTSPRAPKSMRRPRVGRAPAGGQPRHPAWAPSWGCTCPACRISLGLSSSCG

SEQ ID NO: 20512 - protein, 32 aa, Artificial Sequence
  Synthetic polypeptide
TSLSFTLLVPKRTWQPQREQPFSFPLGGFQRN

SEQ ID NO: 20513 - protein, 1055 aa, Artificial Sequence
  Synthetic polypeptide
ASLSLSLKGHGNHRESSPFLSPLEASRGIDYYDRNLALFEEELDIRPKVSSLLGKLVSYTNLTQGAKEHEEAESGEGTRRRAAEAPSMGTLMGVYLPCLQNIFGVILFLRLTWMVGTAGVLQALLIVLICCCCTLLTAISMSAIATNGVVPAGGSYFMISRSLGPEFGGAVGLCFYLGTTFAAAMYILGAIEILLTYIAPPAAIFYPSGAHDTSNATLNNMRVYGTIFLTFMTLVVFVGVKYVNKFASLFLACVIISILSIYAGGIKSIFDPPVFPVCMLGNRTLSRDQFDICAKTAVVDNETVATQLWSFFCHSPNLTTDSCDPYFMLNNVTEIPGIPGAAAGVLQENLWSAYLEKGDIVEKHGLPSADAPSLKESLPLYVVADIATSFTVLVGIFFPSVTGIMAGSNRSGDLRDAQKSIPVGTILAIITTSLVYFSSVVLFGACIEGVVLRDKYGDGVSRNLVVGTLAWPSPWVIVIGSFFSTCGAGLQSLTGAPRLLQAIAKDNIIPFLRVFGHGKVNGEPTWALLLTALIAELGILIASLDMVAPILSMFFLMCYLFVNLACAVQTLLRTPNWRPRFKYYHWALSFLGMSLCLALMFVSSWYYALVAMLIAGMIYKYIEYQGAEKEWGDGIRGLSLSAARYALLRLEEGPPHTKNWRPQLLVLLKLDEDLHVKYPRLLTFASQLKAGKGLTIVGSVIQGSFLESYGEAQAAEQTIKNMMEIEKVKGFCQVVVASKVREGLAHLIQSCGLGGMRHNSVVLGWPYGWRQSEDPRAWKTFIDTVRCTTAAHLALLVPKNIAFYPSNHERYLEGHIDVWWIVHDGGMLMLLPFLLRQHKVWRKCRMRIFTVAQMDDNSIQMKKDLAVFLYHLRLEAEVEVVEMHNSDISAYTYERTLMMEQRSQMLRQMRLTKTEREREAQLVKDRHSALRLESLYSDEEDESAVGADKIQMTWTRDKYMTETWDPSHAPDNFRELVHIKPDQSNVRRMHTAVKLNEVIVTRSHDARLVLLNMPGPPRNSEGDENYMEFLEVLTEGLERVLLVRGGGREVITIYS

SEQ ID NO: 20514 - protein, 1038 aa, Artificial Sequence
  Synthetic polypeptide
ASLSLSLKGHGNHRESSPFLSPLEASRGIDYYDRNLALFEEELDIRPKVSSLLGKLVSYTNLTQGAKEHEEAESGEGTRRRAAEAPSMGTLMGVYLPCLQNIFGVILFLRLTWMVGTAGVLQALLIVLICCCCTLLTAISMSAIATNGVVPAGGSYFMISRSLGPEFGGAVGLCFYLGTTFAAAMYILGAIEILLTYIAPPAAIFYPSGAHDTSNATLNNMRVYGTIFLTFMTLVVFVGVKYVNKFASLFLACVIISILSIYAGGIKSIFDPPVFPVCMLGNRTLSRDQFDICAKTAVVDNETVATQLWSFFCHSPNLTTDSCDPYFMLNNVTEIPGIPGAAAGVLQENLWSAYLEKGDIVEKHGLPSADAPSLKESLPLYVVADIATSFTVLVGIFFPSVTGIMAGSNRSGDLRDAQKSIPVGTILAIITTSLVYFSSVVLFGACIEGVVLRDKYGDGVSRNLVVGTLAWPSPWVIVIGSFFSTCGAGLQSLTGAPRLLQAIAKDNIIPFLRVFGHGKVNGEPTWALLLTALIAELGILIASLDMVAPILSMFFLMCYLFVNLACAVQTLLRTPNWRPRFKYYHWALSFLGMSLCLALMFVSSWYYALVAMLIAGMIYKYIEYQGAEKEWGDGIRGLSLSAARYALLRLEEGPPHTKNWRPQLLVLLKLDEDLHVKYPRLLTFASQLKAGKGLTIVGSVIQGSFLESYGEAQAAEQTIKNMMEIEKVKGFCQVVVASKVREGLAHLIQSCGLGGMRHNSVVLGWPYGWRQSEDPRAWKTFIDTVRCTTAAHLALLVPKNIAFYPSNHERYLEGHIDVWWIVHDGGMLMLLPFLLRQHKVWRKCRMRIFTVAQMDDNSIQMKKDLAVFLYHLRLEAEVEVVEMHNSDISAYTYERTLMMEQRSQMLRQMRLTKTEREREAQLVKDRHSALRLESLYSDEEDESAVGADKIQMTWTRDKYMTETWDPSHAPDNFRELVHIKPDQSNVRRMHTAVKLNEVIVTRSHDARLVLLNMPGPPRNSEGDENCIPLWRGRQLGGG

SEQ ID NO: 20515 - protein, 150 aa, Artificial Sequence
  Synthetic polypeptide
VCGWSAVAQSRLTTPLPPRLKHFSCLRLRITGITGWFTTKHPGPPSFLMVWMYVSLALGRPSHWSSWTPAKAAWVPISTPWWRALWAGATHGVRMSEGLPMTGAEPQRQPQAWKDKYIRAFVSLGAPWGGVAKTLRVLASGDNNRIPVIG

SEQ ID NO: 20516 - protein, 44 aa, Artificial Sequence
  Synthetic polypeptide
YRNYEITCVVLEAAESVAGVQWRNLGSLHLCLPGSSTSPASDSG

SEQ ID NO: 20517 - protein, 153 aa, Artificial Sequence
  Synthetic polypeptide
KLLSLWLECSGAISAHYTSASQAQALLLPQTPDNWDYRLVYNKTSRATQFPDGVDVRVPGFGKTFSLEFLDPSKSSVGSYFHTMVESLVGWGYTRGEDVRGAPYDWRRAPTAAAGLEGQVYPGLRVTGCALGGRGQDPARPGFRRQQPDPSHR

SEQ ID NO: 20518 - protein, 20 aa, Artificial Sequence
  Synthetic polypeptide
CKSCPQVFKPMADAAVKIVE

SEQ ID NO: 20519 - protein, 35 aa, Artificial Sequence
  Synthetic polypeptide
LLTNPSFRNASKISALMHFDVNPALRFSSLWLMLL

SEQ ID NO: 20520 - protein, 10 aa, Artificial Sequence
  Synthetic polypeptide
ILPSGFQAYG

SEQ ID NO: 20521 - protein, 135 aa, Artificial Sequence
  Synthetic polypeptide
CKSCPQVFKPMADAAVKIVEKNGFSDKIKVINKHSTEVTVGPEGDMPCRANILVTELFDTELIGEGALPSYEHAHRHLVEENCEAVPHRATVYAQLVESGRMWSWNKLFPIHVQTSLGEQVIVPPVDVESCPGAP

SEQ ID NO: 20522 - protein, 81 aa, Artificial Sequence
  Synthetic polypeptide
CKSCPQVFKPMADAAVKIVEKNGFSDKIKVINKHSTEVTVGPEGDMPCRANILVTELFDTELIGEGALPSYEHAHRHLVEE

SEQ ID NO: 20523 - protein, 604 aa, Artificial Sequence
  Synthetic polypeptide
CKSCPQVFKPMADAAVKIVEKNGFSDKIKVINKHSTEVTVGPEGDMPCRANILVTELFDTELIGEGALPSYEHAHRHLVEENCEAVPHRATVYAQLVESGRMWSWNKLFPIHVQTSLGEQVIVPPVDVESCPGAPSVCDIQLNQVSPADFTVLSDVLPMFSIDFSKQVSSSAACHSRRFEPLTSGRAQVVLSWWDIEMDPEGKIKCTMAPFWAHSDPEEMQWRDHWMQCVYFLPQEEPVVQGSALYLVAHHDDYCVWYSLQRTSPEKNERVRQMRPVCDCQAHLLWNRPRFGEINDQDRTDRYVQALRTVLKPDSVCLCVSDGSLLSVLAHHLGVEQVFTVESSAASHKLLRKIFKANHLEDKINIIEKRPELLTNEDLQGRKVSLLLGEPFFTTSLLPWHNLYFWYVRTAVDQHLGPGAMVMPQAASLHAVVVEFRDLWRIRSPCGDCEGFDVHIMDDMIKRALDFRESREAEPHPLWEYPCRSLSEPWQILTFDFQQPVPLQPLCAEGTVELRRPGQSHAAVLWMEYHLTPECTLSTGLLEPADPEGGCCWNPHCKQAVYFFSPAPDPRALLGGPRTVSYAVEFHPDTGDIIMEFRHADTPD

SEQ ID NO: 20524 - protein, 479 aa, Artificial Sequence
  Synthetic polypeptide
CKSCPQVFKPMADAAVKIVEKNGFSDKIKVINKHSTEVTVGPEGDMPCRANILVTELFDTELIGEGALPSYEHAHRHLVEENCEAVPHRATVYAQLVESGRMWSWNKLFPIHVQTSLGEQVIVPPVDVESCPGAPSVCDIQLNQVSPADFTVLSDVLPMFSIDFSKQVSSSAACHSRRFEPLTSGRAQVVLSWWDIEMDPEGKIKCTMAPFWAHSDPEEMQWRDHWMQCVYFLPQEEPVVQGSALYLVAHHDDYCVWYSLQRTSPEKNERVRQMRPVCDCQAHLLWNRPRFGEINDQDRTDRYVQALRTVLKPDSVCLCVSDGSLLSVLAHHLGVEQVFTVESSAASHKLLRKIFKANHLEDKINIIEKRPELLTNEDLQGRKVSLLLGEPFFTTSLLPWHNLYFWYVRTAVDQHLGPGAMVMPQAASLHAVVVEFRVCREQQDVPLVLAATLPCVLAGGCGRGCSFLTGPVADPEPLW

SEQ ID NO: 20525 - protein, 29 aa, Artificial Sequence
  Synthetic polypeptide
GRMQWLMPVIPALWEAKAALPPLAREPFC

SEQ ID NO: 20526 - protein, 23 aa, Artificial Sequence
  Synthetic polypeptide
SQHFGRPRQPSHHWHGNPSANTD

SEQ ID NO: 20527 - protein, 322 aa, Artificial Sequence
  Synthetic polypeptide
PDAVAHACNPSTLGGQGSPPTTGTGTLLLTLIDVNDHGPVPEPRQITICNQSPVRQVLNITDKDLSPHTSPFQAQLTDDSDIYWTAEVNEEGDTVVLSLKKFLKQDTYDVHLSLSDHGNKEQLTVIRATVCDCHGHVETCPGPWKGGFILPVLGAVLALLFLLLVLLLLVRKKRKIKEPLLLPEDDTRDNVFYYGEEGGGEEDQDYDITQLHRGLEARPEVVLRNDVAPTIIPTPMYRPRPANPDEIGNFIIENLKAANTDPTAPPYDTLLVFDYEGSGSDAASLSSLTSSASDQDQDYDYLNEWGSRFKKLADMYGGGEDD

SEQ ID NO: 20528 - protein, 277 aa, Artificial Sequence
  Synthetic polypeptide
PDAVAHACNPSTLGGQGSPPTTGTGTLLLTLIDVNDHGPVPEPRQITICNQSPVRQVLNITDKDLSPHTSPFQAQLTDDSDIYWTAEVNEEGDTVVLSLKKFLKQDTYDVHLSLSDHGNKEQLTVIRATVCDCHGHVETCPGPWKGGFILPVLGAVLALLFLLLVLLLLVRKKRKIKEPLLLPEDDTRDNVFYYGEEGGGEEDQDYDITQLHRGLEARPEVVLRNDVAPTIIPTPMYRPRPANPDEIGNFIIEGRGERGSQRGNGGLQLARGRTRRS

SEQ ID NO: 20529 - protein, 20 aa, Artificial Sequence
  Synthetic polypeptide
SQISNKSTLEEKRFCWNKLV

SEQ ID NO: 20530 - protein, 20 aa, Artificial Sequence
  Synthetic polypeptide
VTSPPWRRRGSAGTSWCRCK

SEQ ID NO: 20531 - protein, 94 aa, Artificial Sequence
  Synthetic polypeptide
QVHPGGEEVLLEQAGVDASESFEDVGHSSDAREMLKQYYIGDIHPSDLKPESGSKDPSKNDTCKSCWAYWILPIIGAVLLGFLYRYYTSESKSS

SEQ ID NO: 20532 - protein, 79 aa, Artificial Sequence
  Synthetic polypeptide
QVHPGGEEVLLEQAGVDASESFEDVGHSSDAREMLKQYYIGDIHPLLGILDFTHHRRCSLRFPVPLLHIGKQILLRRPC

SEQ ID NO: 20533 - protein, 88 aa, Artificial Sequence
  Synthetic polypeptide
QVHPGGEEVLLEQAGVDASESFEDVGHSSDAREMLKQYYIGDIHPSDLKPESGSKDPSKNDTCKRRCSLRFPVPLLHIGKQILLRRPC

SEQ ID NO: 20534 - protein, 125 aa, Artificial Sequence
  Synthetic polypeptide
GQVWWLTPVIPALWEAEAGGSRDQEFQTSLTNMHPGGEEVLLEQAGVDASESFEDVGHSSDAREMLKQYYIGDIHPSDLKPESGSKDPSKNDTCKSCWAYWILPIIGAVLLGFLYRYYTSESKSS

SEQ ID NO: 20535 - protein, 16 aa, Artificial Sequence
  Synthetic polypeptide
PTCTLEEKRFCWNKLV

SEQ ID NO: 20536 - protein, 33 aa, Artificial Sequence
  Synthetic polypeptide
GGRITRSRVPDQPDQHAPWRRRGSAGTSWCRCK

SEQ ID NO: 20537 - protein, 110 aa, Artificial Sequence
  Synthetic polypeptide
GQVWWLTPVIPALWEAEAGGSRDQEFQTSLTNMHPGGEEVLLEQAGVDASESFEDVGHSSDAREMLKQYYIGDIHPLLGILDFTHHRRCSLRFPVPLLHIGKQILLRRPC

SEQ ID NO: 20538 - protein, 119 aa, Artificial Sequence
  Synthetic polypeptide
GQVWWLTPVIPALWEAEAGGSRDQEFQTSLTNMHPGGEEVLLEQAGVDASESFEDVGHSSDAREMLKQYYIGDIHPSDLKPESGSKDPSKNDTCKRRCSLRFPVPLLHIGKQILLRRPC

SEQ ID NO: 20539 - protein, 21 aa, Artificial Sequence
  Synthetic polypeptide
SQLLGRLSTLEEKRFCWNKLV

SEQ ID NO: 20540 - protein, 112 aa, Artificial Sequence
  Synthetic polypeptide
KYKNKPGLVAPVISATWEAKHPGGEEVLLEQAGVDASESFEDVGHSSDAREMLKQYYIGDIHPSDLKPESGSKDPSKNDTCKSCWAYWILPIIGAVLLGFLYRYYTSESKSS

SEQ ID NO: 20541 - protein, 97 aa, Artificial Sequence
  Synthetic polypeptide
KYKNKPGLVAPVISATWEAKHPGGEEVLLEQAGVDASESFEDVGHSSDAREMLKQYYIGDIHPLLGILDFTHHRRCSLRFPVPLLHIGKQILLRRPC

SEQ ID NO: 20542 - protein, 106 aa, Artificial Sequence
  Synthetic polypeptide
KYKNKPGLVAPVISATWEAKHPGGEEVLLEQAGVDASESFEDVGHSSDAREMLKQYYIGDIHPSDLKPESGSKDPSKNDTCKRRCSLRFPVPLLHIGKQILLRRPC

SEQ ID NO: 20543 - protein, 35 aa, Artificial Sequence
  Synthetic polypeptide
GWVWAHTCNPSTLRGEGGQIMSTLEEKRFCWNKLV

SEQ ID NO: 20544 - protein, 105 aa, Artificial Sequence
  Synthetic polypeptide
SQHFARRRWADHEHPGGEEVLLEQAGVDASESFEDVGHSSDAREMLKQYYIGDIHPSDLKPESGSKDPSKNDTCKSCWAYWILPIIGAVLLGFLYRYYTSESKSS

SEQ ID NO: 20545 - protein, 90 aa, Artificial Sequence
  Synthetic polypeptide
SQHFARRRWADHEHPGGEEVLLEQAGVDASESFEDVGHSSDAREMLKQYYIGDIHPLLGILDFTHHRRCSLRFPVPLLHIGKQILLRRPC

SEQ ID NO: 20546 - protein, 99 aa, Artificial Sequence
  Synthetic polypeptide
SQHFARRRWADHEHPGGEEVLLEQAGVDASESFEDVGHSSDAREMLKQYYIGDIHPSDLKPESGSKDPSKNDTCKRRCSLRFPVPLLHIGKQILLRRPC

SEQ ID NO: 20547 - protein, 36 aa, Artificial Sequence
  Synthetic polypeptide
PGAVARACSPRVRRQCFPSPLVAVAPCTLCKGSTGT

SEQ ID NO: 20548 - protein, 48 aa, Artificial Sequence
  Synthetic polypeptide
SQHFGRPRQADHKVRRSRLSCLTRRNPVSTKNTKKLSRVRWHVPVVPE

SEQ ID NO: 20549 - protein, 170 aa, Artificial Sequence
  Synthetic polypeptide
SQSKKAVLSITTGGSGSMYSLQGIHGDMNVILWPIQSGILHFCGFQVLEPQLTYSIGHTPADARIQILEGWKKRLENIWDETPLYFAPSSLFDLNFQAGFLMKKEFHSVTQVGVHAQPPCRDSLQHLGILGSPHQQEGSHQTQPLHLDFSASMAVRNSFSLYIAQLQVFC

SEQ ID NO: 20550 - protein, 137 aa, Artificial Sequence
  Synthetic polypeptide
SQSKKAVLSITTGGSGSMYSLQGIHGDMNVILWPIQSGILHFCGFQVLEPQLTYSIGHTPADARIQILEGWKKRLENIWDETPLYFAPSSLFDLNFQAGFLMKKEVQDEEKNKKFGLSVGHHLGKSIPTDNQIKARK

SEQ ID NO: 20551 - protein, 50 aa, Artificial Sequence
  Synthetic polypeptide
KWCPQSPRCIIVNLELTPTWRWRWMDSPVRPRRLGSALGALSFSGMRSSF

SEQ ID NO: 20552 - protein, 40 aa, Artificial Sequence
  Synthetic polypeptide
VKAVASCPVSRLLHFALLQSVGHTAASDLVKSGVRKAQGA

SEQ ID NO: 20553 - protein, 874 aa, Artificial Sequence
  Synthetic polypeptide
PPVLSLGFCTLPSFSLLVTQQPVILLKVVSAKPKVHNRQPRINSYVEVAVDGLPSETKKTGKRIGSSELLWNEIIILNVTAQSHLDLKVWSCHTLRNELLGTASVNLSNVLKNNGGKMENMQLTLNLQTENKGSVVSGGELTIFLDGPTVDLGNVPNGSALTDGSQLPSRDSSGTAVAPENRHQPPSTNCFGGRSRTHRHSGASARTTPATGEQSPGARSRHRQPVKNSGHSGLANGTVNDEPTTATDPEEPSVVGVTSPPAAPLSVTPNPNTTSLPAPATPAEGEEPSTSGTQQLPAAAQAPDALPAGWEQRELPNGRVYYVDHNTKTTTWERPLPPGWEKRTDPRGRFYYVDHNTRTTTWQRPTAEYVRNYEQWQSQRNQLQGAMQHFSQRFLYQSSSASTDHDPLGPLPPGWEKRQDNGRVYYVNHNTRTTQWEDPRTQGMIQEPALPPGWEMKYTSEGVRYFVDHNTRTTTFKDPRPGFESGTKQGSPGAYDRSFRWKYHQFRFLCHSNALPSHVKISVSRQTLFEDSFQQIMNMKPYDLRRRLYIIMRGEEGLDYGGIAREWFFLLSHEVLNPMYCLFEYAGKNNYCLQINPASSINPDHLTYFRFIGRFIAMALYHGKFIDTGFTLPFYKRMLNKRPTLKDLESIDPEFYNSIVWIKENNLEECGLELYFIQDMEILGKVTTHELKEGGESIRVTEENKEEYIMLLTDWRFTRGVEEQTKAFLDGFNEVAPLEWLRYFDEKELELMLCGMQEIDMSDWQKSTIYRHYTKNSKQIQWFWQVVKEMDNEKRIRLLQFVTGTCRLPVGGFAELIGSNGPQKFCIDKVGKETWLPRSHTCFNRLDLPPYKSYEQLREKLLYAIEETEGFGQE

SEQ ID NO: 20554 - protein, 111 aa, Artificial Sequence
  Synthetic polypeptide
PPVLSLGFCTLPSFSLLVTQQPVILLKVVSAKPKVHNRQPRINSYVEVAVDGLPSETKKTGKRIGSSELLWNEIIILNVTAQSHLDLKVWSCHTLRNELLGTASVNLSNVL

SEQ ID NO: 20555 - protein, 120 aa, Artificial Sequence
  Synthetic polypeptide
PPVLSLGFCTLPSFSLLVTQQPVILLKVVSAKPKVHNRQPRINSYVEVAVDGLPSETKKTGKRIGSSELLWNEIIILNVTAQSHLDLKVWSCHTLRNELLGTASVNLSNVLKNNGGKSTF

SEQ ID NO: 20556 - protein, 39 aa, Artificial Sequence
  Synthetic polypeptide
KWCPQSPRCIIVNLELTPTWRWRWMDSPVRPRRLGSALG

SEQ ID NO: 20557 - protein, 65 aa, Artificial Sequence
  Synthetic polypeptide
PPVLSLGFCTLPSFSLLVTQQPVILLKVVSAKPKVHNRQPRINSYVEVAVDGLPSETKKTGKRIG

SEQ ID NO: 20558 - protein, 339 aa, Artificial Sequence
  Synthetic polypeptide
PPVLSLGFCTLPSFSLLVTQQPVILLKVVSAKPKVHNRQPRINSYVEVAVDGLPSETKKTGKRIGSSELLWNEIIILNVTAQSHLDLKVWSCHTLRNELLGTASVNLSNVLKNNGGKMENMQLTLNLQTENKGSVVSGGELTIFLDGPTVDLGNVPNGSALTDGSQLPSRDSSGTAVAPENRHQPPSTNCFGGRSRTHRHSGASARTTPATGEQSPGARSRHRQPVKNSGHSGLANGTVNDEPTTATDPEEPSVVGVTSPPAAPLSVTPNPNTTSLPAPATPAEGEEPSTSGTQQLPAAAQAPDALPAGWEQRELPNGRVYYVDHNTKTTTWERPLPPG

SEQ ID NO: 20559 - protein, 238 aa, Artificial Sequence
  Synthetic polypeptide
AQELKTSLSNTLSNLHLKEEKIKPDTNGAVVKTNANAEKTDEEEKEDRAAQSLLNKLIRSNLVDNTNQVEVLQRDPNSPLYSVKSFEELRLKPQLLQGVYAMGFNRPSKIQENALPLMLAEPPQNLIAQSQSGTGKTAAFVLAMLSQVEPANKYPQCLCLSPTYELALQTGKVIEQMGKFYPELKLAYAVRGNKLERGQKISEQIVIGTPGTVLDWCSKLKFIDPKKIKVFVLDEADV

SEQ ID NO: 20560 - protein, 3 aa, Artificial Sequence
  Synthetic polypeptide
ATH

SEQ ID NO: 20561 - protein, 28 aa, Artificial Sequence
  Synthetic polypeptide
HFGRLRQEDRLSPGAQDQPEQHIEQLAS

SEQ ID NO: 20562 - protein, 471 aa, Artificial Sequence
  Synthetic polypeptide
AQELKTSLSNTLSNLHLKEEKIKPDTNGAVVKTNANAEKTDEEEKEDRAAQSLLNKLIRSNLVDNTNQVEVLQRDPNSPLYSVKSFEELRLKPQLLQGVYAMGFNRPSKIQENALPLMLAEPPQNLIAQSQSGTGKTAAFVLAMLSQVEPANKYPQCLCLSPTYELALQTGKVIEQMGKFYPELKLAYAVRGNKLERGQKISEQIVIGTPGTVLDWCSKLKFIDPKKIKVFVLDEADVMIATQGHQDQSIRIQRMLPRNCQMLLFSATFEDSVWKFAQKVVPDPNVIKLKREEETLDTIKQYYVLCSSRDEKFQALCNLYGAITIAQAMIFCHTRKTASWLAAELSKEGHQVALLSGEMMVEQRAAVIERFREGKEKVLVTTNVCARGIDVEQVSVVINFDLPVDKDGNPDNETYLHRIGRTGRFGKRGLAVNMVDSKHSMNILNRIQEHFNKKIERLDTDDLDEIEKIAN

SEQ ID NO: 20563 - protein, 440 aa, Artificial Sequence
  Synthetic polypeptide
AQELKTSLSNTLSNLHLKEEKIKPDTNGAVVKTNANAEKTDEEEKEDRAAQSLLNKLIRSNLVDNTNQVEVLQRDPNSPLYSVKSFEELRLPQNLIAQSQSGTGKTAAFVLAMLSQVEPANKYPQCLCLSPTYELALQTGKVIEQMGKFYPELKLAYAVRGNKLERGQKISEQIVIGTPGTVLDWCSKLKFIDPKKIKVFVLDEADVMIATQGHQDQSIRIQRMLPRNCQMLLFSATFEDSVWKFAQKVVPDPNVIKLKREEETLDTIKQYYVLCSSRDEKFQALCNLYGAITIAQAMIFCHTRKTASWLAAELSKEGHQVALLSGEMMVEQRAAVIERFREGKEKVLVTTNVCARGIDVEQVSVVINFDLPVDKDGNPDNETYLHRIGRTGRFGKRGLAVNMVDSKHSMNILNRIQEHFNKKIERLDTDDLDEIEKIAN

SEQ ID NO: 20564 - protein, 33 aa, Artificial Sequence
  Synthetic polypeptide
AQELKTSLSNTLSNLHLKEEKIKPDTNGLYKNF

SEQ ID NO: 20565 - protein, 253 aa, Artificial Sequence
  Synthetic polypeptide
AQELKTSLSNTLSNLHLKEEKIKPDTNGAVVKTNANAEKTDEEEKEDRAAQSLLNKLIRSNLVDNTNQVEVLQRDPNSPLYSVKSFEELRLKPQLLQGVYAMGFNRPSKIQENALPLMLAEPPQNLIAQSQSGTGKTAAFVLAMLSQVEPANKYPQCLCLSPTYELALQTGKVIEQMGKFYPELKLAYAVRGNKLERGQKISEQIVIGTPGTVLDWCSKLKFIDPKKIKVFVLDEADVMIATQGHQDQSIRIQ

SEQ ID NO: 20566 - protein, 221 aa, Artificial Sequence
  Synthetic polypeptide
AEIAPLHSRLGAVVKTNANAEKTDEEEKEDRAAQSLLNKLIRSNLVDNTNQVEVLQRDPNSPLYSVKSFEELRLKPQLLQGVYAMGFNRPSKIQENALPLMLAEPPQNLIAQSQSGTGKTAAFVLAMLSQVEPANKYPQCLCLSPTYELALQTGKVIEQMGKFYPELKLAYAVRGNKLERGQKISEQIVIGTPGTVLDWCSKLKFIDPKKIKVFVLDEADV

SEQ ID NO: 20567 - protein, 61 aa, Artificial Sequence
  Synthetic polypeptide
SQLLRILKQWNLLNLGGRGCSELRSHHCTPGWVLLSRPMPMQRRQMKKRKRTELPSPYSTS

SEQ ID NO: 20568 - protein, 22 aa, Artificial Sequence
  Synthetic polypeptide
DRTTALQAGCCCQDQCQCREDR

SEQ ID NO: 20569 - protein, 454 aa, Artificial Sequence
  Synthetic polypeptide
AEIAPLHSRLGAVVKTNANAEKTDEEEKEDRAAQSLLNKLIRSNLVDNTNQVEVLQRDPNSPLYSVKSFEELRLKPQLLQGVYAMGFNRPSKIQENALPLMLAEPPQNLIAQSQSGTGKTAAFVLAMLSQVEPANKYPQCLCLSPTYELALQTGKVIEQMGKFYPELKLAYAVRGNKLERGQKISEQIVIGTPGTVLDWCSKLKFIDPKKIKVFVLDEADVMIATQGHQDQSIRIQRMLPRNCQMLLFSATFEDSVWKFAQKVVPDPNVIKLKREEETLDTIKQYYVLCSSRDEKFQALCNLYGAITIAQAMIFCHTRKTASWLAAELSKEGHQVALLSGEMMVEQRAAVIERFREGKEKVLVTTNVCARGIDVEQVSVVINFDLPVDKDGNPDNETYLHRIGRTGRFGKRGLAVNMVDSKHSMNILNRIQEHFNKKIERLDTDDLDEIEKIAN

SEQ ID NO: 20570 - protein, 423 aa, Artificial Sequence
  Synthetic polypeptide
AEIAPLHSRLGAVVKTNANAEKTDEEEKEDRAAQSLLNKLIRSNLVDNTNQVEVLQRDPNSPLYSVKSFEELRLPQNLIAQSQSGTGKTAAFVLAMLSQVEPANKYPQCLCLSPTYELALQTGKVIEQMGKFYPELKLAYAVRGNKLERGQKISEQIVIGTPGTVLDWCSKLKFIDPKKIKVFVLDEADVMIATQGHQDQSIRIQRMLPRNCQMLLFSATFEDSVWKFAQKVVPDPNVIKLKREEETLDTIKQYYVLCSSRDEKFQALCNLYGAITIAQAMIFCHTRKTASWLAAELSKEGHQVALLSGEMMVEQRAAVIERFREGKEKVLVTTNVCARGIDVEQVSVVINFDLPVDKDGNPDNETYLHRIGRTGRFGKRGLAVNMVDSKHSMNILNRIQEHFNKKIERLDTDDLDEIEKIAN

SEQ ID NO: 20571 - protein, 40 aa, Artificial Sequence
  Synthetic polypeptide
AEIAPLHSRLGAVVKTNANAEKTDEEEKEDRAAQSLLNKL

SEQ ID NO: 20572 - protein, 236 aa, Artificial Sequence
  Synthetic polypeptide
AEIAPLHSRLGAVVKTNANAEKTDEEEKEDRAAQSLLNKLIRSNLVDNTNQVEVLQRDPNSPLYSVKSFEELRLKPQLLQGVYAMGFNRPSKIQENALPLMLAEPPQNLIAQSQSGTGKTAAFVLAMLSQVEPANKYPQCLCLSPTYELALQTGKVIEQMGKFYPELKLAYAVRGNKLERGQKISEQIVIGTPGTVLDWCSKLKFIDPKKIKVFVLDEADVMIATQGHQDQSIRIQ

SEQ ID NO: 20573 - protein, 413 aa, Artificial Sequence
  Synthetic polypeptide
GRARWLTPVIPALWEAEAGGSQEHQKCLDKLLNNCLLSCTMQELIGLYVTMEEYFMRETVNKAVALDTYEKGQLTSSMVDDVFYIVKKCIGRALSSSSIDCLCAMINLATTELESDFRDVLCNKLRMGFPATTFQDIQRGVTSAVNIMHSSLQQGKFDTKGIESTDEAKMSFLVTLNNVEVCSENISTLKKTLESDCTKLFSQGIGGEQAQAKFDSCLSDLAAVSNKFRDLLQEGLTELNSTAIKPQVQPWINSFFSVSHNIEEEEFNDYEANDPWVQQFILNLEQQMAEFKASLSPVIYDSLTGLMTSLVAVELEKVVLKSTFNRLGGLQFDKELRSLIAYLTTVTTWTIRDKFARLSQMATILNLERVTEILDYWGPNSGPLTWRLTPAEVRQVLALRIDFRSEDIKRLRL

SEQ ID NO: 20574 - protein, 27 aa, Artificial Sequence
  Synthetic polypeptide
SQHFGRPRQADHKSTRSVWTNSSITAF

SEQ ID NO: 20575 - protein, 32 aa, Artificial Sequence
  Synthetic polypeptide
SGAVAHACNPSTLGGRGRRITRAPEVSGQTPQ

SEQ ID NO: 20576 - protein, 8 aa, Artificial Sequence
  Synthetic polypeptide
HSILHMGA

SEQ ID NO: 20577 - protein, 56 aa, Artificial Sequence
  Synthetic polypeptide
LWHLSYDTSCTVFHHLDLCTNYLFYLILTSVMVGSGLIHLVIMHITSTASCTWEHD

SEQ ID NO: 20578 - protein, 619 aa, Artificial Sequence
  Synthetic polypeptide
SCILLAQHLAHGSMIDANLKLLQEAEQRLKAIVAEKFAIATKEGDLPQVERFFKIFPLLGLHEEGLRKFSEYLCKQVASKAEENLLMVLGTDMSDRRAAVIFADTLTLLFEGIARIVETHQPIVETYYGPGRLYTLIKYLQVECDRQVEKVVDKFIKQRDYHQQFRHVQNNLMRNSTTEKIEPRELDPILTEVTLMNARSELYLRFLKKRISSDFEVGDSMASEEVKQEHQKCLDKLLNNCLLSCTMQELIGLYVTMEEYFMRETVNKAVALDTYEKGQLTSSMVDDVFYIVKKCIGRALSSSSIDCLCAMINLATTELESDFRDVLCNKLRMGFPATTFQDIQRGVTSAVNIMHSSLQQGKFDTKGIESTDEAKMSFLVTLNNVEVCSENISTLKKTLESDCTKLFSQGIGGEQAQAKFDSCLSDLAAVSNKFRDLLQEGLTELNSTAIKPQVQPWINSFFSVSHNIEEEEFNDYEANDPWVQQFILNLEQQMAEFKASLSPVIYDSLTGLMTSLVAVELEKVVLKSTFNRLGGLQFDKELRSLIAYLTTVTTWTIRDKFARLSQMATILNLERVTEILDYWGPNSGPLTWRLTPAEVRQVLALRIDFRSEDIKRLRL

SEQ ID NO: 20579 - protein, 171 aa, Artificial Sequence
  Synthetic polypeptide
SCILLAQHLAHGSMIDANLKLLQEAEQRLKAIVAEKFAIATKEGDLPQVERFFKIFPLLGLHEEGLRKFSEYLCKQVASKAEENLLMVLGTDMSDRRAAVIFADTLTLLFEGIARIVETHQPIVETYYGPGRLYTLIKYLQVECDRQVEKVVDKFIKQRDYHQQNFVFSFF

SEQ ID NO: 20580 - protein, 64 aa, Artificial Sequence
  Synthetic polypeptide
SCILLAQHLAHGSMIDANLKLLQEAEQRLKAIVAEKFAIATKEGDLPQVERFFKIFPLLGLHEE

SEQ ID NO: 20581 - protein, 624 aa, Artificial Sequence
  Synthetic polypeptide
RSLSSADRAKRVSIRNWSMIDANLKLLQEAEQRLKAIVAEKFAIATKEGDLPQVERFFKIFPLLGLHEEGLRKFSEYLCKQVASKAEENLLMVLGTDMSDRRAAVIFADTLTLLFEGIARIVETHQPIVETYYGPGRLYTLIKYLQVECDRQVEKVVDKFIKQRDYHQQFRHVQNNLMRNSTTEKIEPRELDPILTEVTLMNARSELYLRFLKKRISSDFEVGDSMASEEVKQEHQKCLDKLLNNCLLSCTMQELIGLYVTMEEYFMRETVNKAVALDTYEKGQLTSSMVDDVFYIVKKCIGRALSSSSIDCLCAMINLATTELESDFRDVLCNKLRMGFPATTFQDIQRGVTSAVNIMHSSLQQGKFDTKGIESTDEAKMSFLVTLNNVEVCSENISTLKKTLESDCTKLFSQGIGGEQAQAKFDSCLSDLAAVSNKFRDLLQEGLTELNSTAIKPQVQPWINSFFSVSHNIEEEEFNDYEANDPWVQQFILNLEQQMAEFKASLSPVIYDSLTGLMTSLVAVELEKVVLKSTFNRLGGLQFDKELRSLIAYLTTVTTWTIRDKFARLSQMATILNLERVTEILDYWGPNSGPLTWRLTPAEVRQVLALRIDFRSEDIKRLRL

SEQ ID NO: 20582 - protein, 15 aa, Artificial Sequence
  Synthetic polypeptide
AQPTGQRGSASETGA

SEQ ID NO: 20583 - protein, 19 aa, Artificial Sequence
  Synthetic polypeptide
VIELSRQGKEGQHPKLEHD

SEQ ID NO: 20584 - protein, 176 aa, Artificial Sequence
  Synthetic polypeptide
RSLSSADRAKRVSIRNWSMIDANLKLLQEAEQRLKAIVAEKFAIATKEGDLPQVERFFKIFPLLGLHEEGLRKFSEYLCKQVASKAEENLLMVLGTDMSDRRAAVIFADTLTLLFEGIARIVETHQPIVETYYGPGRLYTLIKYLQVECDRQVEKVVDKFIKQRDYHQQNFVFSFF

SEQ ID NO: 20585 - protein, 69 aa, Artificial Sequence
  Synthetic polypeptide
RSLSSADRAKRVSIRNWSMIDANLKLLQEAEQRLKAIVAEKFAIATKEGDLPQVERFFKIFPLLGLHEE

SEQ ID NO: 20586 - protein, 79 aa, Artificial Sequence
  Synthetic polypeptide
STREAEKVVERELDALLEQQNTIESKMVTLHRMGPNLQLIEGDAKQLAGMITFTCNLAENVSSKVRQLDLAKKHSTNLE

SEQ ID NO: 20587 - protein, 51 aa, Artificial Sequence
  Synthetic polypeptide
SRAWWHAPVIPASLLGRLRKWWRESWMLFWNSKTPLKVRWSLSTEWVLICS

SEQ ID NO: 20588 - protein, 738 aa, Artificial Sequence
  Synthetic polypeptide
STREAEKVVERELDALLEQQNTIESKMVTLHRMGPNLQLIEGDAKQLAGMITFTCNLAENVSSKVRQLDLAKNRLYQAIQRADDILDLKFCMDGVQTALRSEDYEQAAAHTHRYLCLDKSVIELSRQGKEGSMIDANLKLLQEAEQRLKAIVAEKFAIATKEGDLPQVERFFKIFPLLGLHEEGLRKFSEYLCKQVASKAEENLLMVLGTDMSDRRAAVIFADTLTLLFEGIARIVETHQPIVETYYGPGRLYTLIKYLQVECDRQVEKVVDKFIKQRDYHQQFRHVQNNLMRNSTTEKIEPRELDPILTEVTLMNARSELYLRFLKKRISSDFEVGDSMASEEVKQEHQKCLDKLLNNCLLSCTMQELIGLYVTMEEYFMRETVNKAVALDTYEKGQLTSSMVDDVFYIVKKCIGRALSSSSIDCLCAMINLATTELESDFRDVLCNKLRMGFPATTFQDIQRGVTSAVNIMHSSLQQGKFDTKGIESTDEAKMSFLVTLNNVEVCSENISTLKKTLESDCTKLFSQGIGGEQAQAKFDSCLSDLAAVSNKFRDLLQEGLTELNSTAIKPQVQPWINSFFSVSHNIEEEEFNDYEANDPWVQQFILNLEQQMAEFKASLSPVIYDSLTGLMTSLVAVELEKVVLKSTFNRLGGLQFDKELRSLIAYLTTVTTWTIRDKFARLSQMATILNLERVTEILDYWGPNSGPLTWRLTPAEVRQVLALRIDFRSEDIKRLRL

SEQ ID NO: 20589 - protein, 290 aa, Artificial Sequence
  Synthetic polypeptide
STREAEKVVERELDALLEQQNTIESKMVTLHRMGPNLQLIEGDAKQLAGMITFTCNLAENVSSKVRQLDLAKNRLYQAIQRADDILDLKFCMDGVQTALRSEDYEQAAAHTHRYLCLDKSVIELSRQGKEGSMIDANLKLLQEAEQRLKAIVAEKFAIATKEGDLPQVERFFKIFPLLGLHEEGLRKFSEYLCKQVASKAEENLLMVLGTDMSDRRAAVIFADTLTLLFEGIARIVETHQPIVETYYGPGRLYTLIKYLQVECDRQVEKVVDKFIKQRDYHQQNFVFSFF

SEQ ID NO: 20590 - protein, 142 aa, Artificial Sequence
  Synthetic polypeptide
STREAEKVVERELDALLEQQNTIESKMVTLHRMGPNLQLIEGDAKQLAGMITFTCNLAENVSSKVRQLDLAKNRLYQAIQRADDILDLKFCMDGVQTALRSEDYEQAAAHTHRYLCLDKSVICPRWSASSRSSHCWVCMRRD

SEQ ID NO: 20591 - protein, 49 aa, Artificial Sequence
  Synthetic polypeptide
STREAEKVVERELDALLEQQNTIESKMVTLHRMGTASIRPFRELMTSWT

SEQ ID NO: 20592 - protein, 56 aa, Artificial Sequence
  Synthetic polypeptide
SRAWWHAPVIPASLLGRLRKWWRESWMLFWNSKTPLKVRWSLSTEWEPPLSGHSES

SEQ ID NO: 20593 - protein, 29 aa, Artificial Sequence
  Synthetic polypeptide
STREAEKVVERELDALLEQQNTIEILICS

SEQ ID NO: 20594 - protein, 38 aa, Artificial Sequence
  Synthetic polypeptide
SRAWWHAPVIPASLLGRLRKWWRESWMLFWNSKTPLKS

SEQ ID NO: 20595 - protein, 38 aa, Artificial Sequence
  Synthetic polypeptide
FLAIPSPLAPFPTLELAPKPSFLECATWFCVHEWLMLG

SEQ ID NO: 20596 - protein, 5 aa, Artificial Sequence
  Synthetic polypeptide
MAYAR

SEQ ID NO: 20597 - protein, 58 aa, Artificial Sequence
  Synthetic polypeptide
FLAIPSPLAPFPTLELAPKPSFLECATWFCVHEWLMLGDPEGPGGAGRNRFLPRRPDG

SEQ ID NO: 20598 - protein, 48 aa, Artificial Sequence
  Synthetic polypeptide
MQCEILEQKARNGKTRDVQIREVQMVPVTPASVAASVSSLQPALKEPQ

SEQ ID NO: 20599 - protein, 69 aa, Artificial Sequence
  Synthetic polypeptide
DQPKRGDILQSDQRFKSVKFMKDTQIEGLQQIGGDKEDSLAKCSVRSWNKRPGMEKLVMFKLGRSRWFL

SEQ ID NO: 20600 - protein, 335 aa, Artificial Sequence
  Synthetic polypeptide
NSVSTKDTNIRQVTEDEVLDILESVLISNMSTSVTRGYALTAIMKLSTRFTCTVNRIKKVVSIYGSSIDVELQQRAVEYNALFKKYDHMRSALLERMPVMEKVTTNGPTEIVQTNGETEPAPLETKPPPSGPQPTSQANDLLDLLGGNDITPVIPTAPTSKPSSAGGELLDLLGDINLTGAPAAAPAPASVPQISQPPFLLDGLSSQPLFNDIAAGIPSITAYSKNGLKIEFTFERSNTNPSVTVITIQASNSTELDMTDFVFQAAVPKTFQLQLLSPSSSIVPAFNTGTITQVIKVLNPQKQQLRMRIKLTYNHKGSAMQDLAEVNNFPPQSWQ

SEQ ID NO: 20601 - protein, 20 aa, Artificial Sequence
  Synthetic polypeptide
DQPGQHGETLSLQKTQILDR

SEQ ID NO: 20602 - protein, 5 aa, Artificial Sequence
  Synthetic polypeptide
TGNRG

SEQ ID NO: 20603 - protein, 51 aa, Artificial Sequence
  Synthetic polypeptide
RSIPAAEVIGELAEAFVVTVLQPNFSFHLTLPFLPPQVLIPEALQQKLLLG

SEQ ID NO: 20604 - protein, 17 aa, Artificial Sequence
  Synthetic polypeptide
SQKHSSRSSSWGRDRSY

SEQ ID NO: 20605 - protein, 213 aa, Artificial Sequence
  Synthetic polypeptide
GLCCDCVAAQLLLPPNSAFSSPTGVDPRSTPAEAPPGVETDLIDVGFTDDVKKGGPGRGGSGGFTAPVGGPDGTVPMPMPMPMPMPSANTPFSYPLPKGPSDFNGLPMGTYQAFPNIHPPQIPATPPSYESVDDINADKNISSAQIVGPGPKPEASAKLPSRPADNYDNFVLPELPSVPDTLPTASAGASTSASEDIDFDDLSRRFEELKKKT

SEQ ID NO: 20606 - protein, 100 aa, Artificial Sequence
  Synthetic polypeptide
GLCCDCVAAQLLLPPNSAFSSPTGVDPRSTPAEAPPGVETDLIDVGFTDDVKKGGPGRGGSGGFTAPVGGPDGTVPMPMPMPMPMPSANTPFSYPLPKGP

SEQ ID NO: 20607 - protein, 207 aa, Artificial Sequence
  Synthetic polypeptide
GLCCDCVAAQLLLPPNSAFSSPTGVDPRSTPAEAPPGVETDLIDVGFTDDVKKGGPGRGGSGGFTAPVGGPDGTVPMPMPMPMPMPSANTPFSYPLPKGPSDFNGLPMGTYQAFPNIHPPQIPATPPSYESMTLMLIRISLLHRLLVLDPSQKPLQSFLPDLQITMTTLSYQSCHLCQTHYQLHLLVPAPQHLKTLTLMIFPGGLKS

SEQ ID NO: 20608 - protein, 53 aa, Artificial Sequence
  Synthetic polypeptide
GLCCDCVAAQLLLPPNSAFSSPTGVDPRSTPAEAPPGVETDLIDVGFTDDVKK

SEQ ID NO: 20609 - protein, 182 aa, Artificial Sequence
  Synthetic polypeptide
GLCCDCVAAQLLLPPNSAFSSPTGVDPRSTPAEAPPGVETDLIDVGFTDDVKKGGPGRGGSGGFTAPVGGPDGTVPMPMPMPMPMPSANTPFSYPLPKGPVDDINADKNISSAQIVGPGPKPEASAKLPSRPADNYDNFVLPELPSVPDTLPTASAGASTSASEDIDFDDLSRRFEELKKKT

SEQ ID NO: 20610 - protein, 43 aa, Artificial Sequence
  Synthetic polypeptide
GLCCDCVAAQLLLPPNSAFSSPTGVDPRSTPAEAPPGVETDLI

SEQ ID NO: 20611 - protein, 198 aa, Artificial Sequence
  Synthetic polypeptide
GLCCDCVAAQLLLPPNSAFSSPTGVDPRSTPAEAPPGVETDLIDVGFTDDVKKGGPGRGGSGGFTAPVGGPDGTVPMPMPMPMPMPSANTPFSYPLPKGPSDFNGLPMGTYQAFPNIHPPQIPATPPSYESVSPGPKPEASAKLPSRPADNYDNFVLPELPSVPDTLPTASAGASTSASEDIDFDDLSRRFEELKKKT

SEQ ID NO: 20612 - protein, 58 aa, Artificial Sequence
  Synthetic polypeptide
THLISPDHTKFVGSFKTKQDFIDLIEVIYRGAMRGKLIVQSPIDPKNIPKYDLLYQDI

SEQ ID NO: 20613 - protein, 8 aa, Artificial Sequence
  Synthetic polypeptide
TFDISRSH

SEQ ID NO: 20614 - protein, 36 aa, Artificial Sequence
  Synthetic polypeptide
LKPVIPALWEAEAGGSLEPKSLRPAWATWRGRETEK

SEQ ID NO: 20615 - protein, 26 aa, Artificial Sequence
  Synthetic polypeptide
DQPGQHGGGERQRSEQPEQQAVKPAT

SEQ ID NO: 20616 - protein, 1029 aa, Artificial Sequence
  Synthetic polypeptide
AQEFKTSLGNMAGERDREVSSLNSKLLSLQLDIKNLHDVCKRQRKTLQDNQLCMEEAMNSSHDKKQAQALAFEESEVEFGSSKQCHLRQLQQLKKKLLVLQQELEFHTEELQTSYYSLRQYQSILEKQTSDLVLLHHHCKLKEDEVILYEEEMGNHNENTGEKLHLAQEQLALAGDKIASLERSLNLYRDKYQSSLSNIELLECQVKMLQGELGGIMGQEPENKGDHSKVRIYTSPCMIQEHQETQKRLSEVWQKVSQQDDLIQELRNKLACSNALVLEREKALIKLQADFASCTATHRYPPSSSEECEDIKKILKHLQEQKDSQCLHVEEYQNLVKDLRVELEAVSEQKRNIMKDMMKLELDLHGLREETSAHIERKDKDITILQCRLQELQLEFTETQKLTLKKDKFLQEKDEMLQELEKKLTQVQNSLLKKEKELEKQQCMATELEMTVKEAKQDKSKEAECKALQAEVQKLKNSLEEAKQQERLAGEAPAAQQAAQCKEEAALAGCHLEDTQRKLQKGLLLDKQKADTIQELQRELQMLQKESSMAEKEQTSNRKRVEELSLELSEALRKLENSDKEKRQLQKTVAEQDMKMNDMLDRIKHQHREQGSIKCKLEEDLQEATKLLEDKREQLKKSKEHEKLMEGELEALRQEFKKKDKTLKENSRKLEEENENLRAELQCCSTQLESSLNKYNTSQQVIQDLNKEIALQKESLMSLQAQLDKALQKEKHYLQTTITKEAYDALSRKSAACQDDLTQALEKLNHVTSETKSLQQSLTQTQEKKAQLEEEIIAYEERMKKLNTELRKLRGFHQESELEVHAFDKKLEEMSCQVLQWQKQHQNDLKMLAAKEEQLREFQEEMAALKENLLEDDKEPCCLPQWSVPKDTCRLYRGNDQIMTNLEQWAKQQKVANEKLGNQLREQVKYIAKLSGEKDHLHSVMVHLQQENKKLKKEIEEKKMKAENTRLCTKALGPSRTESTQREKVCGTLGWKGLPQDMGQRMDLTKYIGMPHCPGTSAICQKNKCDFFL

SEQ ID NO: 20617 - protein, 1014 aa, Artificial Sequence
  Synthetic polypeptide
AQEFKTSLGNMAGERDREVSSLNSKLLSLQLDIKNLHDVCKRQRKTLQDNQLCMEEAMNSSHDKKQAQALAFEESEVEFGSSKQCHLRQLQQLKKKLLVLQQELEFHTEELQTSYYSLRQYQSILEKQTSDLVLLHHHCKLKEDEVILYEEEMGNHNENTGEKLHLAQEQLALAGDKIASLERSLNLYRDKYQSSLSNIELLECQVKMLQGELGGIMGQEPENKGDHSKVRIYTSPCMIQEHQETQKRLSEVWQKVSQQDDLIQELRNKLACSNALVLEREKALIKLQADFASCTATHRYPPSSSEECEDIKKILKHLQEQKDSQCLHVEEYQNLVKDLRVELEAVSEQKRNIMKDMMKLELDLHGLREETSAHIERKDKDITILQCRLQELQLEFTETQKLTLKKDKFLQEKDEMLQELEKKLTQVQNSLLKKEKELEKQQCMATELEMTVKEAKQDKSKEAECKALQAEVQKLKNSLEEAKQQERLAAQQAAQCKEEAALAGCHLEDTQRKLQKGLLLDKQKADTIQELQRELQMLQKESSMAEKEQTSNRKRVEELSLELSEALRKLENSDKEKRQLQKTVAEQDMKMNDMLDRIKHQHREQGSIKCKLEEDLQEATKLLEDKREQLKKSKEHEKLMEGELEALRQEFKKKDKTLKENSRKLEEENENLRAELQCCSTQLESSLNKYNTSQQVIQDLNKEIALQKESLMSLQAQLDKALQKEKHYLQTTITKEAYDALSRKSAACQDDLTQALEKLNHVTSETKSLQQSLTQTQEKKAQLEEEIIAYEERMKKLNTELRKLRGFHQESELEVHAFDKKLEEMSCQVLQWQKQHQNDLKMLAAKEEQLREFQEEMAALKENLLEDDKEPCCLPQWSVPKDTCRLYRGNDQIMTNLEQWAKQQKVANEKLGNQLREQVKYIAKLSGEKDHLHSVMVHLQQENKKLKKEIEEKKMKAENTRLCTKALGPSRTESTQREKVCGTLGWKGLPQDMGQRMDLTKYIGMPHCPGSSYC

SEQ ID NO: 20618 - protein, 108 aa, Artificial Sequence
  Synthetic polypeptide
AQEFKTSLGNMAGERDREVSSLNSKLLSLQLDIKNLHDVCKRQRKTLQDNQLCMEEAMNSSHLIALKISDHSDTRGAASAMDLRQTSKSTMKIKTITPALRTRSKHRH

SEQ ID NO: 20619 - protein, 163 aa, Artificial Sequence
  Synthetic polypeptide
AQEFKTSLGNMAGERDREVSSLNSKLLSLQLDIKNLHDVCKRQRKTLQDNQLCMEEAMNSSHDKKQAQALAFEESEVEFGSSKQCHLRQLQQLKKKLLVLQQELEFHTEELQTSYYSLRQYQSILEKQTSDLVLLHHHCKLKEDEVILYEEEMGNHNENTGEK

SEQ ID NO: 20620 - protein, 117 aa, Artificial Sequence
  Synthetic polypeptide
AQEFKTSLGNMAGERDREVSSLNSKLLSLQLDIKNLHDVCKRQRKTLQDNQLCMEEAMNSSHDKKQAQALAFEESEVEFGSSKQCHLRQLQQLKKKLLVLQQELEFHTEELQTSYYS

SEQ ID NO: 20621 - protein, 75 aa, Artificial Sequence
  Synthetic polypeptide
AQEFKTSLGNMAGERDREVSSLNSKLLSLQLDIKNLHDVCKRQRKTLQDNQLCMEEAMNSSHDKKQAQALAFEES

SEQ ID NO: 20622 - protein, 54 aa, Artificial Sequence
  Synthetic polypeptide
AQEFKTSLGNMAGERDREVSSLNSKLLSLQLDIKNLHDVCKRQRKTLQDNQLCM

SEQ ID NO: 20623 - protein, 20 aa, Artificial Sequence
  Synthetic polypeptide
QTMGCEPNLDHCLFLYNLRG

SEQ ID NO: 20624 - protein, 275 aa, Artificial Sequence
  Synthetic polypeptide
RVSKPWAVSPTWTIACFCIIFEGNQEAAAAPDTMAQPYASAQFAPPQNGIPAEYTAPHPHPAPEYTGQTTVPEHTLNLYPPAQTHSEQSPADTSAQTVSGTATTDDAAPTDGQPQTQPSENTENKSQPKRLHVSNIPFRFRDPDLRQMFGQFGKILDVEIIFNERGSKGFGFVTFENSADADRAREKLHGTVVEGRKIEVNNATARVMTNKKTVNPYTNGWKLNPVVGAVYSPEFYAGTVLLCQANQEGSSMYSAPSSLVYTSAMPGFPYPAATA

SEQ ID NO: 20625 - protein, 56 aa, Artificial Sequence
  Synthetic polypeptide
SSRVIRKQPLPLTQWLSLTLRPSLLPRRTVSPRNTRPLIPTPRQSTQARPRFPSTH

SEQ ID NO: 20626 - protein, 410 aa, Artificial Sequence
  Synthetic polypeptide
RVSKPWAVSPTWTIACFCIIFEGNQEAAAAPDTMAQPYASAQFAPPQNGIPAEYTAPHPHPAPEYTGQTTVPEHTLNLYPPAQTHSEQSPADTSAQTVSGTATQTDDAAPTDGQPQTQPSENTENKSQPKRLHVSNIPFRFRDPDLRQMFGQFGKILDVEIIFNERGSKGFGFVTFENSADADRAREKLHGTVVEGRKIEVNNATARVMTNKKTVNPYTNGWKLNPVVGAVYSPEFYAGTVLLCQANQEGSSMYSAPSSLVYTSAMPGFPYPAATAAAAYRGAHLRGRGRTVYNTFRAAAPPPPIPAYGGVVYQDGFYGADIYGGYAAYRYAQPTPATAAAYSDSYGRVYAADPYHHALAPAPTYGVGAMNAFAPLTDAKTRSHADDVGLVLSSLQASIYRGGYNRFAPY

SEQ ID NO: 20627 - protein, 383 aa, Artificial Sequence
  Synthetic polypeptide
RVSKPWAVSPTWTIACFCIIFEGNQEAAAAPDTMAQPYASAQFAPPQNGIPAEYTAPHPHPAPEYTGQTTVPEHTLNLYPPAQTHSEQSPADTSAQTVSGTATQTDDAAPTDGQPQTQPSENTENKSQPKRLHVSNIPFRFRDPDLRQMFGQFGKILDVEIIFNERGSKGFGFVTFENSADADRAREKLHGTVVEGRKIEVNNATARVMTNKKTVNPYTNGWKLNPVVGAVYSPEFYAVPGFPYPAATAAAAYRGAHLRGRGRTVYNTFRAAAPPPPIPAYGGVVYQDGFYGADIYGGYAAYRYAQPTPATAAAYSDSYGRVYAADPYHHALAPAPTYGVGAMNAFAPLTDAKTRSHADDVGLVLSSLQASIYRGGYNRFAPY

SEQ ID NO: 20628 - protein, 436 aa, Artificial Sequence
  Synthetic polypeptide
RVSKPWAVSPTWTIACFCIIFEGNQEAAAAPDTMAQPYASAQFAPPQNGIPAEYTAPHPHPAPEYTGQTTVPEHTLNLYPPAQTHSEQSPADTSAQTVSGTATQTDDAAPTDGQPQTQPSENTENKSQPKRLHVSNIPFRFRDPDLRQMFGQFGKILDVEIIFNERGSKGFGFVTFENSADADRAREKLHGTVVEGRKIEVNNATARVMTNKKTVNPYTNGWKLNPVVGAVYSPEFYAGTVLLCQANQEGSSMYSAPSSLVYTSAMPGFPYPAATAAAAYRGAHLRGRGRTVYNTFRAAAPPPPIPAYGGVVYQDGFYGADIYGGYAAYRYAQPTPATAAAYSDRNQFVFVAADEISCNTSAVTDEFMLPTPTTTHLLQPPPTALVPCPKVPAPAQTSEELSCTLPGLCCQAAENLTASPPLLQFMFKVIVAQERK

SEQ ID NO: 20629 - protein, 395 aa, Artificial Sequence
  Synthetic polypeptide
RVSKPWAVSPTWTIACFCIIFEGNQEAAAAPDTMAQPYASAQFAPPQNGIPAEYTAPHPHPAPEYTGQTTVPEHTLNLYPPAQTHSEQSPADTSAQTVSGTATQTDDAAPTDGQPQTQPSENTENKSQPKRLHVSNIPFRFRDPDLRQMFGQFGKILDVEIIFNERGSKGFGFVTFENSADADRAREKLHGTVVEGRKIEVNNATARVMTNKKTVNPYTNGWKLNPVVGAVYSPEFYAGTVLLCQANQEGSSMYSAPSSLVYTSAMPGFPYPAATAAAAYRGAHLRGRGRTVYNTFRAAAPPPPIPAYGGVVYQDGFYGADIYGGYAAYRYAQPTPATAAAYSDSYGRVYAADPYHHALAPAPTYGVGAMPQGSSPSTDFRGAKLHTSRPLLSGS

SEQ ID NO: 20630 - protein, 357 aa, Artificial Sequence
  Synthetic polypeptide
RVSKPWAVSPTWTIACFCIIFEGNQEAAAAPDTMAQPYASAQFAPPQNGIPAEYTAPHPHPAPEYTGQTTVPEHTLNLYPPAQTHSEQSPADTSAQTVSGTATQFGKILDVEIIFNERGSKVNNATARVMTNKKTVNPYTNGWKLNPVVGAVYSPEFYAGTVLLCQANQEGSSMYSAPSSLVYTSAMPGFPYPAATAAAAYRGAHLRGRGRTVYNTFRAAAPPPPIPAYGGVVYQDGFYGADIYGGYAAYRYAQPTPATAAAYSDRNQFVFVAADEISCNTSAVTDEFMLPTPTTTHLLQPPPTALVPCPKVPAPAQTSEELSCTLPGLCCQAAENLTASPPLLQFMFKVIVAQERK

SEQ ID NO: 20631 - protein, 368 aa, Artificial Sequence
  Synthetic polypeptide
RVSKPWAVSPTWTIACFCIIFEGNQEAAAAPDTMAQPYASAQFAPPQNGIPAEYTAPHPHPAPEYTGQTTVPEHTLNLYPPAQTHSEQSPADTSAQTVSGTATTDDAAPTDGQPQTQPSENTENKSQPKRLHVSNIPFRFRDPDLRQMFGGFGFVTFENSADADRAREKLHGTVVEGRKIEVNNATARVMTNKKTVNPYTNGWKLNPVVGAVYSPEFYAGTVLLCQANQEGSSMYSAPSSLVYTSAMPGFPYPAATAAAAYRGAHLRGRGRTVYNTFRAAAPPPPIPAYGGVVYQDGFYGADIYGGYAAYRYAQPTPATAAAYSDRNQFVFVAADEISCNTSAVTDEFMLPTPTTTHLLQPPPTALVP

SEQ ID NO: 20632 - protein, 276 aa, Artificial Sequence
  Synthetic polypeptide
RVSKPWAVSPTWTIACFCIIFEGNQEAAAAPDTMAQPYASAQFAPPQNGIPAEYTAPHPHPAPEYTGQTTVPEHTLNLYPPAQTHSEQSPADTSAQTVSGTATQTDDAAPTDGQPQTQPSENTENKSQPKRLHVSNIPFRFRDPDLRQMFGQFGKILDVEIIFNERGSKGFGFVTFENSADADRAREKLHGTVVEGRKIEVNNATARVMTNKKTVNPYTNGWKLNPVVGAVYSPEFYAGTVLLCQANQEGSSMYSAPSSLVYTSAMPGFPYPAATA

SEQ ID NO: 20633 - protein, 385 aa, Artificial Sequence
  Synthetic polypeptide
RVSKPWAVSPTWTIACFCIIFEGNQEAAAAPDTMAQPYASAQFAPPQNGIPAEYTAPHPHPAPEYTGQTTVPEHTLNLYPPAQTHSEQSPADTSAQTVSGTATQTDDAAPTDGQPQTQPSENTENKSQPKRLHVSNIPFRFRDPDLRQMFGQFGKILDVEIIFNERGSKGFGFVTFENSADADRAREKLHGTVVEGRKIEVNNATARVMTNKKTVNPYTNGWKLNPVVGAVYSPEFYAGTVLLCQANQEGSSMYSAPSSLVYTSAMPGFPYPAATAAAAYRGAHLRGRGRTVYNTFRAAAPPPPIPAYGGVVYQEPVYGNKLLQGGYAAYRYAQPTPATAAAYSDSYGRVYAADPYHHALAPAPTYGVGAMASIYRGGYNRFAPY

SEQ ID NO: 20634 - protein, 411 aa, Artificial Sequence
  Synthetic polypeptide
RVSKPWAVSPTWTIACFCIIFEGNQEAAAAPDTMAQPYASAQFAPPQNGIPAEYTAPHPHPAPEYTGQTTVPEHTLNLYPPAQTHSEQSPADTSAQTVSGTATQTDDAAPTDGQPQTQPSENTENKSQPKRLHVSNIPFRFRDPDLRQMFGQFGKILDVEIIFNERGSKGFGFVTFENSADADRAREKLHGTVVEGRKIEVNNATARVMTNKKTVNPYTNGWKLNPVVGAVYSPEFYAGTVLLCQANQEGSSMYSAPSSLVYTSAMPGFPYPAATAAAAYRGAHLRGRGRTVYNTFRAAAPPPPIPAYGGVVYQEPVYGNKLLQGGYAAYRYAQPTPATAAAYSDSYGRVYAADPYHHALAPAPTYGVGAMNAFAPLTDAKTRSHADDVGLVLSSLQASIYRGGYNRFAPY

SEQ ID NO: 20635 - protein, 388 aa, Artificial Sequence
  Synthetic polypeptide
RVSKPWAVSPTWTIACFCIIFEGNQEAAAAPDTMAQPYASAQFAPPQNGIPAEYTAPHPHPAPEYTGQTTVPEHTLNLYPPAQTHSEQSPADTSAQTVSGTATQTDDAAPTDGQPQTQPSENTENKSQPKRLHVSNIPFRFRDPDLRQMFGQFGKILDVEIIFNERGSKGFGFVTFENSADADRAREKLHGTVVEGRKIEVNNATARVMTNKKTVNPYTNGWKLNPVVGAVYSPEFYAGTVLLCQANQEGSSMYSAPSSLVYTSAMPGFPYPAATAAAAYRGAHLRGRGRTVYNTFRAAAPPPPIPAYGGVVYQEPVYGNKLLQGGYAAYRYAQPTPATAAAYSDRNQFVFVAADEISCNTSAVTDEFMLPTPTTTHLLQPPPTALVP

SEQ ID NO: 20636 - protein, 200 aa, Artificial Sequence
  Synthetic polypeptide
RVSKPWAVSPTWTIACFCIIFEGNQEAAAAPDTMAQPYASAQFAPPQNGIPAEYTAPHPHPAPEYTGQTTVPEHTLNLYPPAQTHSEQSPADTSAQTVSGTATQTDDAAPTDGQPQTQPSENTENKSQPKRLHVSNIPFRFRDPDLRQMFGQFGKILDVEIIFNERGSKGFGFVTFENSADADRAREKLHGTVVEGRKIE

SEQ ID NO: 20637 - protein, 55 aa, Artificial Sequence
  Synthetic polypeptide
SQHFGRLRREDRLSPGVRSCRELRSCHCTPAWNRQGWKPEACCWCAFGVMAKEST

SEQ ID NO: 20638 - protein, 308 aa, Artificial Sequence
  Synthetic polypeptide
DHATALQPGIGKVGNQKRVVGVLLGSWQKKVLDVSNSFAVPFDEDDKDDSVWFLDHDYLENMYGMFKKVNARERIVGWYHTGPKLHKNDIAINELMKRYCPNSVLVIIDVKPKDLGLPTEAYISVEEVHDDGTPTSKTFEHVTSEIGAEEAEEVGVEHLLRDIKDTTVGTLSQRITNQVHGLKGLNSKLLDIRSYLEKVATGKLPINHQIIYQLQDVFNLLPDVSLQEFVKAFYLKTNDQMVVVYLASLIRSVVALHNLINNKIANRDAEKKEGQEKEESKKDRKEDKEKDKDKEKSDVKKEEKKEKK

SEQ ID NO: 20639 - protein, 55 aa, Artificial Sequence
  Synthetic polypeptide
AEIMPLHSSLESARLETRSVLLVCFWGHGKRKYLMYRTVLQFLLMKMTKTILYGF

SEQ ID NO: 20640 - protein, 182 aa, Artificial Sequence
  Synthetic polypeptide
DHATALQPGIGKVGNQKRVVGVLLGSWQKKVLDVSNSFAVPFDEDDKDDSVWFLDHDYLENMYGMFKKVNARERIVGWYHTGPKLHKNDIAINELMKRYCPNSVLVIIDVKPKDLGLPTEAYISVEEVHDDGTPTSKTFEHVTSEIGAEEAEEVGVEHLLRCRTSSTCCQMSACRSSSRPFT

SEQ ID NO: 20641 - protein, 161 aa, Artificial Sequence
  Synthetic polypeptide
DHATALQPGIGKVGNQKRVVGVLLGSWQKKVLDVSNSFAVPFDEDDKDDSVWFLDHDYLENMYGMFKKVNARERIVGWYHTGPKLHKNDIAINELMKRYCPNSVLVIIDVKPKDLGLPTEAYISVEEVHDDGTPTSKTFEHVTSEIGAEEAEEVGVEHLLR

SEQ ID NO: 20642 - protein, 27 aa, Artificial Sequence
  Synthetic polypeptide
AELRHCTPAWVTRGSVRKQILKPCCSA

SEQ ID NO: 20643 - protein, 9 aa, Artificial Sequence
  Synthetic polypeptide
HEVLSGSRF

SEQ ID NO: 20644 - protein, 335 aa, Artificial Sequence
  Synthetic polypeptide
TREAEVAVSRIAPLHSSLGDTRFCPEADSKTMLQCLKQNKNSELMDPKCKQMITKRQITQNTDYRLNPMLRKACKADIPKFCHGILTKAKDDSELEGQVISCLKLRYADQRLSSDCEDQIRIIIQESALDYRLDPQLQLHCSDEISSLCAEEAAAQEQTGQVEECLKVNLLKIKTELCKKEVLNMLKESKADIFVDPVLHTACALDIKHHCAAITPGRGRQMSCLMEALEDKRVRLQPECKKRLNDRIEMWSYAAKVAPADGFSDLAMQVMTSPSKNYILSVISGSICILFLIGLMCGRITKRVTRELKDRLQYRSETMAYKGLVWSQDVTGSPA

SEQ ID NO: 20645 - protein, 311 aa, Artificial Sequence
  Synthetic polypeptide
TREAEVAVSRIAPLHSSLGDTRFCPEADSKTMLQCLKQNKNSELMDPKCKQMITKRQITQNTDYRLNPMLRKACKADIPKFCHGILTKAKDDSELEGQVISCLKLRYADQRLSSDCEDQIRIIIQESALDYRLDPQLQLHCSDEISSLCAEEAAAQEQTGQVEECLKVNLLKIKTELCKKEVLNMLKESKADIFVDPVLHTACALDIKHHCAAITPGRGRQMSCLMEALEDKRVRLQPECKKRLNDRIEMWSYAAKVAPADGFSDLAMQVMTSPSKNYILSVISGSICILFLIGLMCGRITKRVTRELKDR

SEQ ID NO: 20646 - protein, 57 aa, Artificial Sequence
  Synthetic polypeptide
GRARWLTPVIPALWAAEAGGSPEVRSSRPARPTWTCKNLRHIKVRIYSNPGAPKHGS

SEQ ID NO: 20647 - protein, 82 aa, Artificial Sequence
  Synthetic polypeptide
SQHFGRPRRVDHLRSGVQDQPGQRGLAKTYVTSKSEFTATQGLPSMGPELLTLQPGPAQAQVPLPKDLHSISGRKLPDHGIL

SEQ ID NO: 20648 - protein, 387 aa, Artificial Sequence
  Synthetic polypeptide
GQEFKTSPANVDLQKLTSHQSQNLQQPRGSQAWVLSCSPSSQGQHKHKYHFQKTFTVSQAGNCRIMAYCDALSCLVISQPSPQASFLPGFGVKMLSTANMKSSQYIPMHGKQIRGLAFSSYLRGLLLSASLDNTIKLTSLETNTVVQTYNAGRPVWSCCWCLDEANYIYAGLANGSILVYDVRNTSSHVQELVAQKARCPLVSLSYMPRAASAAFPYGGVLAGTLEDASFWEQKMDFSHWPHVLPLEPGGCIDFQTENSSRHCLVTYRPDKNHTTIRSVLMEMSYRLDDTGNPICSCQPVHTFFGGPTCKLLTKNAIFQSPENDGNILVCTGDEAANSALLWDAASGSLLQDLQTDQPVLDICPFEVNRNSYLATLTEKMVHIYKWE

SEQ ID NO: 20649 - protein, 424 aa, Artificial Sequence
  Synthetic polypeptide
DYNGAENSVASLLKEQMLRKQAELESAQCRLQLQVLTDKCTRLQRRVQDLQKLTSHQSQNLQQPRGSQAWVLSCSPSSQGQHKHKYHFQKTFTVSQAGNCRIMAYCDALSCLVISQPSPQASFLPGFGVKMLSTANMKSSQYIPMHGKQIRGLAFSSYLRGLLLSASLDNTIKLTSLETNTVVQTYNAGRPVWSCCWCLDEANYIYAGLANGSILVYDVRNTSSHVQELVAQKARCPLVSLSYMPRAASAAFPYGGVLAGTLEDASFWEQKMDFSHWPHVLPLEPGGCIDFQTENSSRHCLVTYRPDKNHTTIRSVLMEMSYRLDDTGNPICSCQPVHTFFGGPTCKLLTKNAIFQSPENDGNILVCTGDEAANSALLWDAASGSLLQDLQTDQPVLDICPFEVNRNSYLATLTEKMVHIYKWE

SEQ ID NO: 20650 - protein, 34 aa, Artificial Sequence
  Synthetic polypeptide
SHVLHNDLWVNDRLHIRWWPHKIIMELKILLLPY

SEQ ID NO: 20651 - protein, 31 aa, Artificial Sequence
  Synthetic polypeptide
KFCCFPTEGTDAKETGRVRISTVPTPTAGPH

SEQ ID NO: 20652 - protein, 23 aa, Artificial Sequence
  Synthetic polypeptide
TTVLQLPTVFGTVTSYTAISPEV

SEQ ID NO: 20653 - protein, 514 aa, Artificial Sequence
  Synthetic polypeptide
HPIQPSPQKSEPLLPSASMDEEEGDTCTICLEQWTNAGDHRLSALRCGHLFGYRCISTWLKGQVRKCPQCNKKARHSDIVVLYARTLRALDTSEQERMKSSLLKEQMLRKQAELESAQCRLQLQVLTDKCTRLQRRVQDLQKLTSHQSQNLQQPRGSQAWVLSCSPSSQGQHKHKYHFQKTFTVSQAGNCRIMAYCDALSCLVISQPSPQASFLPGFGVKMLSTANMKSSQYIPMHGKQIRGLAFSSYLRGLLLSASLDNTIKLTSLETNTVVQTYNAGRPVWSCCWCLDEANYIYAGLANGSILVYDVRNTSSHVQELVAQKARCPLVSLSYMPRAASAAFPYGGVLAGTLEDASFWEQKMDFSHWPHVLPLEPGGCIDFQTENSSRHCLVTYRPDKNHTTIRSVLMEMSYRLDDTGNPICSCQPVHTFFGGPTCKLLTKNAIFQSPENDGNILVCTGDEAANSALLWDAASGSLLQDLQTDQPVLDICPFEVNRNSYLATLTEKMVHIYKWE

SEQ ID NO: 20654 - protein, 99 aa, Artificial Sequence
  Synthetic polypeptide
HCATVAYSIWYSNILYSHLPRSLSLCYLLLLWMRKKGTLVQYVWNSGPMLGTTGSQHYAVGISLGIGAFPRGLKDKYENVPSATRKPGTVTLSSFMPEP

SEQ ID NO: 20655 - protein, 20 aa, Artificial Sequence
  Synthetic polypeptide
SQHFGRPSDSASILHCHGVL

SEQ ID NO: 20656 - protein, 214 aa, Artificial Sequence
  Synthetic polypeptide
PGTVAHICNPSTLGGQVTPPQFSIVMEYCELGTLRELLDREKDLTLGKRMVLVLGAARGLYRLHHSEAPELHGKIRSSNFLVTQGYQVKLAGFELRKTQTSMSLGTTREKTDRVKSTAYLSPQELEDVFYQYDVKSEIYSFGIVLWEIATGDIPFQGCNSEKIRKLVAVKRQQEPLGEDCPSELREIIDECRAHDPSVRPSVDEILKKLSTFSK

SEQ ID NO: 20657 - protein, 94 aa, Artificial Sequence
  Synthetic polypeptide
PGTVAHICNPSTLGGQVTPPQFSIVMEYCELGTLRELLDREKDLTLGKRMVLVLGAARGLYRLHHSEAPELHGKIRSSNFLVTQGYQVKIWVPG

SEQ ID NO: 20658 - protein, 947 aa, Artificial Sequence
  Synthetic polypeptide
SQLPGRLSRRFLYIVNLDAPFEGHRKISRQSKWDIGAVQWNPHDSFAHYFAASSNQRVDLYKWKDGSGEVGTTLQGHTRVISDLDWAVFEPDLLVTSSVDTYIYIWDIKDTRKPTVALSAVAGASQVKWNKKNANCLATSHDGDVRIWDKRKPSTAVEYLAAHLSKIHGLDWHPDSEHILATSSQDNSVKFWDYRQPRKYLNILPCQVPVWKARYTPFSNGLVTVMVPQLRRENSLLLWNVFDLNTPVHTFVGHDDVVLEFQWRKQKEGSKDYQLVTWSRDQTLRMWRVDSQMQRLCANDILDGVDEFIESISLLPEPEKTLHTEDTDHQHTASHGEEEALKEDPPRNLLEERKSDQLGLPQTLQQEFSLINVQIRNVNVEMDAADRSCTVSVHCSNHRVKMLVKFPAQYPNNAAPSFQFINPTTITSTMKAKLLKILKDTALQKVKRGQSCLEPCLRQLVSCLESFVNQEDSASSNPFALPNSVTPPLPTFARVTTAYGSYQDANIPFPRTSGARFCGAGYLVYFTRPMTMHRAVSPTEPTPRSLSALSAYHTGLIAPMKIRTEAPGNLRLYSGSPTRSEKEQVSISSFYYKERKSRRWKSKREGSDSGNRQIKAAGKVIIQDIACLLPVHKSLGELYILNVNDIQETCQKNAASALLVGRKDLVQVWSLATVATDLCLGPKSDPDLETPWARHPFGRQLLESLLAHYCRLRDVQTLAMLCSVFEAQSRPQGLPNPFGPFPNRSSNLVVSHSRYPSFTSSGSCSSMSDPGLNTGGWNIAGREAEHLSSPWGESSPEELRFGSLTYSDPRERERDQHDKNKRLLDPANTQQFDDFKKCYGEILYRWGLREKRAEVLKFVSCPPDPHKGIEFGVYCSHCRSEVRGTQCAICKGFTFQCAICHVAVRGSSNFCLTCGHGGHTSHMMEWFRTQEVCPTGCGCHCLLESTF

SEQ ID NO: 20659 - protein, 48 aa, Artificial Sequence
  Synthetic polypeptide
WWVPVIPATRKAEPQILIHRQSRCPFRRSPKDLSPEQMGHWSCAVESS

SEQ ID NO: 20660 - protein, 150 aa, Artificial Sequence
  Synthetic polypeptide
SQLPGRLSRRFLYIVNLDAPFEGHRKISRQSKWDIGAVQWNPHDSFAHYFAASSNQRVDLYKWKDGSGEVGTTLQGHTRVISDLDWAVFEPDLLVTSSVDTYIYIWDIKDTRKPTVALSAVAGASQVKWNKKNANCLATSHDGDVRIWDK

SEQ ID NO: 20661 - protein, 999 aa, Artificial Sequence
  Synthetic polypeptide
KVGKGREQTPLKRRHLCSQHMKKSSSLLIIREMQIKTTMRDHLSPVRVAIIKKSRNNRCCRRFLYIVNLDAPFEGHRKISRQSKWDIGAVQWNPHDSFAHYFAASSNQRVDLYKWKDGSGEVGTTLQGHTRVISDLDWAVFEPDLLVTSSVDTYIYIWDIKDTRKPTVALSAVAGASQVKWNKKNANCLATSHDGDVRIWDKRKPSTAVEYLAAHLSKIHGLDWHPDSEHILATSSQDNSVKFWDYRQPRKYLNILPCQVPVWKARYTPFSNGLVTVMVPQLRRENSLLLWNVFDLNTPVHTFVGHDDVVLEFQWRKQKEGSKDYQLVTWSRDQTLRMWRVDSQMQRLCANDILDGVDEFIESISLLPEPEKTLHTEDTDHQHTASHGEEEALKEDPPRNLLEERKSDQLGLPQTLQQEFSLINVQIRNVNVEMDAADRSCTVSVHCSNHRVKMLVKFPAQYPNNAAPSFQFINPTTITSTMKAKLLKILKDTALQKVKRGQSCLEPCLRQLVSCLESFVNQEDSASSNPFALPNSVTPPLPTFARVTTAYGSYQDANIPFPRTSGARFCGAGYLVYFTRPMTMHRAVSPTEPTPRSLSALSAYHTGLIAPMKIRTEAPGNLRLYSGSPTRSEKEQVSISSFYYKERKSRRWKSKREGSDSGNRQIKAAGKVIIQDIACLLPVHKSLGELYILNVNDIQETCQKNAASALLVGRKDLVQVWSLATVATDLCLGPKSDPDLETPWARHPFGRQLLESLLAHYCRLRDVQTLAMLCSVFEAQSRPQGLPNPFGPFPNRSSNLVVSHSRYPSFTSSGSCSSMSDPGLNTGGWNIAGREAEHLSSPWGESSPEELRFGSLTYSDPRERERDQHDKNKRLLDPANTQQFDDFKKCYGEILYRWGLREKRAEVLKFVSCPPDPHKGIEFGVYCSHCRSEVRGTQCAICKGFTFQCAICHVAVRGSSNFCLTCGHGGHTSHMMEWFRTQEVCPTGCGCHCLLESTF

SEQ ID NO: 20662 - protein, 29 aa, Artificial Sequence
  Synthetic polypeptide
ETISRQSEWQLLKSQETTDAAADSYTSSI

SEQ ID NO: 20663 - protein, 43 aa, Artificial Sequence
  Synthetic polypeptide
KVKKQQMLPQILIHRQSRCPFRRSPKDLSPEQMGHWSCAVESS

SEQ ID NO: 20664 - protein, 202 aa, Artificial Sequence
  Synthetic polypeptide
KVGKGREQTPLKRRHLCSQHMKKSSSLLIIREMQIKTTMRDHLSPVRVAIIKKSRNNRCCRRFLYIVNLDAPFEGHRKISRQSKWDIGAVQWNPHDSFAHYFAASSNQRVDLYKWKDGSGEVGTTLQGHTRVISDLDWAVFEPDLLVTSSVDTYIYIWDIKDTRKPTVALSAVAGASQVKWNKKNANCLATSHDGDVRIWDK

SEQ ID NO: 20665 - protein, 959 aa, Artificial Sequence
  Synthetic polypeptide
ENKATAMSVDCLGQHAVLSGRRFLYIVNLDAPFEGHRKISRQSKWDIGAVQWNPHDSFAHYFAASSNQRVDLYKWKDGSGEVGTTLQGHTRVISDLDWAVFEPDLLVTSSVDTYIYIWDIKDTRKPTVALSAVAGASQVKWNKKNANCLATSHDGDVRIWDKRKPSTAVEYLAAHLSKIHGLDWHPDSEHILATSSQDNSVKFWDYRQPRKYLNILPCQVPVWKARYTPFSNGLVTVMVPQLRRENSLLLWNVFDLNTPVHTFVGHDDVVLEFQWRKQKEGSKDYQLVTWSRDQTLRMWRVDSQMQRLCANDILDGVDEFIESISLLPEPEKTLHTEDTDHQHTASHGEEEALKEDPPRNLLEERKSDQLGLPQTLQQEFSLINVQIRNVNVEMDAADRSCTVSVHCSNHRVKMLVKFPAQYPNNAAPSFQFINPTTITSTMKAKLLKILKDTALQKVKRGQSCLEPCLRQLVSCLESFVNQEDSASSNPFALPNSVTPPLPTFARVTTAYGSYQDANIPFPRTSGARFCGAGYLVYFTRPMTMHRAVSPTEPTPRSLSALSAYHTGLIAPMKIRTEAPGNLRLYSGSPTRSEKEQVSISSFYYKERKSRRWKSKREGSDSGNRQIKAAGKVIIQDIACLLPVHKSLGELYILNVNDIQETCQKNAASALLVGRKDLVQVWSLATVATDLCLGPKSDPDLETPWARHPFGRQLLESLLAHYCRLRDVQTLAMLCSVFEAQSRPQGLPNPFGPFPNRSSNLVVSHSRYPSFTSSGSCSSMSDPGLNTGGWNIAGREAEHLSSPWGESSPEELRFGSLTYSDPRERERDQHDKNKRLLDPANTQQFDDFKKCYGEILYRWGLREKRAEVLKFVSCPPDPHKGIEFGVYCSHCRSEVRGTQCAICKGFTFQCAICHVAVRGSSNFCLTCGHGGHTSHMMEWFRTQEVCPTGCGCHCLLESTF

SEQ ID NO: 20666 - protein, 38 aa, Artificial Sequence
  Synthetic polypeptide
LNLNSSCHSKRTKQLRCLWTVLGSMQCFLAADSYTSSI

SEQ ID NO: 20667 - protein, 63 aa, Artificial Sequence
  Synthetic polypeptide
TSTAVVTVREQSNCDVCGLSWAACSAFWPQILIHRQSRCPFRRSPKDLSPEQMGHWSCAVESS

SEQ ID NO: 20668 - protein, 20 aa, Artificial Sequence
  Synthetic polypeptide
ENKATAMSVDCLGQHAVLSG

SEQ ID NO: 20669 - protein, 30 aa, Artificial Sequence
  Synthetic polypeptide
LNLNSSCHSKRTKQLRCLWTVLGSMQCFLD

SEQ ID NO: 20670 - protein, 29 aa, Artificial Sequence
  Synthetic polypeptide
TSTAVVTVREQSNCDVCGLSWAACSAFWI

SEQ ID NO: 20671 - protein, 36 aa, Artificial Sequence
  Synthetic polypeptide
QIIKPQQQLSQQLRCLWTVLGSMQCFLAADSYTSSI

SEQ ID NO: 20672 - protein, 60 aa, Artificial Sequence
  Synthetic polypeptide
LNLNSSCHSNCDVCGLSWAACSAFWPQILIHRQSRCPFRRSPKDLSPEQMGHWSCAVESS

SEQ ID NO: 20673 - protein, 963 aa, Artificial Sequence
  Synthetic polypeptide
TSTAVVTATAMSVDCLGQHAVLSGRRFLYIVNLDAPFEGHRKISRQSKWDIGAVQWNPHDSFAHYFAASSNQRVDLYKWKDGSGEVGTTLQGHTRVISDLDWAVFEPDLLVTSSVDTYIYIWDIKDTRKPTVALSAVAGASQVKWNKKNANCLATSHDGDVRIWDKRKPSTAVEYLAAHLSKIHGLDWHPDSEHILATSSQDNSVKFWDYRQPRKYLNILPCQVPVWKARYTPFSNGLVTVMVPQLRRENSLLLWNVFDLNTPVHTFVGHDDVVLEFQWRKQKEGSKDYQLVTWSRDQTLRMWRVDSQMQRLCANDILDGVDEFIESISLLPEPEKTLHTEDTDHQHTASHGEEEALKEDPPRNLLEERKSDQLGLPQTLQQEFSLINVQIRNVNVEMDAADRSCTVSVHCSNHRVKMLVKFPAQYPNNAAPSFQFINPTTITSTMKAKLLKILKDTALQKVKRGQSCLEPCLRQLVSCLESFVNQEDSASSNPFALPNSVTPPLPTFARVTTAYGSYQDANIPFPRTSGARFCGAGYLVYFTRPMTMHRAVSPTEPTPRSLSALSAYHTGLIAPMKIRTEAPGNLRLYSGSPTRSEKEQVSISSFYYKERKSRRWKSKREGSDSGNRQIKAAGKVIIQDIACLLPVHKSLGELYILNVNDIQETCQKNAASALLVGRKDLVQVWSLATVATDLCLGPKSDPDLETPWARHPFGRQLLESLLAHYCRLRDVQTLAMLCSVFEAQSRPQGLPNPFGPFPNRSSNLVVSHSRYPSFTSSGSCSSMSDPGLNTGGWNIAGREAEHLSSPWGESSPEELRFGSLTYSDPRERERDQHDKNKRLLDPANTQQFDDFKKCYGEILYRWGLREKRAEVLKFVSCPPDPHKGIEFGVYCSHCRSEVRGTQCAICKGFTFQCAICHVAVRGSSNFCLTCGHGGHTSHMMEWFRTQEVCPTGCGCHCLLESTF

SEQ ID NO: 20674 - protein, 28 aa, Artificial Sequence
  Synthetic polypeptide
QIIKPQQQLSQQLRCLWTVLGSMQCFLD

SEQ ID NO: 20675 - protein, 26 aa, Artificial Sequence
  Synthetic polypeptide
LNLNSSCHSNCDVCGLSWAACSAFWI

SEQ ID NO: 20676 - protein, 24 aa, Artificial Sequence
  Synthetic polypeptide
TSTAVVTATAMSVDCLGQHAVLSG

SEQ ID NO: 20677 - protein, 46 aa, Artificial Sequence
  Synthetic polypeptide
GQAPWLMLIILAFWEAEAGRSPEKCGRLMTRWRETTETQTSRRGNF

SEQ ID NO: 20678 - protein, 16 aa, Artificial Sequence
  Synthetic polypeptide
HFGRLRRADHLRSVEG

SEQ ID NO: 20679 - protein, 19 aa, Artificial Sequence
  Synthetic polypeptide
EVISSQLPRSPERAGQSAL

SEQ ID NO: 20680 - protein, 875 aa, Artificial Sequence
  Synthetic polypeptide
SPASCLVHQNVLAKALYDNVAESPDELSFRKGDIMTVLEQDTQGLDGWWLCSLHGRQGIVPGNRLKILVGMYDKKPAGPGPGPPATPAQPQPGLHAPAPPASQYTPMLPNTYQPQPDSVYLVPTPSKAQQGLYQVPGPSPQFQSPPAKQTSTFSKQTPHHPFPSPATDLYQVPPGPGGPAQDIYQVPPSAGMGHDIYQVPPSMDTRSWEGTKPPAKVVVPTRVGQGYVYEAAQPEQDEYDIPRHLLAPGPQDIYDVPPVRGLLPSQYGQEVYDTPPMAVKGPNGRDPLLEVYDVPPSVEKGLPPSNHHAVYDVPPSVSKDVPDGPLLREETYDVPPAFAKAKPFDPARTPLVLAAPPPDSPPAEDVYDVPPPAPDLYDVPPGLRRPGPGTLYDVPRERVLPPEVADGGVVDSGVYAVPPPAEREAPAEGKRLSASSTGSTRSSQSASSLEVAGPGREPLELEVAVEALARLQQGVSATVAHLLDLAGSAGATGSWRSPSEPQEPLVQDLQAAVAAVQSAVHELLEFARSAVGNAAHTSDRALHAKLSRQLQKMEDVHQTLVAHGQALDAGRGGSGATLEDLDRLVACSRAVPEDAKQLASFLHGNASLLFRRTKATAPGPEGGGTLHPNPTDKTSSIQSRPLPSPPKFTSQDSPDGQYENSEGGWMEDYDYVHLQGKEEFEKTQKELLEKGSITRQGKSQLELQQLKQFERLEQEVSRPIDHDLANWTPAQPLAPGRTGGLGPSDRQLLLFYLEQCEANLTTLTNAVDAFFTAVATNQPPKIFVAHSKFVILSAHKLVFIGDTLSRQAKAADVRSQVTHYSNLLCDLLRGIVATTKAAALQYPSPSAAQDMVERVKELGHSTQQFRRVLGQLAAA

SEQ ID NO: 20681 - protein, 54 aa, Artificial Sequence
  Synthetic polypeptide
RTLFCRWALAQPVPPSVGSDLQPAASFTRTCWPKRSMTMWPSPRMSSPSARVTS

SEQ ID NO: 20682 - protein, 727 aa, Artificial Sequence
  Synthetic polypeptide
SPASCLVHQNVLAKALYDNVAESPDELSFRKGDIMTVLEQDTQGLDGWWLCSLHGRQGIVPGNRLKILVVVPTRVGQGYVYEAAQPEQDEYDIPRHLLAPGPQDIYDVPPVRGLLPSQYGQEVYDTPPMAVKGPNGRDPLLEVYDVPPSVEKGLPPSNHHAVYDVPPSVSKDVPDGPLLREETYDVPPAFAKAKPFDPARTPLVLAAPPPDSPPAEDVYDVPPPAPDLYDVPPGLRRPGPGTLYDVPRERVLPPEVADGGVVDSGVYAVPPPAEREAPAEGKRLSASSTGSTRSSQSASSLEVAGPGREPLELEVAVEALARLQQGVSATVAHLLDLAGSAGATGSWRSPSEPQEPLVQDLQAAVAAVQSAVHELLEFARSAVGNAAHTSDRALHAKLSRQLQKMEDVHQTLVAHGQALDAGRGGSGATLEDLDRLVACSRAVPEDAKQLASFLHGNASLLFRRTKATAPGPEGGGTLHPNPTDKTSSIQSRPLPSPPKFTSQDSPDGQYENSEGGWMEDYDYVHLQGKEEFEKTQKELLEKGSITRQGKSQLELQQLKQFERLEQEVSRPIDHDLANWTPAQPLAPGRTGGLGPSDRQLLLFYLEQCEANLTTLTNAVDAFFTAVATNQPPKIFVAHSKFVILSAHKLVFIGDTLSRQAKAADVRSQVTHYSNLLCDLLRGIVATTKAAALQYPSPSAAQDMVERVKELGHSTQQFRRVLGQLAAA

SEQ ID NO: 20683 - protein, 893 aa, Artificial Sequence
  Synthetic polypeptide
SPASCLVHQNVLAKALYDNVAESPDELSFRKGDIMTVLEQDTQGLDGWWLCSLHGRQGIVPGNRLKILVGMYDKKPAGPGPGPPATPAQPQPGLHAPAPPASQYTPMLPNTYQPQPDSVYLVPTPSKAQQGLYQVPGPSPQFQSPPAKQTSTFSKQTPHHPFPSPATDLYQVPPGPGGPAQDIYQVPPSAGMGHDIYQVPPSMDTRSWEGTKPPAKVVVPTRVGQGYVYEAAQPEQDEYDIPRHLLAPGPQDIYDVPPVRGLLPSQYGQEVYDTPPMAVKGPNGRDPLLEVYDVPPSVEKGLPPSNHHAVSKCQGNARARLRLWGVWVYDVPPSVSKDVPDGPLLREETYDVPPAFAKAKPFDPARTPLVLAAPPPDSPPAEDVYDVPPPAPDLYDVPPGLRRPGPGTLYDVPRERVLPPEVADGGVVDSGVYAVPPPAEREAPAEGKRLSASSTGSTRSSQSASSLEVAGPGREPLELEVAVEALARLQQGVSATVAHLLDLAGSAGATGSWRSPSEPQEPLVQDLQAAVAAVQSAVHELLEFARSAVGNAAHTSDRALHAKLSRQLQKMEDVHQTLVAHGQALDAGRGGSGATLEDLDRLVACSRAVPEDAKQLASFLHGNASLLFRRTKATAPGPEGGGTLHPNPTDKTSSIQSRPLPSPPKFTSQDSPDGQYENSEGGWMEDYDYVHLQGKEEFEKTQKELLEKGSITRQGKSQLELQQLKQFERLEQEVSRPIDHDLANWTPAQPLAPGRTGGLGPSDRQLLLFYLEQCEANLTTLTNAVDAFFTAVATNQPPKIFVAHSKFVILSAHKLVFIGDTLSRQAKAADVRSQVTHYSNLLCDLLRGIVATTKAAALQYPSPSAAQDMVERVKELGHSTQQFRRVLGQLAAA

SEQ ID NO: 20684 - protein, 107 aa, Artificial Sequence
  Synthetic polypeptide
RSPVTPATREAEAEELLEPRRRRLRLKRSSGMSSLLGKIGAKKQKMSTLEKSKLDWESFKEEEGIGEELAIHNRGKEGYIERKAFLDRVDHRQFEIERDLRLSKMKP

SEQ ID NO: 20685 - protein, 21 aa, Artificial Sequence
  Synthetic polypeptide
PQLLGRLRQKNCLNPGGGGCG

SEQ ID NO: 20686 - protein, 31 aa, Artificial Sequence
  Synthetic polypeptide
TPAAEVAVKKIKWHEQPFGENWCQEAENEHP

SEQ ID NO: 20687 - protein, 20 aa, Artificial Sequence
  Synthetic polypeptide
QEDCLNPGVCDQPGQYNVSF

SEQ ID NO: 20688 - protein, 15 aa, Artificial Sequence
  Synthetic polypeptide
TQEFVTSLGNTMCHL

SEQ ID NO: 20689 - protein, 9 aa, Artificial Sequence
  Synthetic polypeptide
PAWAIQCVI

SEQ ID NO: 20690 - protein, 107 aa, Artificial Sequence
  Synthetic polypeptide
AEAFKTSLGNTMWYGVFLWALVSSLFFHVPAGLLALFTLRHHKYGGEYSEDDVNELVKEDEVDGEEQTQKTQGKKRKAQSIPARKRRQGGLSLEEEEEEDANSESEG

SEQ ID NO: 20691 - protein, 61 aa, Artificial Sequence
  Synthetic polypeptide
EAKLGGLFEPRHSRPAWATRCGMVYSCGHWCLLSSFMSLLDYWPSSPSDITNMVESIVKMM

SEQ ID NO: 20692 - protein, 61 aa, Artificial Sequence
  Synthetic polypeptide
SLPFRRPSWADCLSRGIQDQPGQHDVVWCIPVGTGVFSLLSCPCWITGPLHPQTSQIWWRV

SEQ ID NO: 20693 - protein, 87 aa, Artificial Sequence
  Synthetic polypeptide
AEAFKTSLGNTMWYGVFLWALVSSLFFHVPAGLLALFTLRHHKYGAAIAGVYRAAGKEMIPFEALTLGTGQTFCVLVVSFLRILATL

SEQ ID NO: 20694 - protein, 67 aa, Artificial Sequence
  Synthetic polypeptide
EAKLGGLFEPRHSRPAWATRCGMVYSCGHWCLLSSFMSLLDYWPSSPSDITNMVQLLLEFTEQQGRK

SEQ ID NO: 20695 - protein, 75 aa, Artificial Sequence
  Synthetic polypeptide
SLPFRRPSWADCLSRGIQDQPGQHDVVWCIPVGTGVFSLLSCPCWITGPLHPQTSQIWCSYCWSLPSSREGNDTI

SEQ ID NO: 20696 - protein, 110 aa, Artificial Sequence
  Synthetic polypeptide
AEAFKTSLGNTMWYGVFLWALVSSLFFHVPAGLLALFTLRHHKYGRFMSVSILLMGIVGPITAGILTSAAIAGVYRAAGKEMIPFEALTLGTGQTFCVLVVSFLRILATL

SEQ ID NO: 20697 - protein, 58 aa, Artificial Sequence
  Synthetic polypeptide
EAKLGGLFEPRHSRPAWATRCGMVYSCGHWCLLSSFMSLLDYWPSSPSDITNMVGSCL

SEQ ID NO: 20698 - protein, 58 aa, Artificial Sequence
  Synthetic polypeptide
SLPFRRPSWADCLSRGIQDQPGQHDVVWCIPVGTGVFSLLSCPCWITGPLHPQTSQIW

SEQ ID NO: 20699 - protein, 79 aa, Artificial Sequence
  Synthetic polypeptide
AEAFKTSLGNTMWYGVFLWALVSSLFFHVPAGLLALFTLRHHKYGRFMSVSILLMGIVGPITAGILTSMLDIKIPVKNV

SEQ ID NO: 20700 - protein, 53 aa, Artificial Sequence
  Synthetic polypeptide
AEAFKTSLGNTRCGMVYSCGHWCLLSSFMSLLDYWPSSPSDITNMVESIVKMM

SEQ ID NO: 20701 - protein, 57 aa, Artificial Sequence
  Synthetic polypeptide
EAKLGGLFEPRHSRPAWATRDVVWCIPVGTGVFSLLSCPCWITGPLHPQTSQIWWRV

SEQ ID NO: 20702 - protein, 121 aa, Artificial Sequence
  Synthetic polypeptide
SLPFRRPSWADCLSRGIQDQPGQHEMWYGVFLWALVSSLFFHVPAGLLALFTLRHHKYGGEYSEDDVNELVKEDEVDGEEQTQKTQGKKRKAQSIPARKRRQGGLSLEEEEEEDANSESEG

SEQ ID NO: 20703 - protein, 59 aa, Artificial Sequence
  Synthetic polypeptide
AEAFKTSLGNTRCGMVYSCGHWCLLSSFMSLLDYWPSSPSDITNMVQLLLEFTEQQGRK

SEQ ID NO: 20704 - protein, 71 aa, Artificial Sequence
  Synthetic polypeptide
EAKLGGLFEPRHSRPAWATRDVVWCIPVGTGVFSLLSCPCWITGPLHPQTSQIWCSYCWSLPSSREGNDTI

SEQ ID NO: 20705 - protein, 101 aa, Artificial Sequence
  Synthetic polypeptide
SLPFRRPSWADCLSRGIQDQPGQHEMWYGVFLWALVSSLFFHVPAGLLALFTLRHHKYGAAIAGVYRAAGKEMIPFEALTLGTGQTFCVLVVSFLRILATL

SEQ ID NO: 20706 - protein, 50 aa, Artificial Sequence
  Synthetic polypeptide
AEAFKTSLGNTRCGMVYSCGHWCLLSSFMSLLDYWPSSPSDITNMVGSCL

SEQ ID NO: 20707 - protein, 54 aa, Artificial Sequence
  Synthetic polypeptide
EAKLGGLFEPRHSRPAWATRDVVWCIPVGTGVFSLLSCPCWITGPLHPQTSQIW

SEQ ID NO: 20708 - protein, 124 aa, Artificial Sequence
  Synthetic polypeptide
SLPFRRPSWADCLSRGIQDQPGQHEMWYGVFLWALVSSLFFHVPAGLLALFTLRHHKYGRFMSVSILLMGIVGPITAGILTSAAIAGVYRAAGKEMIPFEALTLGTGQTFCVLVVSFLRILATL

SEQ ID NO: 20709 - protein, 93 aa, Artificial Sequence
  Synthetic polypeptide
SLPFRRPSWADCLSRGIQDQPGQHEMWYGVFLWALVSSLFFHVPAGLLALFTLRHHKYGRFMSVSILLMGIVGPITAGILTSMLDIKIPVKNV

SEQ ID NO: 20710 - protein, 8 aa, Artificial Sequence
  Synthetic polypeptide
GLSSHAEQ

SEQ ID NO: 20711 - protein, 1323 aa, Artificial Sequence
  Synthetic polypeptide
WFYRRLSPSLGSQSSLACHHVRRACFAFCRDFKFPEASLAMQNNDCDDPLVSALPQASFSSSSELSSSHGPGFARLNRRDGAGGWSPLVSNKYQWLQIDLGERMEVTAVATQGGYGSSNWVTSYLLMFSDSGWNWKQYRQEDSIWGFSGNANADSVVYYRLQPSIKARFLRFIPLEWNPKGRIGMRIEVFGCAYRSEVVDLDGKSSLLYRFDQKSLSPIKDIISLKFKTMQSDGILLHREGPNGDHITLQLRRARLFLLINSGEAKLPSTSTLVNLTLGSLLDDQHWHSVLIQRLGKQVNFTVDEHRHHFHARGEFNLMNLDYEISFGGIPAPGKSVSFPHRNFHGCLENLYYNGVDIIDLAKQQKPQIIAMGNVSFSCSQPQSMPVTFLSSRSYLALPDFSGEEEVSATFQFRTWNKAGLLLFSELQLISGGILLFLSDGKLKSNLYQPGKLPSDITAGVELNDGQWHSVSLSAKKNHLSVAVDGQMASAAPLLGPEQIYSGGTYYFGGCPDKSFGSKCKSPLGGFQGCMRLISISGKVVDLISVQQGSLGNFSDLQIDSCGISDRCLPNYCEHGGECSQSWSTFHCNCTNTGYRGATCHNSIYEQSCEAYKHRGNTSGFYYIDSDGSGPLEPFLLYCNMTETAWTIIQHNGSDLTRVRNTNPENPYAGFFEYVASMEQLQATINRAEHCEQEFTYYCKKSRLVNKQDGTPLSWWVGRTNETQTYWGGSSPDLQKCTCGLEGNCIDSQYYCNCDADRNEWTNDTGLLAYKEHLPVTKIVITDTGRLHSEAAYKLGPLLCQGDRSFWNSASFDTEASYLHFPTFHGELSADVSFFFKTTASSGVFLENLGIADFIRIELRSPTVVTFSFDVGNGPFEISVQSPTHFNDNQWHHVRVERNMKEASLQVDQLTPKTQPAPADGHVLLQLNSQLFVGGTATRQRGFLGCIRSLQLNGMTLDLEERAQVTPEVQPGCRGHCSSYGKLCRNGGKCRERPIGFFCDCTFSAYTGPFCSNEISAYFGSGSSVIYNFQENYLLSKNSSSHAASFHGDMKLSREMIKFSFRTTRTPSLLLFVSSFYKEYLSVIIAKNGDLQIRYKLNKYQEPDVVNFDFKNMADGQLHHIMINREEGVVFIEIDDNRRRQVHLSSGTEFSAVKSLVLGRILEHSDVDQDTALAGAQGFTGCLSAVQLSHVAPLKAALHPSHPDPVTVTGHVTESSCMAQPGTDATSRERTHSFADHSGTIDDREPLANAIKSDSAVIGGLIAVVIFILLCITAIAVRIYQQKRLYKRSEAKRSENVDSAEAVLKSELNIQNAVNENQKEYFF

SEQ ID NO: 20712 - protein, 36 aa, Artificial Sequence
  Synthetic polypeptide
PCRTMTVMILLCLPCLRHPSAVLPSSPAVMVLDLQG

SEQ ID NO: 20713 - protein, 1275 aa, Artificial Sequence
  Synthetic polypeptide
WFYRRLSPSLGSQSSLACHHVRRACFAFCRDFKFPEASLAMQNNDCDDPLVSALPQASFSSSSELSSSHGPGFARLNRRDGAGGWSPLVSNKYQWLQIDLGERMEVTAVATQGGYGSSNWVTSYLLMFSDSGWNWKQYRQEDSIWGFSGNANADSVVYYRLQPSIKARFLRFIPLEWNPKGRIGMRIEVFGCAYRSEVVDLDGKSSLLYRFDQKSLSPIKDIISLKFKTMQSDGILLHREGPNGDHITLQLRRARLFLLINSGEAKLPSTSTLVNLTLGSLLDDQHWHSVLIQRLGKQVNFTVDEHRHHFHARGEFNLMNLDYEGNVSFSCSQPQSMPVTFLSSRSYLALPDFSGEEEVSATFQFRTWNKAGLLLFSELQLISGGILLFLSDGKLKSNLYQPGKLPSDITAGVELNDGQWHSVSLSAKKNHLSVAVDGQMASAAPLLGPEQIYSGGTYYFGGCPDKSFGSKCKSPLGGFQGCMRLISISGKVVDLISVQQGSLGNFSDLQIDSCGISDRCLPNYCEHGGECSQSWSTFHCNCTNTGYRGATCHNSIYEQSCEAYKHRGNTSGFYYIDSDGSGPLEPFLLYCNMTETAWTIIQHNGSDLTRVRNTNPENPYAGFFEYVASMEQLQATINRAEHCEQEFTYYCKKSRLVNKQDGTPLSWWVGRTNETQTYWGGSSPDLQKCTCGLEGNCIDSQYYCNCDADRNEWTNDTGLLAYKEHLPVTKIVITDTGRLHSEAAYKLGPLLCQGDRSFWNSASFDTEASYLHFPTFHGELSADVSFFFKTTASSGVFLENLGIADFIRIELRSPTVVTFSFDVGNGPFEISVQSPTHFNDNQWHHVRVERNMKEASLQVDQLTPKTQPAPADGHVLLQLNSQLFVGGTATRQRGFLGCIRSLQLNGMTLDLEERAQVTPEVQPGCRGHCSSYGKLCRNGGKCRERPIGFFCDCTFSAYTGPFCSNEISAYFGSGSSVIYNFQENYLLSKNSSSHAASFHGDMKLSREMIKFSFRTTRTPSLLLFVSSFYKEYLSVIIAKNGDLQIRYKLNKYQEPDVVNFDFKNMADGQLHHIMINREEGVVFIEIDDNRRRQVHLSSGTEFSAVKSLVLGRILEHSDVDQDTALAGAQGFTGCLSAVQLSHVAPLKAALHPSHPDPVTVTGHVTESSCMAQPGTDATSRERTHSFADHSGTIDDREPLANAIKSDSAVIGGLIAVVIFILLCITAIAVRIYQQKRLYKRSEAKRSENVDSAEAVLKSELNIQNAVNENQKEYFF

SEQ ID NO: 20714 - protein, 1275 aa, Artificial Sequence
  Synthetic polypeptide
WFYRRLSPSLGSQSSLACHHVRRACFAFCRDFKFPEASLAMQNNDCDDPLVSALPQASFSSSSELSSSHGPGFARLNRRDGAGGWSPLVSNKYQWLQIDLGERMEVTAVATQGGYGSSNWVTSYLLMFSDSGWNWKQYRQEDSIWGFSGNANADSVVYYRLQPSIKARFLRFIPLEWNPKGRIGMRIEVFGCAYRSEVVDLDGKSSLLYRFDQKSLSPIKDIISLKFKTMQSDGILLHREGPNGDHITLQLRRARLFLLINSGEAKLPSTSTLVNLTLGSLLDDQHWHSVLIQRLGKQVNFTVDEHRHHFHARGEFNLMNLDYEGNVSFSCSQPQSMPVTFLSSRSYLALPDFSGEEEVSATFQFRTWNKAGLLLFSELQLISGGILLFLSDGKLKSNLYQPGKLPSDITAGVELNDGQWHSVSLSAKKNHLSVAVDGQMASAAPLLGPEQIYSGGTYYFGGCPDKSFGSKCKSPLGGFQGCMRLISISGKVVDLISVQQGSLGNFSDLQIDSCGISDRCLPNYCEHGGECSQSWSTFHCNCTNTGYRGATCHNSIYEQSCEAYKHRGNTSGFYYIDSDGSGPLEPFLLYCNMTETAWTIIQHNGSDLTRVRNTNPENPYAGFFEYVASMEQLQATINRAEHCEQEFTYYCKKSRLVNKQDGTPLSWWVGRTNETQTYWGGSSPDLQKCTCGLEGNCIDSQYYCNCDADRNEWTNDTGLLAYKEHLPVTKIVITDTGRLHSEAAYKLGPLLCQGDRSFWNSASFDTEASYLHFPTFHGELSADVSFFFKTTASSGVFLENLGIADFIRIELRSPTVVTFSFDVGNGPFEISVQSPTHFNDNQWHHVRVERNMKEASLQVDQLTPKTQPAPADGHVLLQLNSQLFVGGTATRQRGFLGCIRSLQLNGMTLDLEERAQVTPEVQPGCRGHCSSYGKLCRNGGKCRERPIGFFCDCTFSAYTGPFCSNEISAYFGSGSSVIYNFQENYLLSKNSSSHAASFHGDMKLSREMIKFSFRTTRTPSLLLFVSSFYKEYLSVIIAKNGSLQIRYKLNKYQEPDVVNFDFKNMADGQLHHIMINREEGVVFIEIDDNRRRQVHLSSGTEFSAVKSLVLGRILEHSDVDQDTALAGAQGFTGCLSAVQLSHVAPLKAALHPSHPDPVTVTGHVTESSCMAQPGTDATSRERTHSFADHSGTIDDREPLANAIKSDSAVIGGLIAVVIFILLCITAIAVRIYQQKRLYKRSEAKRSENVDSAEAVLKSELNIQNAVNENQKEYFF

SEQ ID NO: 20715 - protein, 1323 aa, Artificial Sequence
  Synthetic polypeptide
WFYRRLSPSLGSQSSLACHHVRRACFAFCRDFKFPEASLAMQNNDCDDPLVSALPQASFSSSSELSSSHGPGFARLNRRDGAGGWSPLVSNKYQWLQIDLGERMEVTAVATQGGYGSSNWVTSYLLMFSDSGWNWKQYRQEDSIWGFSGNANADSVVYYRLQPSIKARFLRFIPLEWNPKGRIGMRIEVFGCAYRSEVVDLDGKSSLLYRFDQKSLSPIKDIISLKFKTMQSDGILLHREGPNGDHITLQLRRARLFLLINSGEAKLPSTSTLVNLTLGSLLDDQHWHSVLIQRLGKQVNFTVDEHRHHFHARGEFNLMNLDYEISFGGIPAPGKSVSFPHRNFHGCLENLYYNGVDIIDLAKQQKPQIIAMGNVSFSCSQPQSMPVTFLSSRSYLALPDFSGEEEVSATFQFRTWNKAGLLLFSELQLISGGILLFLSDGKLKSNLYQPGKLPSDITAGVELNDGQWHSVSLSAKKNHLSVAVDGQMASAAPLLGPEQIYSGGTYYFGGCPDKSFGSKCKSPLGGFQGCMRLISISGKVVDLISVQQGSLGNFSDLQIDSCGISDRCLPNYCEHGGECSQSWSTFHCNCTNTGYRGATCHNSIYEQSCEAYKHRGNTSGFYYIDSDGSGPLEPFLLYCNMTETAWTIIQHNGSDLTRVRNTNPENPYAGFFEYVASMEQLQATINRAEHCEQEFTYYCKKSRLVNKQDGTPLSWWVGRTNETQTYWGGSSPDLQKCTCGLEGNCIDSQYYCNCDADRNEWTNDTGLLAYKEHLPVTKIVITDTGRLHSEAAYKLGPLLCQGDRSFWNSASFDTEASYLHFPTFHGELSADVSFFFKTTASSGVFLENLGIADFIRIELRSPTVVTFSFDVGNGPFEISVQSPTHFNDNQWHHVRVERNMKEASLQVDQLTPKTQPAPADGHVLLQLNSQLFVGGTATRQRGFLGCIRSLQLNGMTLDLEERAQVTPEVQPGCRGHCSSYGKLCRNGGKCRERPIGFFCDCTFSAYTGPFCSNEISAYFGSGSSVIYNFQENYLLSKNSSSHAASFHGDMKLSREMIKFSFRTTRTPSLLLFVSSFYKEYLSVIIAKNGSLQIRYKLNKYQEPDVVNFDFKNMADGQLHHIMINREEGVVFIEIDDNRRRQVHLSSGTEFSAVKSLVLGRILEHSDVDQDTALAGAQGFTGCLSAVQLSHVAPLKAALHPSHPDPVTVTGHVTESSCMAQPGTDATSRERTHSFADHSGTIDDREPLANAIKSDSAVIGGLIAVVIFILLCITAIAVRIYQQKRLYKRSEAKRSENVDSAEAVLKSELNIQNAVNENQKEYFF

SEQ ID NO: 20716 - protein, 48 aa, Artificial Sequence
  Synthetic polypeptide
SACSSFTFRHDCKFPEVSPEAKQTPASCSLYGLRDSKKGPWRSLLPWR

SEQ ID NO: 20717 - protein, 163 aa, Artificial Sequence
  Synthetic polypeptide
GCLKVCSTSPPSLCLPLQPCEVLAPPLPSAMIVSFLRSPQKPSRRQHHAPCTACETLRRAPGEVCFPGGKRDPTDMDDAATALREAQEEVGLRPHQVEVVCCLVPCLIDRWGSRYVDEAGLELLASSDPPTSASQSAGITDRYIDNSICGFNRPQLPGPAESC

SEQ ID NO: 20718 - protein, 20 aa, Artificial Sequence
  Synthetic polypeptide
GLPRSQADASIMLPVRPARL

SEQ ID NO: 20719 - protein, 231 aa, Artificial Sequence
  Synthetic polypeptide
GCLKVCSTSPPSLCLPLQPCEVLAPPLPSAMIVSFLRSPQKPSRRQHHAPCTACETLRRAPGEVCFPGGKRDPTDMDDAATALREAQEEVGLRPHQVEVVCCLVPCLIDTDTLITPFVGLIDHNFQAQPNPAEVKDVFLVPLAYFLHPQVHDQHYVTRLGHRFINHIFEYTNPEDGVTYQIKGMTANLAVLVAFIILEKKPTFEVQFNLNDVLASSEELFLKVHKKATSRL

SEQ ID NO: 20720 - protein, 113 aa, Artificial Sequence
  Synthetic polypeptide
GCLKVCSTSPPSLCLPLQPCEVLAPPLPSAMIVSFLRSPQKPSRRQHHAPCTACETLRRAPGEVCFPGGKRDPTDMDDAATALREAQEEVGLRPHQVEVVCCLVPCLIDVRVS

SEQ ID NO: 20721 - protein, 46 aa, Artificial Sequence
  Synthetic polypeptide
ISLTRSDGFIRGFCFCFFLIFSCHQHVRSAFASCHDSEASSAMWNS

SEQ ID NO: 20722 - protein, 260 aa, Artificial Sequence
  Synthetic polypeptide
EVPLPPAMILRPPQPCGTHKAKVEAMTLDLALLRSVQHFAEAFKAKNVPLHVLVCNAATFALPWSLTKDGLETTFQVNHLGHFYLVQLLQDVLCRSAPARVIVVSSESHRFTDINDSLGKLDFSRLSPTKNDYWAMLAYNRSKLCNILFSNELHRRLSPRGVTSNAVHPGNMMYSNIHRSWWVYTLLFTLARPFTKSMQQGAATTVYCAAVPELEGLGGMYFNNCCRCMPSPEAQSEETARTLWALSERLIQERLGSQSG

SEQ ID NO: 20723 - protein, 12 aa, Artificial Sequence
  Synthetic polypeptide
GLLSHVELIKPR

SEQ ID NO: 20724 - protein, 209 aa, Artificial Sequence
  Synthetic polypeptide
EVPLPPAMILRPPQPCGTHKAKVEAMTLDLALLRSVQHFAEAFKAKNVPLHVLVCNAATFALPWSLTKDGLETTFQVNHLGHFYLVQLLQDVLCRSAPARVIVVSSESHRFTDINDSLGKLDFSRLSPTKNDYWAMLAYNRSKLCNILFSNELHRRLSPRGVTSNAVHPGNMMYSNIHRSWWVYTLLFTLARPFTKSMVSDCLVEGGHF

SEQ ID NO: 20725 - protein, 12 aa, Artificial Sequence
  Synthetic polypeptide
EAKWIQGSFMKT

SEQ ID NO: 20726 - protein, 14 aa, Artificial Sequence
  Synthetic polypeptide
SQHFRRPSGFKDHS

SEQ ID NO: 20727 - protein, 123 aa, Artificial Sequence
  Synthetic polypeptide
PGTVVHAYDPSTLGGQVDSRIIHENIVEKERVQRITQETFGDYPQPQLEFAQYKLETKFKSGLNGSILAEREEPLRCLIKFSSPHLLEALKSLAPAGIADAPLSPLLTCIPNKRMNYFKIRDK

SEQ ID NO: 20728 - protein, 137 aa, Artificial Sequence
  Synthetic polypeptide
PGTVVHAYDPSTLGGQVDSRIIHENIVEKERVQRITQETFGDYPQPQLEFAQYKLETKFKSGLNGSILAEREEPLRCLIKFSSPHLLEALKSLAPAALVCRIQKLLCYSGSHSQGTQDPSSWQKDLYLLFVPLYPRC

SEQ ID NO: 20729 - protein, 115 aa, Artificial Sequence
  Synthetic polypeptide
GWASPFTSPFRGPRVGIGPRSERGCPVPHGRCQRHALLFLPGRPLPSAVTRGQRATGGPTVPPSLGSDGCSPRGPWLERQGRRLRPWTESWPTHLTFPASPLANSLASRVRRCPA

SEQ ID NO: 20730 - protein, 45 aa, Artificial Sequence
  Synthetic polypeptide
RADRELPVDPRCLPPWDLMGAALEDPGWRDRAGGCAPGRSPGQPT

SEQ ID NO: 20731 - protein, 92 aa, Artificial Sequence
  Synthetic polypeptide
DRERWLTPVIPALWESKAGGSRGQAIETILTNTRNHSVPSPRRHGVAPGRTAPTGSVCTFSWNTWSKSCGWWGPEASPSPTAMPRPSGSCRP

SEQ ID NO: 20732 - protein, 164 aa, Artificial Sequence
  Synthetic polypeptide
LTREITVSQAQGGTEWPLEGQRLQAVSVPSAGTRGARAAAGGAPRLLPAPQPCLGPQAAADPEGRPGGTAGHLGPCTCQRSSGEQTPSRPALVVHPGGLAPGSGHQWRGGLLHHALRPALREGQLPQVAHLHGCLLRGEHVRHPAPEGAGIRCFLCTGLEESGR

SEQ ID NO: 20733 - protein, 52 aa, Artificial Sequence
  Synthetic polypeptide
HEKSQCPKPKAARSGPWKDSAYRQCLYLQLEHVEQELRLVGPRGFSQPHSHA

SEQ ID NO: 20734 - protein, 42 aa, Artificial Sequence
  Synthetic polypeptide
VSHSVCVTPSLGLSVCICQMGTPVVPSSCVGVKTRDRWISWK

SEQ ID NO: 20735 - protein, 53 aa, Artificial Sequence
  Synthetic polypeptide
RLEIGGYHGNKRNPPREELQRFRASKSSSPERRLLLHHPIWHSVRPQHAQLGS

SEQ ID NO: 20736 - protein, 97 aa, Artificial Sequence
  Synthetic polypeptide
RSVDIMEIKEIRPGKNSKDFERAKAVRQKEDCCFTILYGTQFVLSTLSLAADSKEDAVNWLSGLKILHQEAMNASTPTIIESWLRKQIYSVDQTRRN

SEQ ID NO: 20737 - protein, 1203 aa, Artificial Sequence
  Synthetic polypeptide
RSVDIMEIKEIRPGKNSKDFERAKAVRQKEDCCFTILYGTQFVLSTLSLAADSKEDAVNWLSGLKILHQEAMNASTPTIIESWLRKQIYSVDQTRRNSISLRELKTILPLINFKVSSAKFLKDKFVEIGAHKDELSFEQFHLFYKKLMFEQQKSILDEFKKDSSVFILGNTDRPDASAVYLHDFQRFLIHEQQEHWAQDLNKVRERMTKFIDDTMRETAEPFLFVDEFLTYLFSRENSIWDEKYDAVDMQDMNNPLSHYWISSSHNTYLTGDQLRSESSPEAYIRCLRMGCRCIELDCWDGPDGKPVIYHGWTRTTKIKFDDVVQAIKDHAFVTSSFPVILSIEEHCSVEQQRHMAKAFKEVFGDLLLTKPTEASADQLPSPSQLREKIIIKHKKLGPRGDVDVNMEDKKDEHKQQGELYMWDSIDQKWTRHYCAIADAKLSFSDDIEQTMEEEVPQDIPPTELHFGEKWFHKKVEKRTSAEKLLQEYCMETGGKDGTFLVRESETFPNDYTLSFWRSGRVQHCRIRSTMEGGTLKYYLTDNLTFSSIYALIQHYRETHLRCAEFELRLTDPVPNPNPHESKPWYYDSLSRGEAEDMLMRIPRDGAFLIRKREGSDSYAITFRARGKVKHCRINRDGRHFVLGTSAYFESLVELVSYYEKHSLYRKMRLRYPVTPELLERYNMERDINSLYDVSRMYVDPSEINPSMPQRTVKALYDYKAKRSDELSFCRGALIHNVSKEPGGWWKGDYGTRIQQYFPSNYVEDISTADFEELEKQIIEDNPLGSLCRGILDLNTYNVVKAPQGKNQKSFVFILEPKQQGDPPVEFATDRVEELFEWFQSIREITWKIDTKENNMKYWEKNQSIAIELSDLVVYCKPTSKTKDNLENPDFREIRSFVETKADSIIRQKPVDLLKYNQKGLTRVYPKGQRVDSSNYDPFRLWLCGSQMVALNFQTADKYMQMNHALFSLNGRTGYVLQPESMRTEKYDPMPPESQRKILMTLTVKVLGARHLPKLGRSIACPFVEVEICGAEYDNNKFKTTVVNDNGLSPIWAPTQEKVTFEIYDPNLAFLRFVVYEEDMFSDPNFLAHATYPIKAVKSGFRSVPLKNGYSEDIELASLLVFCEMRPVLESEEELYSSCRQLRRRQEELNNQLFLYDTHQNLRNANRDALVKEFSVNENQLQLYQEKCNKRLREKRVSNSKFYS

SEQ ID NO: 20738 - protein, 6 aa, Artificial Sequence
  Synthetic polypeptide
VWISWK

SEQ ID NO: 20739 - protein, 25 aa, Artificial Sequence
  Synthetic polypeptide
VVSMIDGPQRCPCPAPRNLWWISWK

SEQ ID NO: 20740 - protein, 64 aa, Artificial Sequence
  Synthetic polypeptide
LMAPRDVHVLLPGTCGGYHGNKRNPPREELQRFRASKSSSPERRLLLHHPIWHSVRPQHAQLGS

SEQ ID NO: 20741 - protein, 109 aa, Artificial Sequence
  Synthetic polypeptide
WPPEMSMSCSPEPVVDIMEIKEIRPGKNSKDFERAKAVRQKEDCCFTILYGTQFVLSTLSLAADSKEDAVNWLSGLKILHQEAMNASTPTIIESWLRKQIYSVDQTRRN

SEQ ID NO: 20742 - protein, 1215 aa, Artificial Sequence
  Synthetic polypeptide
WPPEMSMSCSPEPVVDIMEIKEIRPGKNSKDFERAKAVRQKEDCCFTILYGTQFVLSTLSLAADSKEDAVNWLSGLKILHQEAMNASTPTIIESWLRKQIYSVDQTRRNSISLRELKTILPLINFKVSSAKFLKDKFVEIGAHKDELSFEQFHLFYKKLMFEQQKSILDEFKKDSSVFILGNTDRPDASAVYLHDFQRFLIHEQQEHWAQDLNKVRERMTKFIDDTMRETAEPFLFVDEFLTYLFSRENSIWDEKYDAVDMQDMNNPLSHYWISSSHNTYLTGDQLRSESSPEAYIRCLRMGCRCIELDCWDGPDGKPVIYHGWTRTTKIKFDDVVQAIKDHAFVTSSFPVILSIEEHCSVEQQRHMAKAFKEVFGDLLLTKPTEASADQLPSPSQLREKIIIKHKKLGPRGDVDVNMEDKKDEHKQQGELYMWDSIDQKWTRHYCAIADAKLSFSDDIEQTMEEEVPQDIPPTELHFGEKWFHKKVEKRTSAEKLLQEYCMETGGKDGTFLVRESETFPNDYTLSFWRSGRVQHCRIRSTMEGGTLKYYLTDNLTFSSIYALIQHYRETHLRCAEFELRLTDPVPNPNPHESKPWYYDSLSRGEAEDMLMRIPRDGAFLIRKREGSDSYAITFRARGKVKHCRINRDGRHFVLGTSAYFESLVELVSYYEKHSLYRKMRLRYPVTPELLERYNMERDINSLYDVSRMYVDPSEINPSMPQRTVKALYDYKAKRSDELSFCRGALIHNVSKEPGGWWKGDYGTRIQQYFPSNYVEDISTADFEELEKQIIEDNPLGSLCRGILDLNTYNVVKAPQGKNQKSFVFILEPKQQGDPPVEFATDRVEELFEWFQSIREITWKIDTKENNMKYWEKNQSIAIELSDLVVYCKPTSKTKDNLENPDFREIRSFVETKADSIIRQKPVDLLKYNQKGLTRVYPKGQRVDSSNYDPFRLWLCGSQMVALNFQTADKYMQMNHALFSLNGRTGYVLQPESMRTEKYDPMPPESQRKILMTLTVKVLGARHLPKLGRSIACPFVEVEICGAEYDNNKFKTTVVNDNGLSPIWAPTQEKVTFEIYDPNLAFLRFVVYEEDMFSDPNFLAHATYPIKAVKSGFRSVPLKNGYSEDIELASLLVFCEMRPVLESEEELYSSCRQLRRRQEELNNQLFLYDTHQNLRNANRDALVKEFSVNENQLQLYQEKCNKRLREKRVSNSKFYS

SEQ ID NO: 20743 - protein, 114 aa, Artificial Sequence
  Synthetic polypeptide
QGLCTPELPTKGGFLLFFPVDIMEIKEIRPGKNSKDFERAKAVRQKEDCCFTILYGTQFVLSTLSLAADSKEDAVNWLSGLKILHQEAMNASTPTIIESWLRKQIYSVDQTRRN

SEQ ID NO: 20744 - protein, 24 aa, Artificial Sequence
  Synthetic polypeptide
KVFVLQNSLQREAFSSSSQWISWK

SEQ ID NO: 20745 - protein, 67 aa, Artificial Sequence
  Synthetic polypeptide
RSLYSRTPYKGRLSPLLPSGYHGNKRNPPREELQRFRASKSSSPERRLLLHHPIWHSVRPQHAQLGS

SEQ ID NO: 20746 - protein, 1220 aa, Artificial Sequence
  Synthetic polypeptide
QGLCTPELPTKGGFLLFFPVDIMEIKEIRPGKNSKDFERAKAVRQKEDCCFTILYGTQFVLSTLSLAADSKEDAVNWLSGLKILHQEAMNASTPTIIESWLRKQIYSVDQTRRNSISLRELKTILPLINFKVSSAKFLKDKFVEIGAHKDELSFEQFHLFYKKLMFEQQKSILDEFKKDSSVFILGNTDRPDASAVYLHDFQRFLIHEQQEHWAQDLNKVRERMTKFIDDTMRETAEPFLFVDEFLTYLFSRENSIWDEKYDAVDMQDMNNPLSHYWISSSHNTYLTGDQLRSESSPEAYIRCLRMGCRCIELDCWDGPDGKPVIYHGWTRTTKIKFDDVVQAIKDHAFVTSSFPVILSIEEHCSVEQQRHMAKAFKEVFGDLLLTKPTEASADQLPSPSQLREKIIIKHKKLGPRGDVDVNMEDKKDEHKQQGELYMWDSIDQKWTRHYCAIADAKLSFSDDIEQTMEEEVPQDIPPTELHFGEKWFHKKVEKRTSAEKLLQEYCMETGGKDGTFLVRESETFPNDYTLSFWRSGRVQHCRIRSTMEGGTLKYYLTDNLTFSSIYALIQHYRETHLRCAEFELRLTDPVPNPNPHESKPWYYDSLSRGEAEDMLMRIPRDGAFLIRKREGSDSYAITFRARGKVKHCRINRDGRHFVLGTSAYFESLVELVSYYEKHSLYRKMRLRYPVTPELLERYNMERDINSLYDVSRMYVDPSEINPSMPQRTVKALYDYKAKRSDELSFCRGALIHNVSKEPGGWWKGDYGTRIQQYFPSNYVEDISTADFEELEKQIIEDNPLGSLCRGILDLNTYNVVKAPQGKNQKSFVFILEPKQQGDPPVEFATDRVEELFEWFQSIREITWKIDTKENNMKYWEKNQSIAIELSDLVVYCKPTSKTKDNLENPDFREIRSFVETKADSIIRQKPVDLLKYNQKGLTRVYPKGQRVDSSNYDPFRLWLCGSQMVALNFQTADKYMQMNHALFSLNGRTGYVLQPESMRTEKYDPMPPESQRKILMTLTVKVLGARHLPKLGRSIACPFVEVEICGAEYDNNKFKTTVVNDNGLSPIWAPTQEKVTFEIYDPNLAFLRFVVYEEDMFSDPNFLAHATYPIKAVKSGFRSVPLKNGYSEDIELASLLVFCEMRPVLESEEELYSSCRQLRRRQEELNNQLFLYDTHQNLRNANRDALVKEFSVNENQLQLYQEKCNKRLREKRVSNSKFYS

SEQ ID NO: 20747 - protein, 53 aa, Artificial Sequence
  Synthetic polypeptide
ESVCCQADSKEDAVNWLSGLKILHQEAMNASTPTIIESWLRKQIYSVDQTRRN

SEQ ID NO: 20748 - protein, 19 aa, Artificial Sequence
  Synthetic polypeptide
SQCAARLTLKRMQLTGSLA

SEQ ID NO: 20749 - protein, 6 aa, Artificial Sequence
  Synthetic polypeptide
VSVLPG

SEQ ID NO: 20750 - protein, 1159 aa, Artificial Sequence
  Synthetic polypeptide
ESVCCQADSKEDAVNWLSGLKILHQEAMNASTPTIIESWLRKQIYSVDQTRRNSISLRELKTILPLINFKVSSAKFLKDKFVEIGAHKDELSFEQFHLFYKKLMFEQQKSILDEFKKDSSVFILGNTDRPDASAVYLHDFQRFLIHEQQEHWAQDLNKVRERMTKFIDDTMRETAEPFLFVDEFLTYLFSRENSIWDEKYDAVDMQDMNNPLSHYWISSSHNTYLTGDQLRSESSPEAYIRCLRMGCRCIELDCWDGPDGKPVIYHGWTRTTKIKFDDVVQAIKDHAFVTSSFPVILSIEEHCSVEQQRHMAKAFKEVFGDLLLTKPTEASADQLPSPSQLREKIIIKHKKLGPRGDVDVNMEDKKDEHKQQGELYMWDSIDQKWTRHYCAIADAKLSFSDDIEQTMEEEVPQDIPPTELHFGEKWFHKKVEKRTSAEKLLQEYCMETGGKDGTFLVRESETFPNDYTLSFWRSGRVQHCRIRSTMEGGTLKYYLTDNLTFSSIYALIQHYRETHLRCAEFELRLTDPVPNPNPHESKPWYYDSLSRGEAEDMLMRIPRDGAFLIRKREGSDSYAITFRARGKVKHCRINRDGRHFVLGTSAYFESLVELVSYYEKHSLYRKMRLRYPVTPELLERYNMERDINSLYDVSRMYVDPSEINPSMPQRTVKALYDYKAKRSDELSFCRGALIHNVSKEPGGWWKGDYGTRIQQYFPSNYVEDISTADFEELEKQIIEDNPLGSLCRGILDLNTYNVVKAPQGKNQKSFVFILEPKQQGDPPVEFATDRVEELFEWFQSIREITWKIDTKENNMKYWEKNQSIAIELSDLVVYCKPTSKTKDNLENPDFREIRSFVETKADSIIRQKPVDLLKYNQKGLTRVYPKGQRVDSSNYDPFRLWLCGSQMVALNFQTADKYMQMNHALFSLNGRTGYVLQPESMRTEKYDPMPPESQRKILMTLTVKVLGARHLPKLGRSIACPFVEVEICGAEYDNNKFKTTVVNDNGLSPIWAPTQEKVTFEIYDPNLAFLRFVVYEEDMFSDPNFLAHATYPIKAVKSGFRSVPLKNGYSEDIELASLLVFCEMRPVLESEEELYSSCRQLRRRQEELNNQLFLYDTHQNLRNANRDALVKEFSVNENQLQLYQEKCNKRLREKRVSNSKFYS

SEQ ID NO: 20751 - protein, 1139 aa, Artificial Sequence
  Synthetic polypeptide
GQAQWCTPIFPALWEAEAGRLPELRSSRPAWATRISLRELKTILPLINFKVSSAKFLKDKFVEIGAHKDELSFEQFHLFYKKLMFEQQKSILDEFKKDSSVFILGNTDRPDASAVYLHDFQRFLIHEQQEHWAQDLNKVRERMTKFIDDTMRETAEPFLFVDEFLTYLFSRENSIWDEKYDAVDMQDMNNPLSHYWISSSHNTYLTGDQLRSESSPEAYIRCLRMGCRCIELDCWDGPDGKPVIYHGWTRTTKIKFDDVVQAIKDHAFVTSSFPVILSIEEHCSVEQQRHMAKAFKEVFGDLLLTKPTEASADQLPSPSQLREKIIIKHKKLGPRGDVDVNMEDKKDEHKQQGELYMWDSIDQKWTRHYCAIADAKLSFSDDIEQTMEEEVPQDIPPTELHFGEKWFHKKVEKRTSAEKLLQEYCMETGGKDGTFLVRESETFPNDYTLSFWRSGRVQHCRIRSTMEGGTLKYYLTDNLTFSSIYALIQHYRETHLRCAEFELRLTDPVPNPNPHESKPWYYDSLSRGEAEDMLMRIPRDGAFLIRKREGSDSYAITFRARGKVKHCRINRDGRHFVLGTSAYFESLVELVSYYEKHSLYRKMRLRYPVTPELLERYNMERDINSLYDVSRMYVDPSEINPSMPQRTVKALYDYKAKRSDELSFCRGALIHNVSKEPGGWWKGDYGTRIQQYFPSNYVEDISTADFEELEKQIIEDNPLGSLCRGILDLNTYNVVKAPQGKNQKSFVFILEPKQQGDPPVEFATDRVEELFEWFQSIREITWKIDTKENNMKYWEKNQSIAIELSDLVVYCKPTSKTKDNLENPDFREIRSFVETKADSIIRQKPVDLLKYNQKGLTRVYPKGQRVDSSNYDPFRLWLCGSQMVALNFQTADKYMQMNHALFSLNGRTGYVLQPESMRTEKYDPMPPESQRKILMTLTVKVLGARHLPKLGRSIACPFVEVEICGAEYDNNKFKTTVVNDNGLSPIWAPTQEKVTFEIYDPNLAFLRFVVYEEDMFSDPNFLAHATYPIKAVKSGFRSVPLKNGYSEDIELASLLVFCEMRPVLESEEELYSSCRQLRRRQEELNNQLFLYDTHQNLRNANRDALVKEFSVNENQLQLYQEKCNKRLREKRVSNSKFYS

SEQ ID NO: 20752 - protein, 39 aa, Artificial Sequence
  Synthetic polypeptide
ARRSGVHLYSQHFGRQRQADCLSSGVRDQPGQHASVSES

SEQ ID NO: 20753 - protein, 26 aa, Artificial Sequence
  Synthetic polypeptide
AQEFETSLGNTHQSPRVEDHLAPDQL

SEQ ID NO: 20754 - protein, 20 aa, Artificial Sequence
  Synthetic polypeptide
DSAVYKLCELRIMRSIGLRI

SEQ ID NO: 20755 - protein, 1013 aa, Artificial Sequence
  Synthetic polypeptide
DHEEHWAQDLNKVRERMTKFIDDTMRETAEPFLFVDEFLTYLFSRENSIWDEKYDAVDMQDMNNPLSHYWISSSHNTYLTGDQLRSESSPEAYIRCLRMGCRCIELDCWDGPDGKPVIYHGWTRTTKIKFDDVVQAIKDHAFVTSSFPVILSIEEHCSVEQQRHMAKAFKEVFGDLLLTKPTEASADQLPSPSQLREKIIIKHKKLGPRGDVDVNMEDKKDEHKQQGELYMWDSIDQKWTRHYCAIADAKLSFSDDIEQTMEEEVPQDIPPTELHFGEKWFHKKVEKRTSAEKLLQEYCMETGGKDGTFLVRESETFPNDYTLSFWRSGRVQHCRIRSTMEGGTLKYYLTDNLTFSSIYALIQHYRETHLRCAEFELRLTDPVPNPNPHESKPWYYDSLSRGEAEDMLMRIPRDGAFLIRKREGSDSYAITFRARGKVKHCRINRDGRHFVLGTSAYFESLVELVSYYEKHSLYRKMRLRYPVTPELLERYNMERDINSLYDVSRMYVDPSEINPSMPQRTVKALYDYKAKRSDELSFCRGALIHNVSKEPGGWWKGDYGTRIQQYFPSNYVEDISTADFEELEKQIIEDNPLGSLCRGILDLNTYNVVKAPQGKNQKSFVFILEPKQQGDPPVEFATDRVEELFEWFQSIREITWKIDTKENNMKYWEKNQSIAIELSDLVVYCKPTSKTKDNLENPDFREIRSFVETKADSIIRQKPVDLLKYNQKGLTRVYPKGQRVDSSNYDPFRLWLCGSQMVALNFQTADKYMQMNHALFSLNGRTGYVLQPESMRTEKYDPMPPESQRKILMTLTVKVLGARHLPKLGRSIACPFVEVEICGAEYDNNKFKTTVVNDNGLSPIWAPTQEKVTFEIYDPNLAFLRFVVYEEDMFSDPNFLAHATYPIKAVKSGFRSVPLKNGYSEDIELASLLVFCEMRPVLESEEELYSSCRQLRRRQEELNNQLFLYDTHQNLRNANRDALVKEFSVNENQLQLYQEKCNKRLREKRVSNSKFYS

SEQ ID NO: 20756 - protein, 156 aa, Artificial Sequence
  Synthetic polypeptide
DHEEHWAQDLNKVRERMTKFIDDTMRETAEPFLFVDEFLTYLFSRENSIWDEKYDAVDMQDMNNPLSHYWISSSHNTYLTGDQLRSESSPEAYIRCLRMGCRCIELDCWDGPDGKPVIYHGWTRTTKIKFDDVVQAIKDHAFVTSRCPLSWVEVLL

SEQ ID NO: 20757 - protein, 131 aa, Artificial Sequence
  Synthetic polypeptide
LSTWALKSGRPGFDAQLRQLFTCHLGSFIIEEQSFLLCEDLLYGRMSFRGFNPEVEKLMLQMNAKHKAEEVEDETVELDVSDEEMARRYETLVGTIGKKFARKRDHANYEEDENGDITPIKAKKMFLKPQD

SEQ ID NO: 20758 - protein, 22 aa, Artificial Sequence
  Synthetic polypeptide
SQADLGLMPSSASCLLVTLGVS

SEQ ID NO: 20759 - protein, 24 aa, Artificial Sequence
  Synthetic polypeptide
CPAPPVVYLSPWEFHNRRAEFLTM

SEQ ID NO: 20760 - protein, 68 aa, Artificial Sequence
  Synthetic polypeptide
LSTWALKSGRPGFDAQLRQLFTCHLGSFIIEEQSFLLCEDLLYGRMSFRGFNPEVEVFLHQVPFLLII

SEQ ID NO: 20761 - protein, 44 aa, Artificial Sequence
  Synthetic polypeptide
LWSQVVLCASPSSRPFHWLSNGLESEAQFSHLQKEGMMPTSCCC

SEQ ID NO: 20762 - protein, 30 aa, Artificial Sequence
  Synthetic polypeptide
CQLRAAANICRRFGLHSWISAESVPYQSAS

SEQ ID NO: 20763 - protein, 713 aa, Artificial Sequence
  Synthetic polypeptide
GSVFPLAEGRNDANFVLLLTSAEDLDCTPGFQQKVFHINQPAEFIEDQSILNLTFSDCKGNDKLRYEVSSPYFKVNSDGGLVALRNITAVGKTLFVHARTPHAEDMAELVIVGGKDIQGSLQDIFKFARTSPVPRQKRSIVVSPILIPENQRQPFPRDVGKVVDSDRPERSKFRLTGKGVDQEPKGIFRINENTGSVSVTRTLDREVIAVYQLFVETTDVNGKTLEGPVPLEVIVIDQNDNRPIFREGPYIGHVMEGSPTGTTVMRMTAFDADDPATDNALLRYNIRQQTPDKPSPNMFYIDPEKGDIVTVVSPALLDRETLENPKYELIIEAQDMAGLDVGLTGTATATIMIDDKNDHSPKFTKKEFQATVEEGAVGVIVNLTVEDKDDPTTGAWRAAYTIINGNPGQSFEIHTNPQTNEGMLSVVKPLDYEISAFHTLLIKVENEDPLVPDVSYGPSSTATVHITVLDVNEGPVFYPDPMMVTRQEDLSVGSVLLTVNATDPDSLQHQTIRYSVYKDPAGWLNINPINGTVDTTAVLDRESPFVDNSVYTALFLAIDSGNPPATGTGTLLITLEDVNDNAPFIYPTVAEVCDDAKNLSVVILGASDKDLHPNTDPFKFEIHKQAVPDKVWKISKINNTHALVSLLQNLNKANYNLPIMVTDSGKPPMTNITDLRVQVCSCRNSKVDCNAAGALRFSLPSVLLLSLFSLACL

SEQ ID NO: 20764 - protein, 56 aa, Artificial Sequence
  Synthetic polypeptide
GSVFPLAEGRNDANFVLLLTSAEDLDCTPGFQQKVFHINQPAEFIEDQSILNYVFY

SEQ ID NO: 20765 - protein, 175 aa, Artificial Sequence
  Synthetic polypeptide
GSVFPLAEGRNDANFVLLLTSAEDLDCTPGFQQKVFHINQPAEFIEDQSILNLTFSDCKGNDKLRYEVSSPYFKVNSDGGLVALRNITAVGKTLFVHARTPHAEDMAELVIVGGKDIQGSLQDIFKFARTSPVPRQKRSIVVSPILIPENQRQPFPRDVGKMKIWQVLCLARWLT

SEQ ID NO: 20766 - protein, 190 aa, Artificial Sequence
  Synthetic polypeptide
GSVFPLAEGRNDANFVLLLTSAEDLDCTPGFQQKVFHINQPAEFIEDQSILNLTFSDCKGNDKLRYEVSSPYFKVNSDGGLVALRNITAVGKTLFVHARTPHAEDMAELVIVGGKDIQGSLQDIFKFARTSPVPRQKRSIVVSPILIPENQRQPFPRDVGKRTHNPINSELLLNEGITADLNPCITILAI

SEQ ID NO: 20767 - protein, 674 aa, Artificial Sequence
  Synthetic polypeptide
GSVFPLAEGRNDANFVLLLTSAEDLDCTPGFQQKVFHINQPAEFIEDQSILNLTFSDCKGNDKLRYEVSSPYFKVNSDGGLVALRNITAVGKTLFVHARTPHAEDMAELVIVGGKDIQGSLQVVDSDRPERSKFRLTGKGVDQEPKGIFRINENTGSVSVTRTLDREVIAVYQLFVETTDVNGKTLEGPVPLEVIVIDQNDNRPIFREGPYIGHVMEGSPTGTTVMRMTAFDADDPATDNALLRYNIRQQTPDKPSPNMFYIDPEKGDIVTVVSPALLDRETLENPKYELIIEAQDMAGLDVGLTGTATATIMIDDKNDHSPKFTKKEFQATVEEGAVGVIVNLTVEDKDDPTTGAWRAAYTIINGNPGQSFEIHTNPQTNEGMLSVVKPLDYEISAFHTLLIKVENEDPLVPDVSYGPSSTATVHITVLDVNEGPVFYPDPMMVTRQEDLSVGSVLLTVNATDPDSLQHQTIRYSVYKDPAGWLNINPINGTVDTTAVLDRESPFVDNSVYTALFLAIDSGNPPATGTGTLLITLEDVNDNAPFIYPTVAEVCDDAKNLSVVILGASDKDLHPNTDPFKFEIHKQAVPDKVWKISKINNTHALVSLLQNLNKANYNLPIMVTDSGKPPMTNITDLRVQVCSCRNSKVDCNAAGALRFSLPSVLLLSLFSLACL

SEQ ID NO: 20768 - protein, 52 aa, Artificial Sequence
  Synthetic polypeptide
GSVFPLAEGRNDANFVLLLTSAEDLDCTPGFQQKVFHINQPAEFIEDQSILN

SEQ ID NO: 20769 - protein, 67 aa, Artificial Sequence
  Synthetic polypeptide
GSVFPLAEGRNDANFVLLLTSAEDLDCTPGFQQKVFHINQPAEFIEDQSILNCKQCHSKMLLDSSHI

SEQ ID NO: 20770 - protein, 3 aa, Artificial Sequence
  Synthetic polypeptide
PGL

SEQ ID NO: 20771 - protein, 20 aa, Artificial Sequence
  Synthetic polypeptide
RCDSVKDFEMGRVSWISQVC

SEQ ID NO: 20772 - protein, 15 aa, Artificial Sequence
  Synthetic polypeptide
RILRWGEYLGLARSV

SEQ ID NO: 20773 - protein, 9 aa, Artificial Sequence
  Synthetic polypeptide
GQVQWLTGL

SEQ ID NO: 20774 - protein, 9 aa, Artificial Sequence
  Synthetic polypeptide
ARCSGSQVC

SEQ ID NO: 20775 - protein, 9 aa, Artificial Sequence
  Synthetic polypeptide
PGAVAHRSV

SEQ ID NO: 20776 - protein, 123 aa, Artificial Sequence
  Synthetic polypeptide
CPLRGLELSHRKVRSLDTRHCTDEPRRHDAECTKATGRGGGRARRPPAAPSRPLPAASADAAPRRLPGRALSGGLRVPAAPALLLQRMRLRLPRSCAAPASLRLAGAAETSMAWWQWLAPGWP

SEQ ID NO: 20777 - protein, 202 aa, Artificial Sequence
  Synthetic polypeptide
NSAIERYGAWTHAIAQMNLEDMMLSAQRPRAEEAGAPGGPRQPRADRCPPPPRTLPPGACQAARCQADSECPRHRRCCYNGCAYACLEAVPPPPVLDWLVQPKPRWLGGNGWLLDGPEEVLQAEACSTTEDGAEPLLCPSGYECHILSPGDVAEGIPNRGQCVKQRRQADGRILRHKLYKEYPEGDSKNVAEPGRGQQKHFQ

SEQ ID NO: 20778 - protein, 62 aa, Artificial Sequence
  Synthetic polypeptide
VHKGHGPRRRARPAAPGSPEQTAARRLRGRCPPAPARPRAVRRTPSARGTGAAATTDAPTPA

SEQ ID NO: 20779 - protein, 22 aa, Artificial Sequence
  Synthetic polypeptide
GPGYATWLLCDHRVAGECNPNP

SEQ ID NO: 20780 - protein, 425 aa, Artificial Sequence
  Synthetic polypeptide
RQCGLAADYGVEALAMLPGSCVITELLENVTLIHKPVSLQPRGLINKGNWCYINATLQALVACPPMYHLMKFIPLYSKVQRPCTSTPMIDSFVRLMNEFTNMPVPPKPRQALGDKIVRDIRPGAAFEPTYIYRLLTVNKSSLSEKGRQEDAEEYLGFILNGLHEEMLNLKKLLSPSNEKLTISNGPKNHSVNEEEQEEQGEGSEDEWEQVGPRNKTSVTRQADFVQTPITGIFGGHIRSVVYQQSSKESATLQPFFTLQLDIQSDKIRTVQDALESLVARESVQGYTTKTKQEVEISRRVTLEKLPPVLVLHLKRFVYEKTGGCQKLIKNIEYPVDLEISKELLSPGVKNKNFKCHRTYRLFAVVYHHGNSATGGHYTTDVFQIGLNGWLRIDDQTVKVINQYQVVKPTAERTAYLLYYRRVDLL

SEQ ID NO: 20781 - protein, 7 aa, Artificial Sequence
  Synthetic polypeptide
SQSCWRM

SEQ ID NO: 20782 - protein, 132 aa, Artificial Sequence
  Synthetic polypeptide
RQCGLAADYGVEALAMLPGSCVITELLENVTLIHKPVSLQPRGLINKGNWCYINATLQALVACPPMYHLMKFIPLYSKVQRPCTSTPMIDSFVRLMNEFTNMPVPPKPRQALGDKIVRDIRPGAAFEPTYIY

SEQ ID NO: 20783 - protein, 18 aa, Artificial Sequence
  Synthetic polypeptide
GPGYATWLLCDHRVAGEC

SEQ ID NO: 20784 - protein, 30 aa, Artificial Sequence
  Synthetic polypeptide
RQCGLAADYGVEALAMLPGSCVITELLENV

SEQ ID NO: 20785 - protein, 210 aa, Artificial Sequence
  Synthetic polypeptide
RQCGLAADYGVEALAMLPGSCVITELLENVTLIHKPVSLQPRGLINKGNWCYINATLQALVACPPMYHLMKFIPLYSKVQRPCTSTPMIDSFVRLMNEFTNMPVPPKPRQALGDKIVRDIRPGAAFEPTYIYRLLTVNKSSLSEKGRQEDAEEYLGFILNGLHEEMLNLKKLLSPSNEKLTISNGPKNHSVNEEEQEEQAIFHVAVGYPV

SEQ ID NO: 20786 - protein, 21 aa, Artificial Sequence
  Synthetic polypeptide
IHAGQIRTQTLVSFGTQIFAS

SEQ ID NO: 20787 - protein, 37 aa, Artificial Sequence
  Synthetic polypeptide
PFHNVYLCQNITVPSKYMLDKSGRKPSSALEHKYLPV

SEQ ID NO: 20788 - protein, 38 aa, Artificial Sequence
  Synthetic polypeptide
FDRSTMYTCVKTSLYPVNTCWTNQDANPRQLWNTNICQ

SEQ ID NO: 20789 - protein, 22 aa, Artificial Sequence
  Synthetic polypeptide
GKVWWPTPGSQHFRRPSQCFGV

SEQ ID NO: 20790 - protein, 22 aa, Artificial Sequence
  Synthetic polypeptide
ARCGGLHLDPSTFGGQASVLGF

SEQ ID NO: 20791 - protein, 22 aa, Artificial Sequence
  Synthetic polypeptide
QGVVAYTWIPALSEAKPVFWGL

SEQ ID NO: 20792 - protein, 114 aa, Artificial Sequence
  Synthetic polypeptide
RIVTGVKTWLCQYHPEDKAQPKQWLSRAERGPIVVRVDGTRAEVTATVFWDAQGILLVDFLEDQRMHPCWMHAAGTTAGGSAVMSACCPSSSSSRPPTRTSYRLLQRVCCPSAS

SEQ ID NO: 20793 - protein, 24 aa, Artificial Sequence
  Synthetic polypeptide
TFWRTKECTPAGCMLLAQLLADLR

SEQ ID NO: 20794 - protein, 86 aa, Artificial Sequence
  Synthetic polypeptide
TWSHRGKSGWDKSRGHGNSFLGCSRHFACRLSGGPKNAPLLDACCWHNCWRICGDECLLSKFQQLQAPYQDQLPAPAARLLPLGLL

SEQ ID NO: 20795 - protein, 105 aa, Artificial Sequence
  Synthetic polypeptide
TWSHRGKSGWDKSRGHGNSFLGCSRHFACRLSGGPKNAPLLDACCWHNCWRICGDECLLSKFQQLQAPYQDQLPAPAARLLPLGLLTLLQAIPRVIMAIRQCFGV

SEQ ID NO: 20796 - protein, 3 aa, Artificial Sequence
  Synthetic polypeptide
PTW

SEQ ID NO: 20797 - protein, 40 aa, Artificial Sequence
  Synthetic polypeptide
AGRGGSRLYPSTLEGRGGWITKSGVRDQPDQHGDNRTIQG

SEQ ID NO: 20798 - protein, 125 aa, Artificial Sequence
  Synthetic polypeptide
PDAVAHACIPALWKAEAGGSRSQGFETSLTNMVIIERYKGEKQLPVLDKTKFLVPDHVNMSELIKIIRRRLQLNANQAFFLLVNGHSMVSVSTPISEVYESEKDEDGFLYMVYASQETFGMKLSV

SEQ ID NO: 20799 - protein, 75 aa, Artificial Sequence
  Synthetic polypeptide
PDAVAHACIPALWKAEAGGSRSQGFETSLTNMVIIERYKGEKQLPVLDKTKFLVPDHVNMSELIKIIRYSVTFVS

SEQ ID NO: 20800 - protein, 102 aa, Artificial Sequence
  Synthetic polypeptide
GDLTGVSGSLQGKRPRFCVDCCVGVRAEEKNGITSTTTTCMPLIWTPSHGASCPRQGRGPHPDQAARCPSLPRAASSSMGATRNRELRKTWTRAHGTQTCSC

SEQ ID NO: 20801 - protein, 17 aa, Artificial Sequence
  Synthetic polypeptide
EQRRKMGLHLLQRRVCL

SEQ ID NO: 20802 - protein, 332 aa, Artificial Sequence
  Synthetic polypeptide
LLCWCKSRGEKWDYIYYNDVYAFNLDTFTWSKLSPSGTGPTPRSGCQMSVTPQGGIVVYGGYSKQRVKKDVDKGTRHSDMFLLKPEDGREDKWVWTRMNPSGVKPTPRSGFSVAMAPNHQTLFFGGVCDEEEEESLSGEFFNDLYFYDATRNRWFEGQLKGPKSEKKKRRRGRKEEPEGGSRPACGGAGTQGPVQLVKEVVAEDGTVVTIKQVLTAPGSAGQPRSEDEDSLEEAGSPAPGPCPRSNAMLAVKHGVLYVYGGMFEAGDRQVTLSDLHCLDLHRMEAWKALVEMDPETQEWLEETDSEEDSEEVEGAEGGVDDEDSGEESGAED

SEQ ID NO: 20803 - protein, 236 aa, Artificial Sequence
  Synthetic polypeptide
LLCWCKSRGEKWDYIYYNDVYAFNLDTFTWSKLSPSGTGPTPRSGCQMSVTPQGGIVVYGGYSKQRVKKDVDKGTRHSDMFLLKPEDGREDKWVWTRMNPSGVKPTPRSGFSVAMAPNHQTLFFGGVCDEEEEESLSGEFFNDLYFYDATRNRWFEGQLKGPKSEKKKRRRGRKEEPEGGSRPACGGAGTQGPVQLVKEVVAEDGTVVTIKQVLTAPGSAGQPRSEDEDSLEEAGS

SEQ ID NO: 20804 - protein, 35 aa, Artificial Sequence
  Synthetic polypeptide
GDLTGVSGSLQGKRPRFCVDCCVGGLHLLQRRVCL

SEQ ID NO: 20805 - protein, 341 aa, Artificial Sequence
  Synthetic polypeptide
LASLARCRESGHVSVLIVVLVDYIYYNDVYAFNLDTFTWSKLSPSGTGPTPRSGCQMSVTPQGGIVVYGGYSKQRVKKDVDKGTRHSDMFLLKPEDGREDKWVWTRMNPSGVKPTPRSGFSVAMAPNHQTLFFGGVCDEEEEESLSGEFFNDLYFYDATRNRWFEGQLKGPKSEKKKRRRGRKEEPEGGSRPACGGAGTQGPVQLVKEVVAEDGTVVTIKQVLTAPGSAGQPRSEDEDSLEEAGSPAPGPCPRSNAMLAVKHGVLYVYGGMFEAGDRQVTLSDLHCLDLHRMEAWKALVEMDPETQEWLEETDSEEDSEEVEGAEGGVDDEDSGEESGAED

SEQ ID NO: 20806 - protein, 75 aa, Artificial Sequence
  Synthetic polypeptide
LLCWWITSTTTTCMPLIWTPSHGASCPRQGRGPHPDQAARCPSLPRAASSSMGATRNRELRKTWTRAHGTQTCSC

SEQ ID NO: 20807 - protein, 245 aa, Artificial Sequence
  Synthetic polypeptide
LASLARCRESGHVSVLIVVLVDYIYYNDVYAFNLDTFTWSKLSPSGTGPTPRSGCQMSVTPQGGIVVYGGYSKQRVKKDVDKGTRHSDMFLLKPEDGREDKWVWTRMNPSGVKPTPRSGFSVAMAPNHQTLFFGGVCDEEEEESLSGEFFNDLYFYDATRNRWFEGQLKGPKSEKKKRRRGRKEEPEGGSRPACGGAGTQGPVQLVKEVVAEDGTVVTIKQVLTAPGSAGQPRSEDEDSLEEAGS

SEQ ID NO: 20808 - protein, 16 aa, Artificial Sequence
  Synthetic polypeptide
SQEFETSLANMCCSRP

SEQ ID NO: 20809 - protein, 75 aa, Artificial Sequence
  Synthetic polypeptide
PGTVAHTCNPSTWEAEAGGSPEVRSSRPAWPTCAAHGRELLQREGRHPGPGCLCRRQAPGPGPDHPAGLRPDREG

SEQ ID NO: 20810 - protein, 360 aa, Artificial Sequence
  Synthetic polypeptide
QALWLTPVIPALGRPRQADHLKSGVRDQPGQHVLLTAVNCYSVKAATRVQDAFAAAKLLALALIILLGFVQIGKGDVSNLDPNFSFEGTKLDVGNIVLALYSGLFAYGGWNYLNFVTEEMINPYRNLPLAIIISLPIVTLVYVLTNLAYFTTLSTEQMLSSEAVAVDFGNYHLGVMSWIIPVFVGLSCFGSVNGSLFTSSRLFFVGSREGHLPSILSMIHPQLLTPVPSLVFTCVMTLLYAFSKDIFSVINFFSFFNWLCVALAIIGMIWLRHRKPELERPIKVNLALPVFFILACLFLIAVSFWKTPVECGIGFTIILSGLPVYFFGVWWKNKPKWLLQGIFSTTVLCQKLMQVVPQET

SEQ ID NO: 20811 - protein, 14 aa, Artificial Sequence
  Synthetic polypeptide
QLTLEQHRCCRVHS

SEQ ID NO: 20812 - protein, 46 aa, Artificial Sequence
  Synthetic polypeptide
PLNNTGAAGCTADRRGLLGPRGGGRGWVATPGQRHPGSVRAAGASE

SEQ ID NO: 20813 - protein, 74 aa, Artificial Sequence
  Synthetic polypeptide
TTQVLQGAQLIAVASSDPAAAGVDGSPLQGSDIQVQYVQLAPVSDHTAGAQTAEALQPTLQPEMQLEHGAIQIQ

SEQ ID NO: 20814 - protein, 180 aa, Artificial Sequence
  Synthetic polypeptide
GRASPHHRGHRGHSWALHPVVLWCLLHCGGRVCVPAGVPPGEEEEGLHHGALGTEVHDRRGEAVRALYQELLCSGRPASPALGARRLPAGHHPWDRLPGHCERHLPTGGCAWRAVDAHRAQAPGAAADRRHHQAAAQQPPAAAPGRGPQEAQRGGGCGGGGGTPGRSPGQPHPGDRRGRV

SEQ ID NO: 20815 - protein, 179 aa, Artificial Sequence
  Synthetic polypeptide
AGQVLITGGIVATAGRFTQWYFGAYSIVAGVFVCLLEYPRGKRKKGSTMERWGQKYMTAVVKLFGPFTRNYYVRAVLHLLLSVPAGFLLATILGTACLAIASGIYLLAAVRGEQWTPIEPKPRERPQIGGTIKQPPSNPPPRPPAEARKKPSEEEAAVAAGGPPGGPQVNPIPVTDEVV

SEQ ID NO: 20816 - protein, 56 aa, Artificial Sequence
  Synthetic polypeptide
QGKSSSPGASWPQLGASPSGTLVPTPLWRACLCACWSTPGGRGRRAPPWSAGDRST

SEQ ID NO: 20817 - protein, 118 aa, Artificial Sequence
  Synthetic polypeptide
GRASPHHRGHRGHSWALHPVVLWCLLHCGGRVCVPAGVPPGEEEEGLHHGALGTEVHDRRGEAVRALYQELLCSGRPASPALGARRLPAGHHPWDRLPGHCERHLPTGGCAWRAVDAH

SEQ ID NO: 20818 - protein, 117 aa, Artificial Sequence
  Synthetic polypeptide
AGQVLITGGIVATAGRFTQWYFGAYSIVAGVFVCLLEYPRGKRKKGSTMERWGQKYMTAVVKLFGPFTRNYYVRAVLHLLLSVPAGFLLATILGTACLAIASGIYLLAAVRGEQWTP

SEQ ID NO: 20819 - protein, 153 aa, Artificial Sequence
  Synthetic polypeptide
GRASPHHRGHRGHSWALHPVVLWCLLHCGGRVCVPAGVPPGEEEEGLHHGALGTEVHDRRGEAVRALYQELLCSGRPASPALGARRLPAGHHPWDRLPGHCERHLPTEPSPSCPQRQLPSPCCASSSVCAWERCSTFCVRLPRMEVEFCFKPH

SEQ ID NO: 20820 - protein, 194 aa, Artificial Sequence
  Synthetic polypeptide
AGQVLITGGIVATAGRFTQWYFGAYSIVAGVFVCLLEYPRGKRKKGSTMERWGQKYMTAVVKLFGPFTRNYYVRAVLHLLLSVPAGFLLATILGTACLAIASGIYLLSQVPPARRGNCPPLAVRLLVCVRGKGAALSVYAFRVWKWSSVSSLTDLPPAELSFRTPSCCQVLIWAVALFSGGHPHPPRLPAATHS

SEQ ID NO: 20821 - protein, 113 aa, Artificial Sequence
  Synthetic polypeptide
GRASPHHRGHRGHSWALHPVVLWCLLHCGGRVCVPAGVPPGEEEEGLHHGALGTEVHDRRGEAVRALYQELLCSGRPASPALGARRLPAGHHPWDRLPGHCERHLPTGEWRPL

SEQ ID NO: 20822 - protein, 112 aa, Artificial Sequence
  Synthetic polypeptide
AGQVLITGGIVATAGRFTQWYFGAYSIVAGVFVCLLEYPRGKRKKGSTMERWGQKYMTAVVKLFGPFTRNYYVRAVLHLLLSVPAGFLLATILGTACLAIASGIYLLVSGAL

SEQ ID NO: 20823 - protein, 91 aa, Artificial Sequence
  Synthetic polypeptide
GRASPHHRGHRGHSWALHPVVLWCLLHCGGRVCVPAGVPPGEEEEGLHHGALGTEVHDRRGEAVRALYQELLCSGRPASPGLCLLSSVQDL

SEQ ID NO: 20824 - protein, 129 aa, Artificial Sequence
  Synthetic polypeptide
AGQVLITGGIVATAGRFTQWYFGAYSIVAGVFVCLLEYPRGKRKKGSTMERWGQKYMTAVVKLFGPFTRNYYVRAVLHLLACVCCLVCRICKDPLQIRGAPIRRQGLGLSVPAGFLLATILGTACLAIA

SEQ ID NO: 20825 - protein, 68 aa, Artificial Sequence
  Synthetic polypeptide
DQPGQHKIPAAQRAEEEEDRQVRHGWPHHPLPHRHHLVPTALHVAGALRGWGCQPAHRCHRHPEAGRL

SEQ ID NO: 20826 - protein, 394 aa, Artificial Sequence
  Synthetic polypeptide
QLMPMVPALWEAKGGGSVEARSFKTSLGNIKYPQPKGQKKKKIVKYGMGGLIILFLIAIIWFPLLFMSLVRSVVGVVNQPIDVTVTLKLGGYEPLFTMSAQQPSIIPFTAQAYEELSRQFDPQPLAMQFISQYSPEDIVTAQIEGSSGALWRISPPSRAQMKRELYNGTADITLRFTWNFQRDLAKGGTVEYANEKHMLALAPNSTARRQLASLLEGTSDQSVVIPNLFPKYIRAPNGPEANPVKQLQPNEEADYLGVRIQLRREQGAGATGFLEWWVIELQECRTDCNLLPMVIFSDKVSPPSLGFLAGYGIMGLYVSIVLVIGKFVRGFFSEISHSIMFEELPCVDRILKLCQDIFLVRETRELELEEELYAKLIFLYRSPETMIKWTREKE

SEQ ID NO: 20827 - protein, 378 aa, Artificial Sequence
  Synthetic polypeptide
QLMPMVPALWEAKGGGSVEARSFKTSLGNIKYPQPKGQKKKKIVKYGMGGLIILFLIAIIWFPLLFMSLVRSVVGVVNQPIDVTVTLKLGGYEPLFTMSAQQPSIIPFTAQAYEELSRQFDPQPLAMQFISQYSPEDIVTAQIEGSSGALWRISPPSRAQMKRELYNGTADITLRFTWNFQRDLAKGGTVEYANEKHMLALAPNSTARRQLASLLEGTSDQSVVIPNLFPKYIRAPNGPEANPVKQLQPNEEADYLGVRIQLRREQGAGATGFLEWWVIELQECRTDCNLLPMVIFSDKHHGAVRVHRAGHRQVRARILQRDLALHYVRGAAVRGPHPQALPGHLPGAGDSGAGAGGGVVRQAHLPLPLTGDHDQVDS

SEQ ID NO: 20828 - protein, 8 aa, Artificial Sequence
  Synthetic polypeptide
DQPGQHSS

SEQ ID NO: 20829 - protein, 39 aa, Artificial Sequence
  Synthetic polypeptide
QLMPMVPALWEAKGGGSVEARSFKTSLGNIVHEDLPVFF

SEQ ID NO: 20830 - protein, 56 aa, Artificial Sequence
  Synthetic polypeptide
NRWRLGVHEIRPRLPRLPLWPLPGPGAWTGLRAHPKAGEAARPHSVGLLFPGVREG

SEQ ID NO: 20831 - protein, 123 aa, Artificial Sequence
  Synthetic polypeptide
ESMKYGLDSRGFLFGPSLAQELGLGCVLIRKRGKLPGPTLWASYSLEYGKAELEIQKDALEPGQRVVVVDDLLATGGTMNAACELLGRLQAEVLECVSLVELTSLKGREKLAPVPFFSLLQYE

SEQ ID NO: 20832 - protein, 3 aa, Artificial Sequence
  Synthetic polypeptide
NTA

SEQ ID NO: 20833 - protein, 61 aa, Artificial Sequence
  Synthetic polypeptide
NRWRLGVHEIRPRLPRLPLWPLPGPGAWTGLRAHPKAGEAARPHSVGLLFPGVREAVFQPH

SEQ ID NO: 20834 - protein, 91 aa, Artificial Sequence
  Synthetic polypeptide
ESMKYGLDSRGFLFGPSLAQELGLGCVLIRKRGKLPGPTLWASYSLEYGKLCFSHTEPNYTQRENAVNSFPTRAVSCPPVPQGREPQDNTR

SEQ ID NO: 20835 - protein, 77 aa, Artificial Sequence
  Synthetic polypeptide
ESMKYGLDSRGFLFGPSLAQELGLGCVLIRKRGKLPGPTLWASYSLEYGKAELEIQKDALEPGQRVVVVDDLLATGV

SEQ ID NO: 20836 - protein, 105 aa, Artificial Sequence
  Synthetic polypeptide
ESMKYGLDSRGFLFGPSLAQELGLGCVLIRKRGKLPGPTLWASYSLEYGKAELEIQKDALEPGQRVVVVDDLLATGGAGLEHLLSAAQANWGPHPPIPRNHERCL

SEQ ID NO: 20837 - protein, 25 aa, Artificial Sequence
  Synthetic polypeptide
IAWWKEDSAALTDCVIFGCPSPSCA

SEQ ID NO: 20838 - protein, 214 aa, Artificial Sequence
  Synthetic polypeptide
SLAALLRAVRRFRGKAVWERPLHGLWCCSGQEDPKRWVGSSSPISKEKLPNAETEKFWMFYRFDAIRTFGFLSRLKLAQTALTVVALPPGYYLYSQGLLTLNTVCLMSGISGFALTMLCWMSYFLRRLVGILYLNESGTMLRVAHLNFWGWRQDTYCPMADVIPLTETKDRPQEMFVRIQRYSGKQTFYVTLRYGRILDRERFTQVFGVHQMLK

SEQ ID NO: 20839 - protein, 77 aa, Artificial Sequence
  Synthetic polypeptide
LCDLWLPFSELCVGFGEKLCGKGLSMGCGAAVGRRILRGGWAAVHPSRRRNYQTQRLRNSGCFTVLMPSEPSGSCHD

SEQ ID NO: 20840 - protein, 17 aa, Artificial Sequence
  Synthetic polypeptide
EPCLTTAVCLSPSGQES

SEQ ID NO: 20841 - protein, 613 aa, Artificial Sequence
  Synthetic polypeptide
NLVSPQLCVSAPVDRKAKASAMPDSPAEVKTQPRSTPPSMPPPPPAASQGATRPPSFTPHTHREDGPATLPHGRFHGCLKWSMVCLLMNGSSHSPTAINGAPCTPNGFSNGPATSSTASLSTQHLPPACGARQLSKLKRFLTTLQQFGSDISPEIGERVRTLVLGLVNSTLTIEEFHSKLQEATNFPLRPFVIPFLKANLPLLQRELLHCARLAKQTPAQYLAQHEQLLLDASASSPIDSSELLLEVNENGKRRTPDRTKENGSDRDPLHPEHLSKRPCTLNPAQRYSPSNGPPQPTPPPHYRLEDIAMAHHFRDAYRHPDPRELRERHRPLVVPGSRQEEVIDHKLTEREWAEEWKHLNNLLNCIMDMVEKTRRSLTVLRRCQEADREELNHWARRYSDAEDTKKGPAPAAARPRSSSAGPEGPQLDVPREFLPRTLTGYVPEDIWRKAEEAVNEVKRQAMSELQKAVSDAERKAHELITTERAKMERALAEAKRQASEDALTVINQQEDSSESCWNCGRKASETCSGCNAARYCGSFCQHRDWEKHHHVCGQSLQGPTAVVADPVPGPPEAAHSLGPSLPVGAASPSEAGSAGPSRPGSPSPPGPLDTVPR

SEQ ID NO: 20842 - protein, 28 aa, Artificial Sequence
  Synthetic polypeptide
TLSHHSCVSQPQWTGKLRPQRCRTPQRR

SEQ ID NO: 20843 - protein, 575 aa, Artificial Sequence
  Synthetic polypeptide
NLVSPQLCVSAPVDRKAKASAMPDSPAEVKTQPRSTPPSMPPPPPAASQGATRPPSFTPHTLMNGSSHSPTAINGAPCTPNGFSNGPATSSTASLSTQHLPPACGARQLSKLKRFLTTLQQFGSDISPEIGERVRTLVLGLVNSTLTIEEFHSKLQEATNFPLRPFVIPFLKANLPLLQRELLHCARLAKQTPAQYLAQHEQLLLDASASSPIDSSELLLEVNENGKRRTPDRTKENGSDRDPLHPERYSPSNGPPQPTPPPHYRLEDIAMAHHFRDAYRHPDPRELRERHRPLVVPGSRQEEVIDHKLTEREWAEEWKHLNNLLNCIMDMVEKTRRSLTVLRRCQEADREELNHWARRYSDAEDTKKGPAPAAARPRSSSAGPEGPQLDVPREFLPRTLTGYVPEDIWRKAEEAVNEVKRQAMSELQKAVSDAERKAHELITTERAKMERALAEAKRQASEDALTVINQQEDSSESCWNCGRKASETCSGCNAARYCGSFCQHRDWEKHHHVCGQSLQGPTAVVADPVPGPPEAAHSLGPSLPVGAASPSEAGSAGPSRPGSPSPPGPLDTVPR

SEQ ID NO: 20844 - protein, 90 aa, Artificial Sequence
  Synthetic polypeptide
NLVSPQLCVSAPVDRKAKASAMPDSPAEVKTQPRSTPPSMPPPPPAASQGATRPPSFTPHTLMNGSSHSPTAINGAPCTPNGFSNGPATS

SEQ ID NO: 20845 - protein, 723 aa, Artificial Sequence
  Synthetic polypeptide
TQEVEVAVSQDHTTALQPGQQSEMPSQKLRAFALDLGGSTLEDPTDLEIVVVDQNDNRPAFLQEAFTGRVLEGAVPGTYVTRAEATDADDPETDNAALRFSILQQGSPELFSIDELTGEIRTVQVGLDREVVAVYNLTLQVADMSGDGLTATASAIITLDDINDNAPEFTRDEFFMEAIEAVSGVDVGRLEVEDRDLPGSPNWVARFTILEGDPDGQFTIRTDPKTNEGVLSIVKALDYESCEHYELKVSVQNEAPLQAAALRAERGQAKVRVHVQDTNEPPVFQENPLRTSLAEGAPPGTLVATFSARDPDTEQLQRLSYSKDYDPEDWLQVDAATGRIQTQHVLSPASPFLKGGWYRAIVLAQDDASQPRTATGTLSIEILEVNDHAPVLAPPPPGSLCSEPHQGPGLLLGATDEDLPPHGAPFHFQLSPRLPELGRNWSLSQVNVSHARLRPRHQVPEGLHRLSLLLRDSGQPPQQREQPLNVTVCRCGKDGVCLPGAAALLAGGTGLSLGALVIVLASALLLLVLVLLVALRARFWKQSRGKGLLHGPQDDLRDNVLNYDEQGGGEEDQDAYDISQLRHPTALSLPLGPPPLRRDAPQGRLHPQPPRVLPTSPLDIADFINDGLEAADSDPSVPPYDTALIYDYEGDGSVAGTLSSILSSQGDEDQDYDYLRDWGPRFARLADMYGHPCGLEYGARWDHQAREGLSPGALLPRHRGRTA

SEQ ID NO: 20846 - protein, 20 aa, Artificial Sequence
  Synthetic polypeptide
AKITPLHSSLGNRARCHLKS

SEQ ID NO: 20847 - protein, 68 aa, Artificial Sequence
  Synthetic polypeptide
SQLVGRLRQENHLNPGSGGCSEPRSHHCTPAWATERDAISKAKSVCPGPGRIHPGGPHGPGDCSCGSE

SEQ ID NO: 20848 - protein, 355 aa, Artificial Sequence
  Synthetic polypeptide
YRMGTTDHVIVLASTNRADILDGALMRPGRLDRHVFIDLPTLQERREIFEQHLKSLKLTQSSTFYSQRLAELTPGFSGADIANICNEAALHAAREGHTSVHTLNFEYAVERVLAGTAKKSKILSKEEQKVVAFHESGHALVGWMLEHTEAVMKVSITPRTNAALGFAQMLPRDQHLFTKEQLFERMCMALGGRASEALSFNEVTSGAQDDLRKVTRIAYSMVKQFGMAPGIGPISFPEAQEGLMGIGRRPFSQGLQQMMDHEARLLVAKAYRHTEKVLQDNLDKLQALANALLEKEVINYEDIEALIGPPPHGPKKMIAPQRWIDAQREKQDLGEEETEETQQPPLGGEEPTWPK

SEQ ID NO: 20849 - protein, 33 aa, Artificial Sequence
  Synthetic polypeptide
RKVRRARLSIEWVPQTMSSSWRPRTELTFWTVL

SEQ ID NO: 20850 - protein, 23 aa, Artificial Sequence
  Synthetic polypeptide
EEPGLVSNGYHRPCHRPGVHEPS

SEQ ID NO: 20851 - protein, 71 aa, Artificial Sequence
  Synthetic polypeptide
YRMGTTDHVIVLASTNRADILDGALMRPGRLDRHVFIDLPTLQRKGVALSPRLECSAAITTHCGLNLQGSS

SEQ ID NO: 20852 - protein, 27 aa, Artificial Sequence
  Synthetic polypeptide
HRCPSVEHTHRNGYHRPCHRPGVHEPS

SEQ ID NO: 20853 - protein, 418 aa, Artificial Sequence
  Synthetic polypeptide
LHLYEIVKITKFWGWRTGYWLSAVRGGLQGGGMPLGRAVLCLEGRCSLCERACDTGVHLWSTHTGMGTTDHVIVLASTNRADILDGALMRPGRLDRHVFIDLPTLQERREIFEQHLKSLKLTQSSTFYSQRLAELTPGFSGADIANICNEAALHAAREGHTSVHTLNFEYAVERVLAGTAKKSKILSKEEQKVVAFHESGHALVGWMLEHTEAVMKVSITPRTNAALGFAQMLPRDQHLFTKEQLFERMCMALGGRASEALSFNEVTSGAQDDLRKVTRIAYSMVKQFGMAPGIGPISFPEAQEGLMGIGRRPFSQGLQQMMDHEARLLVAKAYRHTEKVLQDNLDKLQALANALLEKEVINYEDIEALIGPPPHGPKKMIAPQRWIDAQREKQDLGEEETEETQQPPLGGEEPTWPK

SEQ ID NO: 20854 - protein, 78 aa, Artificial Sequence
  Synthetic polypeptide
QNSGDGERVTGCQQLGEVSREEGCLWGGRFCVLRGDARYVNVRVTQVSICGAHTQEWVPQTMSSSWRPRTELTFWTVL

SEQ ID NO: 20855 - protein, 134 aa, Artificial Sequence
  Synthetic polypeptide
LHLYEIVKITKFWGWRTGYWLSAVRGGLQGGGMPLGRAVLCLEGRCSLCERACDTGVHLWSTHTGMGTTDHVIVLASTNRADILDGALMRPGRLDRHVFIDLPTLQRKGVALSPRLECSAAITTHCGLNLQGSS

SEQ ID NO: 20856 - protein, 244 aa, Artificial Sequence
  Synthetic polypeptide
NPISTENTKISWAWWQMPVIPATQEAEAGESLEPGRRRLHDKRFSALGFGARIPPKYEVSHDFAINFNPEDDECEGIQGVVEAYQNCLPRVQLYGPTNVAPIISKVARVAAAEESTGKASQYYILLILTDGVVTDMADTREAIVRASRLPMSIIIVGVGNADFTDMQVLDGDDGVLRSPRGEPALRDIVQFVPFRELKNASPAALAKCVLAEVPKQVVEYYSHRGLPPRSLGVPAGEASPGCTP

SEQ ID NO: 20857 - protein, 106 aa, Artificial Sequence
  Synthetic polypeptide
SQLLRRLRQENHWNPGGGGYMTRGFPLWGLEPGSLPSMRCPMTLPSISTLRTMSVKASRAWWRPTRTACPGSSSTAPPTWRPSSPRWHAWRRPRRAPGKPLNTTSC

SEQ ID NO: 20858 - protein, 139 aa, Artificial Sequence
  Synthetic polypeptide
NPISTENTKISWAWWQMPVIPATQEAEAGESLEPGRRRLHDKRFSALGFGARIPPKYEVSHDFAINFNPEDDECEGIQGVVEAYQNCLPRVQLYGPTNVAPIISKVARVAAAEESTGKASQYYILLILTDGVVTDMADT

SEQ ID NO: 20859 - protein, 136 aa, Artificial Sequence
  Synthetic polypeptide
NPISTENTKISWAWWQMPVIPATQEAEAGESLEPGRRRLHDKRFSALGFGARIPPKYEVSHDFAINFNPEDDECEAILHPADPDGRRGDRHGRHTGGHCACLTPAHVHHHRGRGQRRLHRHAGPGRRRRRPALPTG

SEQ ID NO: 20860 - protein, 117 aa, Artificial Sequence
  Synthetic polypeptide
SQLLRRLRQENHWNPGGGGYMTRGFPLWGLEPGSLPSMRCPMTLPSISTLRTMSVKQYYILLILTDGVVTDMADTREAIVRASRLPMSIIIVGVGNADFTDMQVLDGDDGVLRSPRG

SEQ ID NO: 20861 - protein, 216 aa, Artificial Sequence
  Synthetic polypeptide
GWARWLTPVIPALWEAEAGGSQDTLFQLKFTAKQLEKLAKKAEKDSKAEQAKVKKALLQKNVECARVYAENAIRKKNEGVNWLRMASRVDAVASKVQTAVTMKGVTKNMAQVTKALDKALSTMDLQKVSSVMDRFEQQVQNLDVHTSVMEDSMSSATTLTTPQEQVDSLIMQIAEENGLEVLDQLSQLPEGASAVGESSVRSQEDQLSRRLAALRN

SEQ ID NO: 20862 - protein, 18 aa, Artificial Sequence
  Synthetic polypeptide
SQHFGRPRPADRKIPCSS

SEQ ID NO: 20863 - protein, 216 aa, Artificial Sequence
  Synthetic polypeptide
MGAVAHACNPSTLGGRGRRIARYPVPVEVHGEAAGEAGQEGGEGLQGGAGQSEEGPSAEKCRVCPCVCRERHPQEERRCELASDGVPRRRSGLQGADSCDYEGGDQEYGPGDQSPGQGPEHHGPAEGLLSDGQVRAAGAEPGRPYIGDGGLHELGHHPDHAAGAGGQPHHADRRGEWPGGAGPAQPAARGRLCRGRELCAQPGGPAVTEVGRLEEL

SEQ ID NO: 20864 - protein, 207 aa, Artificial Sequence
  Synthetic polypeptide
GWARWLTPVIPALWEAEAGGSQDTLFQLKFTAKQLEKLAKKAEKDSKAEQAKVKKALLQKNVECARVYAENAIRKKNEGVNWLRMASRVDAVASKVTKNMAQVTKALDKALSTMDLQKVSSVMDRFEQQVQNLDVHTSVMEDSMSSATTLTTPQEQVDSLIMQIAEENGLEVLDQLSQLPEGASAVGESSVRSQEDQLSRRLAALRN

SEQ ID NO: 20865 - protein, 207 aa, Artificial Sequence
  Synthetic polypeptide
MGAVAHACNPSTLGGRGRRIARYPVPVEVHGEAAGEAGQEGGEGLQGGAGQSEEGPSAEKCRVCPCVCRERHPQEERRCELASDGVPRRRSGLQGDQEYGPGDQSPGQGPEHHGPAEGLLSDGQVRAAGAEPGRPYIGDGGLHELGHHPDHAAGAGGQPHHADRRGEWPGGAGPAQPAARGRLCRGRELCAQPGGPAVTEVGRLEEL

SEQ ID NO: 20866 - protein, 201 aa, Artificial Sequence
  Synthetic polypeptide
GWARWLTPVIPALWEAEAGGSQDTLFQLKFTAKQLEKLAKKAEKDSKAEQAKVKKALLQKNVECARVYAENAIRKKNEGVNWLRMASRVDAVASKVQTAVTMKGVTKNMAQVTKALDKALSTMDLQKVSSVMDRFEQQVQNLDVHTSVCGPYPWGCGLGTRSVCGQLIGRGGSQADVLSLHTCGCSLTSPSILCAGSLPGP

SEQ ID NO: 20867 - protein, 174 aa, Artificial Sequence
  Synthetic polypeptide
MGAVAHACNPSTLGGRGRRIARYPVPVEVHGEAAGEAGQEGGEGLQGGAGQSEEGPSAEKCRVCPCVCRERHPQEERRCELASDGVPRRRSGLQGADSCDYEGGDQEYGPGDQSPGQGPEHHGPAEGLLSDGQVRAAGAEPGRPYIGMWPLPLGLWPGDKERVWAAHREGWLTG

SEQ ID NO: 20868 - protein, 345 aa, Artificial Sequence
  Synthetic polypeptide
QWLTPVISAIWEAELGRCRSVKEFEKLNRIGEGTYGIVYRARDTQTDEIVALKKVRMDKEKDGIPISSLREITLLLRLRHPNIVELKEVVVGNHLESIFLVMGYCEQDLASLLENMPTPFSEAQVKCIVLQVLRGLQYLHRNFIIHRDLKVSNLLMTDKGCVKTADFGLARAYGVPVKPMTPKVVTLWYRAPELLLGTTTQTTSIDMWAVGCILAELLAHRPLLPGTSEIHQIDLIVQLLGTPSENIWPGFSKLPLVGQYSLRKQPYNNLKHKFPWLSEAGLRLLHFLFMYDPKKRATAGDCLESSYFKEKPLPCEPELMPTFPHHRNKRAAPATSEGQSKRCKP

SEQ ID NO: 20869 - protein, 14 aa, Artificial Sequence
  Synthetic polypeptide
SQQSGRLSWDDAGV

SEQ ID NO: 20870 - protein, 21 aa, Artificial Sequence
  Synthetic polypeptide
QWLTPVISAIWEAELGRCRSV

SEQ ID NO: 20871 - protein, 340 aa, Artificial Sequence
  Synthetic polypeptide
GQVRWLTPVIPALREAKTFSGGYVHVLKGVLSDDLLLKSFQKMGYVRRDSHRLMVTALPPACQLVQVALGCFALRLECEILGEVLAQLGTSVLPAEELLQARRASGDVASCVAWLQQRLAQDEEPPPLPPRGSPAAYRAPLDLYRDLQEDEGSEDASLYGEPSPGPDSPPAELAYRPPLWEQSAKLWGTGGRAWEPPAEELPQASSPPYGALEEGLEPEPSAFSFLSLRRELSRPGDLATPESSAAASPRRIRAEGVPASAYRSVSEPPGYQAHSCLSPGALPTLCCDTCRQLHAAHCAALPACRPGHSLRVLLGDAQRRLWLQRAQMDTLLYNSPGARP

SEQ ID NO: 20872 - protein, 17 aa, Artificial Sequence
  Synthetic polypeptide
SQHFGRPRPSLGATCTC

SEQ ID NO: 20873 - protein, 77 aa, Artificial Sequence
  Synthetic polypeptide
PGAVAHTCNPSTSGGQDLLWGLRARAEGCALRRPPPEELPEDGLRTQRQPSAHGDRPAPRLPAGAGGPGLLRPPAGV

SEQ ID NO: 20874 - protein, 68 aa, Artificial Sequence
  Synthetic polypeptide
GQVRWLTPVIPALREAKTFSGGYVHVLKGVLSDDLLLKSFQKMGYVRRDSHRLMLCWSQSAGLCRVHG

SEQ ID NO: 20875 - protein, 68 aa, Artificial Sequence
  Synthetic polypeptide
PGAVAHTCNPSTSGGQDLLWGLRARAEGCALRRPPPEELPEDGLRTQRQPSAHALLEPICGALPGARL

SEQ ID NO: 20876 - protein, 96 aa, Artificial Sequence
  Synthetic polypeptide
GQVRWLTPVIPALREAKTFSGGYVHVLKGVLSDDLLLKSFQKMGYVRRDSHRLMVTALPPACQLVQVALGCFALRLECEILGEVLAQLGTSVLPAE

SEQ ID NO: 20877 - protein, 620 aa, Artificial Sequence
  Synthetic polypeptide
MGAVVHACNPDTLGGPGGGSPEEAYTEYLRSIHYISQVLLEEVETTKEAGETVPPDTSKMLKLAQQCLERAQSTAAKLGKTRLKPTMPAAAPIPQPAGRHRRVYSDEGGKLSPFLPPEIFQKLQGAESQSCKKELTPLEEASLQNQKLKAAYEARMARLDPSQAMQKTSLTLSLQRQMMENLVIAKAREETLQRKMEERRLRLQEAANRRFCSQVALTPEEREQRALYAAILEYEQDHDWPKHWKAKLKRNPGDLSLVTSLVSHLLSLPDHPIAQLLRRLQCSVYSALYPAVSRAAAPAPGCCPPTPNPGSRRLRPSQSLHCMLSPPEPSAAPRPQDSPPTPPLQPGPVGSPSPLGDTASGLPDKDSSFEDLEQFLGTSERQGRGRGVQPEPQLQQLKTAVEEIHNAVDRLLSLTLLAFEGLNTAASKDRCLACIEEPFFSPLWPLLLALYRSVHRAREAALSRSMELYRNAPPTAIGIPTKLLPQNPEAKGATGYPYCAAAQELGLLVLESCPQKKLECIVRTLRIICVCAEDYCPTPEATPQAGPPPIAAAAIGADDLLPILSFVVLRSGLPQLVSECAALEEFIHEGYLIGEEGYCLTSLQSALSYVELLPRGGLAK

SEQ ID NO: 20878 - protein, 28 aa, Artificial Sequence
  Synthetic polypeptide
WALWFTPVILTLWEAQAVDHLRRHTRNT

SEQ ID NO: 20879 - protein, 1294 aa, Artificial Sequence
  Synthetic polypeptide
SQHFGRPRQVDHESSLLLEAVWHLHVQGIVSLQELLESHPDMHAVGSWLFRNLCCLCEQMEASCQHADVARAMLSDFVQMFVLRGFQKNSDLRRTVEPEKMPQVTVDVLQRMLIFALDALAAGVQEESSTHKIVRCWFGVFSGHTLGSVISTDPLKRFFSHTLTQILTHSPVLKASDAVQMQREWSFARTHPLLTSLYRRLFVMLSAEELVGHLQEVLETQEVHWQRVLSFVSALVVCFPEAQQLLEDWVARLMAQAFESCQLDSMVTAFLVVRQAALEGPSAFLSYADWFKASFGSTRGYHGCSKKALVFLFTFLSELVPFESPRYLQVHILHPPLVPGKYRSLLTDYISLAKTRLADLKVSIENMGLYEDLSSAGDITEPHSQALQDVEKAIMVFEHTGNIPVTVMEASIFRRPYYVSHFLPALLTPRVLPKVPDSRVAFIESLKRADKIPPSLYSTYCQACSAAEEKPEDAALGVRAEPNSAEEPLGQLTAALGELRASMTDPSQRDVISAQVAVISERLRAVLGHNEDDSSVEISKIQLSINTPRLEPREHMAVDLLLTSFCQNLMAASSVAPPERQGPWAALFVRTMCGRVLPAVLTRLCQLLRHQGPSLSAPHVLGLAALAVHLGESRSALPEVDVGPPAPGAGLPVPALFDSLLTCRTRDSLFFCLKFCTAAISYSLCKFSSQSRDTLCSCLSPGLIKKFQFLMFRLFSEARQPLSEEDVASLSWRPLHLPSADWQRAALSLWTHRTFREVLKEEDVHLTYQDWLHLELEIQPEADALSDTERQDFHQWAIHEHFLPESSASGGCDGDLQAACTILVNALMDFHQSSRSYDHSENSDLVFGGRTGNEDIISRLQEMVADLELQQDLIVPLGHTPSQEHFLFEIFRRRLQALTSGWSVAASLQRQRELLMYKRILLRLPSSVLCGSSFQAEQPITARCEQFFHLVNSEMRNFCSHGGALTQDITAHFFRGLLNACLRSRDPSLMVDFILAKCQTKCPLILTSALVWWPSLEPVLLCRWRRHCQSPLPRELQKLQEGRQFASDFLSPEAASPAPNPDWLSAAALHFAIQQVREENIRKQLKKLDCEREELLVFLFFFSLMGLLSSHLTSNSTTDLPKAFHVCAAILECLEKRKISWLALFQLTESDLRLGRLLLRVAPDQHTRLLPFAFYSLLSYFHEDAAIREEAFLHVAVDMYLKLVQLFVAGDTSTVSPPAGRSLELKGQGNPVELITKARLFLLQLIPRCPKKSFSHVAELLADRGDCDPEVSAALQSRQQAAPDADLSQEPHLF

SEQ ID NO: 20880 - protein, 38 aa, Artificial Sequence
  Synthetic polypeptide
PGPVAHTCNPSTLGGRGRWIMRVLCCLKRCGIFTYKAL

SEQ ID NO: 20881 - protein, 1263 aa, Artificial Sequence
  Synthetic polypeptide
SQHFGRPRQVDHESSLLLEAVWHLHVQGIVSLQELLESHPDMHAVGSWLFRNLCCLCEQMEASCQHADVARAMLSDFVQMFVLRGFQKNSDLRRTVEPEKMPQVTVDVLQRMLIFALDALAAGVQEESSTHKIVRCWFGVFSGHTLGSVISTDPLKRFFSHTLTQILTHSPVLKASDAVQMQREWSFARTHPLLTSLYRRLFVMLSAEELVGHLQEVLETQEVHWQRVLSFVSALVVCFPEAQQLLEDWVARLMAQAFESCQLDSMVTAFLVVRQAALEGPSAFLSYADWFKASFGSTRGYHGCSKKALVFLFTFLSELVPFESPRYLQVHILHPPLVPGKYRSLLTDYISLAKTRLADLKVSIENMGLYEDLSSAGDITEPHSQALQDVEKAIMVFEHTGNIPVTVMEASIFRRPYYVSHFLPALLTPRVLPKVPDSRVAFIESLKRADKIPPSLYSTYCQACSAAEEKPEDAALGVRAEPNSAEEPLGQLTAALGELRASMTDPSQRDVISAQVAVISERLRAVLGHNEDDSSVEISKIQLSINTPRLEPREHMAVDLLLTSFCQNLMAASSVAPPERQGPWAALFVRTMCGRVLPAVLTRLCQLLRHQGPSLSAPHVLGLAALAVHLGESRSALPEVDVGPPAPGAGLPVPALFDSLLTCRTRDSLFFCLKFCTAAISYSLCKFSSQSRDTLCSCLSPGLIKKFQFLMFRLFSEARQPLSEEDVASLSWRPLHLPSADWQRAALSLWTHRTFREVLKEEDVHLTYQDWLHLELEIQPEADALSDTERQDFHQWAIHEHFLPESSASGGCDGDLQAACTILVNALMDFHQSSRSYDHSENSDLVFGGRTGNEDIISRLQEMVADLELQQDLIVPLGHTPSQEHFLFEIFRRRLQALTSGWSVAASLQRQRELLMYKRILLRLPSSVLCGSSFQAEQPITARCEQFFHLVNSEMRNFCSHGGALTQDITAHFFRGLLNACLRSRDPSLMVDFILAKCQTKCPLILTSALVWWPSLEPVLLCRWRRHCQSPLPRELQKLQEGRQFASDFLSPEAASPAPNPDWLSAAALHFAIQQVREENIRKQLKKLDCEREELLVFLFFFSLMGLLSSHLTSNSTTDLPKAFHVCAAILECLEKRKISWLALFQLTESDLRLGRLLLRVAPDQHTRLLPFAFYSLLSYFHEDAAIREEAFLHVAVDMYLKLVQLFVAGDTSTVSPPAGRSLELKGQAGQPRGTDNKSSSFSAAVNTSVPEKELLTRGRAAG

SEQ ID NO: 20882 - protein, 136 aa, Artificial Sequence
  Synthetic polypeptide
SQHFGRPRQVDHESSLLLEAVWHLHVQGIVSLQELLESHPDMHAVGSWLFRNLCCLCEQMEASCQHADVARAMLSDFVQMFVLRGFQKNSDLRRTVEPEKMPQVTVDVLQRMLIFALDALAAGVQEESSTHKIVRC

SEQ ID NO: 20883 - protein, 155 aa, Artificial Sequence
  Synthetic polypeptide
SQHFGRPRQVDHESSLLLEAVWHLHVQGIVSLQELLESHPDMHAVGSWLFRNLCCLCEQMEASCQHADVARAMLSDFVQMFVLRGFQKNSDLRRTVEPEKMPQVTVDVLQRMLIFALDALAAGVQEESSTHKIVRCWYVPEGGLPECAAGRCLPN

SEQ ID NO: 20884 - protein, 141 aa, Artificial Sequence
  Synthetic polypeptide
SQHFGRPRQVDHESSLLLEAVWHLHVQGIVSLQELLESHPDMHAVGSWLFRNLCCLCEQMEASCQHADVARAMLSDFVQMFVLRGFQKNSDLRRTVEPEKMPQVTVDVLQRMLIFALDALAAGVQEESSTHKIVRASAARS

SEQ ID NO: 20885 - protein, 78 aa, Artificial Sequence
  Synthetic polypeptide
SQHFGRPRQVDHESSLLLEAVWHLHVQGIVSLQELLESHPDMHAVGSWLFRNLCCLCEQMEASCQHADVARAMLSGHG

SEQ ID NO: 20886 - protein, 595 aa, Artificial Sequence
  Synthetic polypeptide
ARIAPLHSSLEPATMVVPLASSEAQTVQSLGFAIYRALDWGLDESEERELSPQLERLIDLMANNDSEDSGCGAADEGYGGPEEEEEAEGVPRSVRTFAQAMRLCAARLTDPRGAQAHYQAVCRALFVETLELRAFLARVREAKEMLQKLREDEPHLETPRAELDSLGHTDWARLWVQLMRELRRGVKLKKVQEQEFNPLPTEFQLTPFEMLMQDIRARNYKLRKVMVDGDIPPRVKKDAHELILDFIRSRPPLKQVSERRLRPLPPKQRSLHEKILEEIKQERRLRPVRGEGWAARGFGSLPCILNACSGDAKSTSCINLSVTDAGGSAQRPRPRVLLKAPTLAEMEEMNTSEEEESPCGEVTLKRDRSFSEHDLAQLRSEVASGLQSATHPPGGTEPPRPRAGSAHVWRPGSRDQGTCPASVSDPSHPLLSNRGSSGDRPEASMTPDAKHLWLEFSHPVESLALTVEEVMDVRRVLVKAEMEKFLQNKELFSSLKKGKICCCCRAKFPLFSWPPSCLFCKRSLQGPQWQSVEEAFPHIYSHGCVLKDVCSECTSFVADVVRSSRKSVDVLNTTPRRSRQTQSLYIPNTRTLDFK

SEQ ID NO: 20887 - protein, 83 aa, Artificial Sequence
  Synthetic polypeptide
TWEAEVVVSQDCAIALQPRTCNHGRATSQLGSPDRAVPRLRHLPRAGLGAGRERGARTQPSAGAAHRPHGQQRQRGQRLRCRR

SEQ ID NO: 20888 - protein, 643 aa, Artificial Sequence
  Synthetic polypeptide
ARIAPLHSSLEPATMVVPLASSEAQTVQSLGFAIYRALDWGLDESEERELSPQLERLIDLMANNDSEDSGCGAADEGYGGPEEEEEAEGVPRSVRTFAQAMRLCAARLTDPRGAQAHYQAVCRALFVETLELRAFLARVREAKEMLQKLREDEPHLETPRAELDSLGHTDWARLWVQLMRELRRGVKLKKVQEQEFNPLPTEFQLTPFEMLMQDIRARNYKLRKVMVDGDIPPRVKKDAHELILDFIRSRPPLKQVSERRLRPLPPKQRSLHEKILEEIKQERRLRPVRGEGWAARGFGSLPCILNACSGDAKSTSCINLSVTDAGGSAQRPRPRVLLKAPTLAEMEEMNTSEEEESPCGEVTLKRDRSFSEHDLAQLRSEVASGLQSATHPPGGTEPPRPRAGSAHVWRPGSRDQGTCPASVSDPSHPLLSNRGSSGDRPEASMTPDAKHLWLEFSHPVESLALTVEEVMDVRRVLVKAEMEKFLQNKELFSSLKKGKICCCCRAKFPLFSWPPSCLFCKRAVCTSCSIKMKMPSKKFGHIPVYTLGFESPQRVSAAKTAPIQRRDIFQSLQGPQWQSVEEAFPHIYSHGCVLKDVCSECTSFVADVVRSSRKSVDVLNTTPRRSRQTQSLYIPNTRTLDFK

SEQ ID NO: 20889 - protein, 28 aa, Artificial Sequence
  Synthetic polypeptide
ARIAPLHSSLEPATMVVPLASSEAQLHR

SEQ ID NO: 20890 - protein, 37 aa, Artificial Sequence
  Synthetic polypeptide
TWEAEVVVSQDCAIALQPRTCNHGRATSQLGSPAAQM

SEQ ID NO: 20891 - protein, 14 aa, Artificial Sequence
  Synthetic polypeptide
WLMSPQDMSRLHFL

SEQ ID NO: 20892 - protein, 15 aa, Artificial Sequence
  Synthetic polypeptide
ADESTRYEPSALPVA

SEQ ID NO: 20893 - protein, 30 aa, Artificial Sequence
  Synthetic polypeptide
ARRGGSCLQFLHFGRLRWEDLLSPANSRLQ

SEQ ID NO: 20894 - protein, 12 aa, Artificial Sequence
  Synthetic polypeptide
AQQIQGCNEDAF

SEQ ID NO: 20895 - protein, 141 aa, Artificial Sequence
  Synthetic polypeptide
QARWLMPAVPALWEAEVGGSLEPSKFKAAMKMPSKKFGHIPVYTLGFESPQRVSAAKTAPIQRRDIFQSLQGPQWQSVEEAFPHIYSHGCVLKDVCSECTSFVADVVRSSRKSVDVLNTTPRRSRQTQSLYIPNTRTLDFK

SEQ ID NO: 20896 - protein, 7 aa, Artificial Sequence
  Synthetic polypeptide
HVLGSHQ

SEQ ID NO: 20897 - protein, 448 aa, Artificial Sequence
  Synthetic polypeptide
NWRITLAKEFKTSRDNMFWEVISDEHGIDPSGNYVGDSDLQLERISVYYNEASSHKYVPRAILVDLEPGTMDSVRSGAFGHLFRPDNFIFGQSGAGNNWAKGHYTEGAELVDSVLDVVRKECENCDCLQGFQLTHSLGGGTGSGMGTLLISKVREEYPDRIMNTFSVVPSPKVSDTVVEPYNATLSIHQLVENTDETYCIDNEALYDICFRTLKLATPTYGDLNHLVSATMSGVTTSLRFPGQLNADLRKLAVNMVPFPRLHFFMPGFAPLTARGSQQYRALTVPELTQQMFDAKNMMAACDPRHGRYLTVATVFRGRMSMKEVDEQMLAIQSKNSSYFVEWIPNNVKVAVCDIPPRGLKMSSTFIGNSTAIQELFKRISEQFTAMFRRKAFLHWYTGEGMDEMEFTEAESNMNDLVSEYQQYQDATAEEEGEMYEDDEEESEAQGPK

SEQ ID NO: 20898 - protein, 126 aa, Artificial Sequence
  Synthetic polypeptide
RRSSRPAGITCSGKSSVMSMASTPAATTWATRTCSWSGSASTTTRPLLTSTCLEPFWWTWNPEPWTVSAQGPLDISSGLTISSLVRVGPATTGPRVTTRRGRSWWIRSWMWCGRSVKTATACRASS

SEQ ID NO: 20899 - protein, 146 aa, Artificial Sequence
  Synthetic polypeptide
NWRITLAKEFKTSRDNMFWEVISDEHGIDPSGNYVGDSDLQLERISVYYNEASSHKYVPRAILVDLEPGTMDSVRSGAFGHLFRPDNFIFAHPAGRCQLASSPQLPGILGWLFGLLALPVGRKVCWSRRADPFTQDPLRRQSLALL

SEQ ID NO: 20900 - protein, 140 aa, Artificial Sequence
  Synthetic polypeptide
RRSSRPAGITCSGKSSVMSMASTPAATTWATRTCSWSGSASTTTRPLLTSTCLEPFWWTWNPEPWTVSAQGPLDISSGLTISSLHIQLVDANSHPAPSCQGFWGGCLGSWHCQSEGRYAGAGGLIHSPRIPSGGRASLCC

SEQ ID NO: 20901 - protein, 85 aa, Artificial Sequence
  Synthetic polypeptide
NWRITLAKEFKTSRDNMFWEVISDEHGIDPSGNYVGDSDLQLERISVYYNEASCWSRTPGLKRSTCLGLPKCWECRHEPLHLVDV

SEQ ID NO: 20902 - protein, 79 aa, Artificial Sequence
  Synthetic polypeptide
RRSSRPAGITCSGKSSVMSMASTPAATTWATRTCSWSGSASTTTRPLAGLELLDSSDPPALASQSVGSADTSPCIWWTS

SEQ ID NO: 20903 - protein, 95 aa, Artificial Sequence
  Synthetic polypeptide
NWRITLAKEFKTSRDNMFWEVISDEHGIDPSGNYVGDSDLQLERISVYYNEASSHKYVPRAILVDLEPGTMDSVRSGAFGHLFRPDNFIFGPHLL

SEQ ID NO: 20904 - protein, 89 aa, Artificial Sequence
  Synthetic polypeptide
RRSSRPAGITCSGKSSVMSMASTPAATTWATRTCSWSGSASTTTRPLLTSTCLEPFWWTWNPEPWTVSAQGPLDISSGLTISSLVHICF

SEQ ID NO: 20905 - protein, 116 aa, Artificial Sequence
  Synthetic polypeptide
NWRITLAKEFKTSRDNMFWEVISDEHGIDPSGNYVGDSDLQLERISVYYNEASSHKYVPRAILVDLEPGTMDSVRSGAFGHLFRPDNFIFAGHWRPRERVLWGEQKPLMHFKWNEV

SEQ ID NO: 20906 - protein, 110 aa, Artificial Sequence
  Synthetic polypeptide
RRSSRPAGITCSGKSSVMSMASTPAATTWATRTCSWSGSASTTTRPLLTSTCLEPFWWTWNPEPWTVSAQGPLDISSGLTISSLLGIGGPEKGFCGENRNHSCISSGMKC

SEQ ID NO: 20907 - protein, 53 aa, Artificial Sequence
  Synthetic polypeptide
NWRITLAKEFKTSRDNMFWEVISDEHGIDPSGNYVGDSDLQLERISVYYNEAS

SEQ ID NO: 20908 - protein, 47 aa, Artificial Sequence
  Synthetic polypeptide
RRSSRPAGITCSGKSSVMSMASTPAATTWATRTCSWSGSASTTTRPL

SEQ ID NO: 20909 - protein, 162 aa, Artificial Sequence
  Synthetic polypeptide
NWRITLAKEFKTSRDNMFWEVISDEHGIDPSGNYVGDSDLQLERISVYYNEASSHKYVPRAILVDLEPGTMDSVRSGAFGHLFRPDNFIFGKFPLLQALMADPITGKPRSVDGDGCEKQGMVSSSHDPEWWELISPFYSWALEAQRKGSVGRTETTHAFQVE

SEQ ID NO: 20910 - protein, 92 aa, Artificial Sequence
  Synthetic polypeptide
RRSSRPAGITCSGKSSVMSMASTPAATTWATRTCSWSGSASTTTRPLLTSTCLEPFWWTWNPEPWTVSAQGPLDISSGLTISSLVSSPCSKL

SEQ ID NO: 20911 - protein, 432 aa, Artificial Sequence
  Synthetic polypeptide
QFWEVISDEHGIDPSGNYVGDSDLQLERISVYYNEASSHKYVPRAILVDLEPGTMDSVRSGAFGHLFRPDNFIFGQSGAGNNWAKGHYTEGAELVDSVLDVVRKECENCDCLQGFQLTHSLGGGTGSGMGTLLISKVREEYPDRIMNTFSVVPSPKVSDTVVEPYNATLSIHQLVENTDETYCIDNEALYDICFRTLKLATPTYGDLNHLVSATMSGVTTSLRFPGQLNADLRKLAVNMVPFPRLHFFMPGFAPLTARGSQQYRALTVPELTQQMFDAKNMMAACDPRHGRYLTVATVFRGRMSMKEVDEQMLAIQSKNSSYFVEWIPNNVKVAVCDIPPRGLKMSSTFIGNSTAIQELFKRISEQFTAMFRRKAFLHWYTGEGMDEMEFTEAESNMNDLVSEYQQYQDATAEEEGEMYEDDEEESEAQGPK

SEQ ID NO: 20912 - protein, 125 aa, Artificial Sequence
  Synthetic polypeptide
AYLLWQFSDSSGKSSVMSMASTPAATTWATRTCSWSGSASTTTRPLLTSTCLEPFWWTWNPEPWTVSAQGPLDISSGLTISSLVRVGPATTGPRVTTRRGRSWWIRSWMWCGRSVKTATACRASS

SEQ ID NO: 20913 - protein, 15 aa, Artificial Sequence
  Synthetic polypeptide
HIYYGNFLTVLGSHQ

SEQ ID NO: 20914 - protein, 130 aa, Artificial Sequence
  Synthetic polypeptide
QFWEVISDEHGIDPSGNYVGDSDLQLERISVYYNEASSHKYVPRAILVDLEPGTMDSVRSGAFGHLFRPDNFIFAHPAGRCQLASSPQLPGILGWLFGLLALPVGRKVCWSRRADPFTQDPLRRQSLALL

SEQ ID NO: 20915 - protein, 139 aa, Artificial Sequence
  Synthetic polypeptide
AYLLWQFSDSSGKSSVMSMASTPAATTWATRTCSWSGSASTTTRPLLTSTCLEPFWWTWNPEPWTVSAQGPLDISSGLTISSLHIQLVDANSHPAPSCQGFWGGCLGSWHCQSEGRYAGAGGLIHSPRIPSGGRASLCC

SEQ ID NO: 20916 - protein, 69 aa, Artificial Sequence
  Synthetic polypeptide
QFWEVISDEHGIDPSGNYVGDSDLQLERISVYYNEASCWSRTPGLKRSTCLGLPKCWECRHEPLHLVDV

SEQ ID NO: 20917 - protein, 78 aa, Artificial Sequence
  Synthetic polypeptide
AYLLWQFSDSSGKSSVMSMASTPAATTWATRTCSWSGSASTTTRPLAGLELLDSSDPPALASQSVGSADTSPCIWWTS

SEQ ID NO: 20918 - protein, 79 aa, Artificial Sequence
  Synthetic polypeptide
QFWEVISDEHGIDPSGNYVGDSDLQLERISVYYNEASSHKYVPRAILVDLEPGTMDSVRSGAFGHLFRPDNFIFGPHLL

SEQ ID NO: 20919 - protein, 88 aa, Artificial Sequence
  Synthetic polypeptide
AYLLWQFSDSSGKSSVMSMASTPAATTWATRTCSWSGSASTTTRPLLTSTCLEPFWWTWNPEPWTVSAQGPLDISSGLTISSLVHICF

SEQ ID NO: 20920 - protein, 100 aa, Artificial Sequence
  Synthetic polypeptide
QFWEVISDEHGIDPSGNYVGDSDLQLERISVYYNEASSHKYVPRAILVDLEPGTMDSVRSGAFGHLFRPDNFIFAGHWRPRERVLWGEQKPLMHFKWNEV

SEQ ID NO: 20921 - protein, 109 aa, Artificial Sequence
  Synthetic polypeptide
AYLLWQFSDSSGKSSVMSMASTPAATTWATRTCSWSGSASTTTRPLLTSTCLEPFWWTWNPEPWTVSAQGPLDISSGLTISSLLGIGGPEKGFCGENRNHSCISSGMKC

SEQ ID NO: 20922 - protein, 37 aa, Artificial Sequence
  Synthetic polypeptide
QFWEVISDEHGIDPSGNYVGDSDLQLERISVYYNEAS

SEQ ID NO: 20923 - protein, 46 aa, Artificial Sequence
  Synthetic polypeptide
AYLLWQFSDSSGKSSVMSMASTPAATTWATRTCSWSGSASTTTRPL

SEQ ID NO: 20924 - protein, 146 aa, Artificial Sequence
  Synthetic polypeptide
QFWEVISDEHGIDPSGNYVGDSDLQLERISVYYNEASSHKYVPRAILVDLEPGTMDSVRSGAFGHLFRPDNFIFGKFPLLQALMADPITGKPRSVDGDGCEKQGMVSSSHDPEWWELISPFYSWALEAQRKGSVGRTETTHAFQVE

SEQ ID NO: 20925 - protein, 91 aa, Artificial Sequence
  Synthetic polypeptide
AYLLWQFSDSSGKSSVMSMASTPAATTWATRTCSWSGSASTTTRPLLTSTCLEPFWWTWNPEPWTVSAQGPLDISSGLTISSLVSSPCSKL

SEQ ID NO: 20926 - protein, 112 aa, Artificial Sequence
  Synthetic polypeptide
TREAEVAVSRDRVTALQPGQQERNSVSKKKAAPGHPAHEAVLHHLQGGHGGSSAAAAPGSAAFCGERRDVLCPGPPGRACRPPGLLAHRDPHALRQAHQAGLRAVPGQGLRV

SEQ ID NO: 20927 - protein, 165 aa, Artificial Sequence
  Synthetic polypeptide
AEIASLHSSLGNKSETLSQKKKLRQDILLMKPYFITCREAMEARLLLQLQDRQHFVENDEMYSVQDLLDVHAGRLGCSLTEIHTLFAKHIKLDCERCQAKGFVCELCREGDVLFPFDSHTSVCADCSAVFHRDCYYDNSTTCPKCARLSLRKQSLFQEPGPDVEA

SEQ ID NO: 20928 - protein, 33 aa, Artificial Sequence
  Synthetic polypeptide
GCCEPRSRHCTPAWATRAKLCLKKKSCARTSCS

SEQ ID NO: 20929 - protein, 95 aa, Artificial Sequence
  Synthetic polypeptide
TREAEVAVSRDRVTALQPGQQERNSVSKKKAAPGHPAHEAVLHHLQGGHGGSSAAAGPPGRACRPPGLLAHRDPHALRQAHQAGLRAVPGQGLRV

SEQ ID NO: 20930 - protein, 148 aa, Artificial Sequence
  Synthetic polypeptide
AEIASLHSSLGNKSETLSQKKKLRQDILLMKPYFITCREAMEARLLLQDLLDVHAGRLGCSLTEIHTLFAKHIKLDCERCQAKGFVCELCREGDVLFPFDSHTSVCADCSAVFHRDCYYDNSTTCPKCARLSLRKQSLFQEPGPDVEA

SEQ ID NO: 20931 - protein, 452 aa, Artificial Sequence
  Synthetic polypeptide
GYRGGDLWPALERSRSPHSQSTERGLRATRPAFMCHRRQAIKLQVDDTEDSDEEWTPRQQVKPPWMAFRGEQSKHQKGMPKASFNNESSLRELSGTPNLLNTSDSEQAQKPVSPPGEASTSGQHSRLKLELRRKETEGKMYSLRERKGHAYKEISEPQDDDYLYCEMCQNFFIDSCAAHGPPTFVKDSAVDKGHPNRSALSLPPGLRIGPSGIPQAGLGVWNEASDLPLGLHFGPYEGRITEDEEAANSGYSWLITKGRNCYEYVDGKDKSSANWMRYVNCARDDEEQNLVAFQYHRQIFYRTCRVIRPGCELLVWSGDEYGQELGIRSSIEPAESLGQAVNCWSGMGMSMARNWASSGAASGRKSSWQGENQSQRSIHVPHAVWPFQVKNFSVNMWNAITPLRTSQDHLQENFSNQRIPAQGIRIRSGNILIHAAVMTKPKVKRSKKGPNS

SEQ ID NO: 20932 - protein, 102 aa, Artificial Sequence
  Synthetic polypeptide
DFLVSPGLWHVARDTEGEICGQHSNGAGAPTLRALREVSEPLDQLSCVTEGRPSNSRWMTQKIPMKNGHLGSKSNLLGWPSEENRVNTRRECPRRHSIMNLV

SEQ ID NO: 20933 - protein, 23 aa, Artificial Sequence
  Synthetic polypeptide
ERSQSHSTSFHVSPKAGHQTPGG

SEQ ID NO: 20934 - protein, 98 aa, Artificial Sequence
  Synthetic polypeptide
GYRGGDLWPALERSRSPHSQSTERGLRATRPAFMCHRRQAIKLQVDDTEDSDEEWTPRQQVKPPWMAFRGEQSKHQKIVRCVRTSSLTAVLLMGPLHL

SEQ ID NO: 20935 - protein, 91 aa, Artificial Sequence
  Synthetic polypeptide
DFLVSPGLWHVARDTEGEICGQHSNGAGAPTLRALREVSEPLDQLSCVTEGRPSNSRWMTQKIPMKNGHLGSKSNLLGWPSEENRVNTRRL

SEQ ID NO: 20936 - protein, 75 aa, Artificial Sequence
  Synthetic polypeptide
GYRGGDLWPALERSRSPHSQSTERGLRATRPAFMCHRRQAIKLQVDDTEDSDEEWTPRQQDRVSLLSPRLECNGV

SEQ ID NO: 20937 - protein, 87 aa, Artificial Sequence
  Synthetic polypeptide
DFLVSPGLWHVARDTEGEICGQHSNGAGAPTLRALREVSEPLDQLSCVTEGRPSNSRWMTQKIPMKNGHLGSKTEFRSCHPGWSAMA

SEQ ID NO: 20938 - protein, 312 aa, Artificial Sequence
  Synthetic polypeptide
MKRLINYKNMSSIWDRCKGTLNMETSVFPSHMGGKFSFSSARDLVLLKTWEEVLQLSSFPQRGRDHARTPEFSNRRSTPGDSQFWEVISDEHAIDSAGTYHGDSHLPLERVNVHHREASGGRYVPRAVLVDLEPGTMDSVRSGPFGQVFRPDNFISRQCGAGNNWAKGRYTEGAELMESVMDVVRKEAESCDCLQGFQLTHSLGGGTGSGMGTLLISKIREEYPDRIINTLSILLLPKVSDTVVEPYNATLSVHQLIENADETFCIDNEALYDICSKTLKLPTPIYGDLNHLVSATMSWGHHVPALPGPAEC

SEQ ID NO: 20939 - protein, 30 aa, Artificial Sequence
  Synthetic polypeptide
AAFPNVEGTTQGHLSSPTDVQRQGIHSSGR

SEQ ID NO: 20940 - protein, 18 aa, Artificial Sequence
  Synthetic polypeptide
VLQQTFNARGFTVLGGDL

SEQ ID NO: 20941 - protein, 133 aa, Artificial Sequence
  Synthetic polypeptide
ARELKPRFTQKPVQRFTAAVTDKNCKELSCPSTRERPHKLGCTHAADAGQRRGGRKPPSHDLAEPENWRENRLPRGWVRGEHYRYKFSRPGGRHAAEGKWWVRKRIGAYFPPLSLEELRPYFRDRGWPLPGPL

SEQ ID NO: 20942 - protein, 77 aa, Artificial Sequence
  Synthetic polypeptide
GALTPQTPVSDEEEGSLHHTTWRNLRIGVRIACPAGGSEESTTGTSSAVLGAGTPPRASGGCGRGSEPTSLRSAWRS

SEQ ID NO: 20943 - protein, 64 aa, Artificial Sequence
  Synthetic polypeptide
ESPAPRVGPRRALQVQVQPSWGQARRRGQVVGAEEDRSLLPSAQPGGAEALLQGPWVASARAPL

SEQ ID NO: 20944 - protein, 428 aa, Artificial Sequence
  Synthetic polypeptide
PCETCFRLLTSRTKPGMVPPPPGEESQTVILPPGWQSYLSPQGRRYYVNTTTNETTWERPSSSPGIPASPGSHRSSLPPTVNGYHASGTPAHPPETAHMSVRKSTGDSQNLGSSSPSKKQSKENTITINCVTFPHPDTMPEQQLLKPTEWSYCDYFWADKKDPQGNGTVAGFELLLQKQLKGKQMQKEMSEFIRERIKIEEDYAKNLAKLSQNSLASQEEGSLGEAWAQVKKSLADEAEVHLKFSAKLHSEVEKPLMNFRENFKKDMKKCDHHIADLRKQLASRYASVEKARKALTERQRDLEMKTQQLEIKLSNKTEEDIKKARRKSTQAGDDLMRCVDLYNQAQSKWFEEMVTTTLELERLEVERVEMIRQHLCQYTQLRHETDMFNQSTVEPVDQLLRKVDPAKDRELWVREHKTGNIRPVDMEI

SEQ ID NO: 20945 - protein, 71 aa, Artificial Sequence
  Synthetic polypeptide
PPELSLEWSPLRREKKARRSSFHLAGRATCRLRAGGTMSTRPPMRPPGNVPAVLLGFQPALALTGALCLQQ

SEQ ID NO: 20946 - protein, 462 aa, Artificial Sequence
  Synthetic polypeptide
WSPEDVYLLISGACEYVTFCGRWDFAVVIKLRTGDGEIILDYPRGPSKPGMVPPPPGEESQTVILPPGWQSYLSPQGRRYYVNTTTNETTWERPSSSPGIPASPGSHRSSLPPTVNGYHASGTPAHPPETAHMSVRKSTGDSQNLGSSSPSKKQSKENTITINCVTFPHPDTMPEQQLLKPTEWSYCDYFWADKKDPQGNGTVAGFELLLQKQLKGKQMQKEMSEFIRERIKIEEDYAKNLAKLSQNSLASQEEGSLGEAWAQVKKSLADEAEVHLKFSAKLHSEVEKPLMNFRENFKKDMKKCDHHIADLRKQLASRYASVEKARKALTERQRDLEMKTQQLEIKLSNKTEEDIKKARRKSTQAGDDLMRCVDLYNQAQSKWFEEMVTTTLELERLEVERVEMIRQHLCQYTQLRHETDMFNQSTVEPVDQLLRKVDPAKDRELWVREHKTGNIRPVDMEI

SEQ ID NO: 20947 - protein, 76 aa, Artificial Sequence
  Synthetic polypeptide
SWIIHVGPVSLEWSPLRREKKARRSSFHLAGRATCRLRAGGTMSTRPPMRPPGNVPAVLLGFQPALALTGALCLQQ

SEQ ID NO: 20948 - protein, 39 aa, Artificial Sequence
  Synthetic polypeptide
EMIGGTSIYILHFNGGSRERPGDEEAGSLGVLGQRRDLH

SEQ ID NO: 20949 - protein, 789 aa, Artificial Sequence
  Synthetic polypeptide
SVAPRSIFCILMVEAGKGLEMRKLVLSGFLASEEIYINQLEALLLPMKPLKATATTSQPVLTIQQIETIFYKIQDIYEIHKEFYDNLCPKVQQWDSQVTMGHLFQKLASQLGVYKAFVDNYKVALETAEKCSQSNNQFQKISEELKVKGPKDSKDSHTSVTMEALLYKPIDRVTRSTLVLHDLLKHTPVDHPDYPLLQDALRISQNFLSSINEDIDPRRTAVTTPKGETRQLVKDGFLVEVSESSRKLRHVFLFTDVLLCAKLKKTSAGKHQQYDCKWYIPLADLVFPSPEESEASPQVHPFPDHELEDMKMKISALKSEIQKEKANKGQSRAIERLKKKMFENEFLLLLNSPTIPFRIHNRNGKSYLFLLSSDYERSEWREAIQKLQKKDLQAFVLSSVELQVLTGSCFKLRTVHNIPVTSNKDDDESPGLYGFLHVIVHSAKGFKQSANLYCTLEVDSFGYFVSKAKTRVFRDTAEPKWDEEFEIELEGSQSLRILCYEKCYDKTKVNKDNNEIVDKIMGKGQIQLDPQTVETKNWHTDVIEMNGIKVEFSMKFTSRDMSLKRTPSKKQTGVFGVKISVVTKRERSKVPYIVRQCVEEVEKRGIEEVGIYRISGVATDIQALKAVFDANNKDILLMLSDMDINAIAGTLKLYFRELPEPLLTDRLYPAFMEGIALSDPAAKENCMMHLLRSLPDPNLITFLFLLEHLKRVAEKEPINKMSLHNLATVFGPTLLRPSEVESKAHLTSAADIWSHDVMAQVQVLLYYLQHPPISFAELKRNTLYFSTDV

SEQ ID NO: 20950 - protein, 105 aa, Artificial Sequence
  Synthetic polypeptide
SVAPRSIFCILMVEAGKGLEMRKLVLSGFLASEEIYINQLEALLLPMKPLKATATTSQPVLTIQQIETIFYKIQDIYEIHKEFYDNLCPKVQQWDSQVTMGHLFQ

SEQ ID NO: 20951 - protein, 64 aa, Artificial Sequence
  Synthetic polypeptide
SVAPRSIFCILMVEAGKGLEMRKLVLSGFLASEEIYINQLEALLLPMKPLKATATTSQPVLTIQ

SEQ ID NO: 20952 - protein, 62 aa, Artificial Sequence
  Synthetic polypeptide
SVAPRSIFCILMVEAGKGLEMRKLVLSGFLASEEIYINQLEALLLPMKPLKATATTSQPVLT

SEQ ID NO: 20953 - protein, 817 aa, Artificial Sequence
  Synthetic polypeptide
WWASVIPATQEAEAGESLEPGRQRLQRAKIMPLHSSLGDRVEAGKGLEMRKLVLSGFLASEEIYINQLEALLLPMKPLKATATTSQPVLTIQQIETIFYKIQDIYEIHKEFYDNLCPKVQQWDSQVTMGHLFQKLASQLGVYKAFVDNYKVALETAEKCSQSNNQFQKISEELKVKGPKDSKDSHTSVTMEALLYKPIDRVTRSTLVLHDLLKHTPVDHPDYPLLQDALRISQNFLSSINEDIDPRRTAVTTPKGETRQLVKDGFLVEVSESSRKLRHVFLFTDVLLCAKLKKTSAGKHQQYDCKWYIPLADLVFPSPEESEASPQVHPFPDHELEDMKMKISALKSEIQKEKANKGQSRAIERLKKKMFENEFLLLLNSPTIPFRIHNRNGKSYLFLLSSDYERSEWREAIQKLQKKDLQAFVLSSVELQVLTGSCFKLRTVHNIPVTSNKDDDESPGLYGFLHVIVHSAKGFKQSANLYCTLEVDSFGYFVSKAKTRVFRDTAEPKWDEEFEIELEGSQSLRILCYEKCYDKTKVNKDNNEIVDKIMGKGQIQLDPQTVETKNWHTDVIEMNGIKVEFSMKFTSRDMSLKRTPSKKQTGVFGVKISVVTKRERSKVPYIVRQCVEEVEKRGIEEVGIYRISGVATDIQALKAVFDANNKDILLMLSDMDINAIAGTLKLYFRELPEPLLTDRLYPAFMEGIALSDPAAKENCMMHLLRSLPDPNLITFLFLLEHLKRVAEKEPINKMSLHNLATVFGPTLLRPSEVESKAHLTSAADIWSHDVMAQVQVLLYYLQHPPISFAELKRNTLYFSTDV

SEQ ID NO: 20954 - protein, 43 aa, Artificial Sequence
  Synthetic polypeptide
SQLLRRLRQENRLNLGGRGCSEPRSCHCIPAWATGWKQGKAWR

SEQ ID NO: 20955 - protein, 46 aa, Artificial Sequence
  Synthetic polypeptide
TWEAEVAASQDHATAFQPGRQGGSRERPGDEEAGSLGVLGQRRDLH

SEQ ID NO: 20956 - protein, 133 aa, Artificial Sequence
  Synthetic polypeptide
WWASVIPATQEAEAGESLEPGRQRLQRAKIMPLHSSLGDRVEAGKGLEMRKLVLSGFLASEEIYINQLEALLLPMKPLKATATTSQPVLTIQQIETIFYKIQDIYEIHKEFYDNLCPKVQQWDSQVTMGHLFQ

SEQ ID NO: 20957 - protein, 92 aa, Artificial Sequence
  Synthetic polypeptide
WWASVIPATQEAEAGESLEPGRQRLQRAKIMPLHSSLGDRVEAGKGLEMRKLVLSGFLASEEIYINQLEALLLPMKPLKATATTSQPVLTIQ

SEQ ID NO: 20958 - protein, 90 aa, Artificial Sequence
  Synthetic polypeptide
WWASVIPATQEAEAGESLEPGRQRLQRAKIMPLHSSLGDRVEAGKGLEMRKLVLSGFLASEEIYINQLEALLLPMKPLKATATTSQPVLT

SEQ ID NO: 20959 - protein, 26 aa, Artificial Sequence
  Synthetic polypeptide
HGGSRERPGDEEAGSLGVLGQRRDLH

SEQ ID NO: 20960 - protein, 810 aa, Artificial Sequence
  Synthetic polypeptide
GRARWLTPVIPAFWEAEAGGSRGQEMETILANTVEAGKGLEMRKLVLSGFLASEEIYINQLEALLLPMKPLKATATTSQPVLTIQQIETIFYKIQDIYEIHKEFYDNLCPKVQQWDSQVTMGHLFQKLASQLGVYKAFVDNYKVALETAEKCSQSNNQFQKISEELKVKGPKDSKDSHTSVTMEALLYKPIDRVTRSTLVLHDLLKHTPVDHPDYPLLQDALRISQNFLSSINEDIDPRRTAVTTPKGETRQLVKDGFLVEVSESSRKLRHVFLFTDVLLCAKLKKTSAGKHQQYDCKWYIPLADLVFPSPEESEASPQVHPFPDHELEDMKMKISALKSEIQKEKANKGQSRAIERLKKKMFENEFLLLLNSPTIPFRIHNRNGKSYLFLLSSDYERSEWREAIQKLQKKDLQAFVLSSVELQVLTGSCFKLRTVHNIPVTSNKDDDESPGLYGFLHVIVHSAKGFKQSANLYCTLEVDSFGYFVSKAKTRVFRDTAEPKWDEEFEIELEGSQSLRILCYEKCYDKTKVNKDNNEIVDKIMGKGQIQLDPQTVETKNWHTDVIEMNGIKVEFSMKFTSRDMSLKRTPSKKQTGVFGVKISVVTKRERSKVPYIVRQCVEEVEKRGIEEVGIYRISGVATDIQALKAVFDANNKDILLMLSDMDINAIAGTLKLYFRELPEPLLTDRLYPAFMEGIALSDPAAKENCMMHLLRSLPDPNLITFLFLLEHLKRVAEKEPINKMSLHNLATVFGPTLLRPSEVESKAHLTSAADIWSHDVMAQVQVLLYYLQHPPISFAELKRNTLYFSTDV

SEQ ID NO: 20961 - protein, 32 aa, Artificial Sequence
  Synthetic polypeptide
SQHFGRPRRVDHEVRRWRPSWLTRWKQGKAWR

SEQ ID NO: 20962 - protein, 126 aa, Artificial Sequence
  Synthetic polypeptide
GRARWLTPVIPAFWEAEAGGSRGQEMETILANTVEAGKGLEMRKLVLSGFLASEEIYINQLEALLLPMKPLKATATTSQPVLTIQQIETIFYKIQDIYEIHKEFYDNLCPKVQQWDSQVTMGHLFQ

SEQ ID NO: 20963 - protein, 85 aa, Artificial Sequence
  Synthetic polypeptide
GRARWLTPVIPAFWEAEAGGSRGQEMETILANTVEAGKGLEMRKLVLSGFLASEEIYINQLEALLLPMKPLKATATTSQPVLTIQ

SEQ ID NO: 20964 - protein, 83 aa, Artificial Sequence
  Synthetic polypeptide
GRARWLTPVIPAFWEAEAGGSRGQEMETILANTVEAGKGLEMRKLVLSGFLASEEIYINQLEALLLPMKPLKATATTSQPVLT

SEQ ID NO: 20965 - protein, 26 aa, Artificial Sequence
  Synthetic polypeptide
HGGSRERPGDEEAGSLGVLGQRRDLH

SEQ ID NO: 20966 - protein, 32 aa, Artificial Sequence
  Synthetic polypeptide
SQHFGRPRWVDHEVRRSRPSRLTRWKQGKAWR

SEQ ID NO: 20967 - protein, 805 aa, Artificial Sequence
  Synthetic polypeptide
LTPVIPALWEAEVGGPRGQEIETIPANTVEAGKGLEMRKLVLSGFLASEEIYINQLEALLLPMKPLKATATTSQPVLTIQQIETIFYKIQDIYEIHKEFYDNLCPKVQQWDSQVTMGHLFQKLASQLGVYKAFVDNYKVALETAEKCSQSNNQFQKISEELKVKGPKDSKDSHTSVTMEALLYKPIDRVTRSTLVLHDLLKHTPVDHPDYPLLQDALRISQNFLSSINEDIDPRRTAVTTPKGETRQLVKDGFLVEVSESSRKLRHVFLFTDVLLCAKLKKTSAGKHQQYDCKWYIPLADLVFPSPEESEASPQVHPFPDHELEDMKMKISALKSEIQKEKANKGQSRAIERLKKKMFENEFLLLLNSPTIPFRIHNRNGKSYLFLLSSDYERSEWREAIQKLQKKDLQAFVLSSVELQVLTGSCFKLRTVHNIPVTSNKDDDESPGLYGFLHVIVHSAKGFKQSANLYCTLEVDSFGYFVSKAKTRVFRDTAEPKWDEEFEIELEGSQSLRILCYEKCYDKTKVNKDNNEIVDKIMGKGQIQLDPQTVETKNWHTDVIEMNGIKVEFSMKFTSRDMSLKRTPSKKQTGVFGVKISVVTKRERSKVPYIVRQCVEEVEKRGIEEVGIYRISGVATDIQALKAVFDANNKDILLMLSDMDINAIAGTLKLYFRELPEPLLTDRLYPAFMEGIALSDPAAKENCMMHLLRSLPDPNLITFLFLLEHLKRVAEKEPINKMSLHNLATVFGPTLLRPSEVESKAHLTSAADIWSHDVMAQVQVLLYYLQHPPISFAELKRNTLYFSTDV

SEQ ID NO: 20968 - protein, 121 aa, Artificial Sequence
  Synthetic polypeptide
LTPVIPALWEAEVGGPRGQEIETIPANTVEAGKGLEMRKLVLSGFLASEEIYINQLEALLLPMKPLKATATTSQPVLTIQQIETIFYKIQDIYEIHKEFYDNLCPKVQQWDSQVTMGHLFQ

SEQ ID NO: 20969 - protein, 80 aa, Artificial Sequence
  Synthetic polypeptide
LTPVIPALWEAEVGGPRGQEIETIPANTVEAGKGLEMRKLVLSGFLASEEIYINQLEALLLPMKPLKATATTSQPVLTIQ

SEQ ID NO: 20970 - protein, 78 aa, Artificial Sequence
  Synthetic polypeptide
LTPVIPALWEAEVGGPRGQEIETIPANTVEAGKGLEMRKLVLSGFLASEEIYINQLEALLLPMKPLKATATTSQPVLT

SEQ ID NO: 20971 - protein, 810 aa, Artificial Sequence
  Synthetic polypeptide
GRARWVTPVIPALWEAEAGGSRGQEIETILANTVEAGKGLEMRKLVLSGFLASEEIYINQLEALLLPMKPLKATATTSQPVLTIQQIETIFYKIQDIYEIHKEFYDNLCPKVQQWDSQVTMGHLFQKLASQLGVYKAFVDNYKVALETAEKCSQSNNQFQKISEELKVKGPKDSKDSHTSVTMEALLYKPIDRVTRSTLVLHDLLKHTPVDHPDYPLLQDALRISQNFLSSINEDIDPRRTAVTTPKGETRQLVKDGFLVEVSESSRKLRHVFLFTDVLLCAKLKKTSAGKHQQYDCKWYIPLADLVFPSPEESEASPQVHPFPDHELEDMKMKISALKSEIQKEKANKGQSRAIERLKKKMFENEFLLLLNSPTIPFRIHNRNGKSYLFLLSSDYERSEWREAIQKLQKKDLQAFVLSSVELQVLTGSCFKLRTVHNIPVTSNKDDDESPGLYGFLHVIVHSAKGFKQSANLYCTLEVDSFGYFVSKAKTRVFRDTAEPKWDEEFEIELEGSQSLRILCYEKCYDKTKVNKDNNEIVDKIMGKGQIQLDPQTVETKNWHTDVIEMNGIKVEFSMKFTSRDMSLKRTPSKKQTGVFGVKISVVTKRERSKVPYIVRQCVEEVEKRGIEEVGIYRISGVATDIQALKAVFDANNKDILLMLSDMDINAIAGTLKLYFRELPEPLLTDRLYPAFMEGIALSDPAAKENCMMHLLRSLPDPNLITFLFLLEHLKRVAEKEPINKMSLHNLATVFGPTLLRPSEVESKAHLTSAADIWSHDVMAQVQVLLYYLQHPPISFAELKRNTLYFSTDV

SEQ ID NO: 20972 - protein, 41 aa, Artificial Sequence
  Synthetic polypeptide
AGRGGSRLSSQHFGRPRRADHEVRRSRPSWLTRWKQGKAWR

SEQ ID NO: 20973 - protein, 26 aa, Artificial Sequence
  Synthetic polypeptide
HGGSRERPGDEEAGSLGVLGQRRDLH

SEQ ID NO: 20974 - protein, 126 aa, Artificial Sequence
  Synthetic polypeptide
GRARWVTPVIPALWEAEAGGSRGQEIETILANTVEAGKGLEMRKLVLSGFLASEEIYINQLEALLLPMKPLKATATTSQPVLTIQQIETIFYKIQDIYEIHKEFYDNLCPKVQQWDSQVTMGHLFQ

SEQ ID NO: 20975 - protein, 85 aa, Artificial Sequence
  Synthetic polypeptide
GRARWVTPVIPALWEAEAGGSRGQEIETILANTVEAGKGLEMRKLVLSGFLASEEIYINQLEALLLPMKPLKATATTSQPVLTIQ

SEQ ID NO: 20976 - protein, 83 aa, Artificial Sequence
  Synthetic polypeptide
GRARWVTPVIPALWEAEAGGSRGQEIETILANTVEAGKGLEMRKLVLSGFLASEEIYINQLEALLLPMKPLKATATTSQPVLT

SEQ ID NO: 20977 - protein, 90 aa, Artificial Sequence
  Synthetic polypeptide
LNLVIQHFGRLRRAHHEVRRSRPSWLTRLAKAAFDDAIAELDTLSEESYKDSTLIMQLLRDNLTLWTSDMQGDGEEQNKEALQDVEDENQ

SEQ ID NO: 20978 - protein, 17 aa, Artificial Sequence
  Synthetic polypeptide
HGWQKQLLMMQLQNWIR

SEQ ID NO: 20979 - protein, 33 aa, Artificial Sequence
  Synthetic polypeptide
QPCNPALWEAEAGTSRGQKIKTILANTVGKSSF

SEQ ID NO: 20980 - protein, 44 aa, Artificial Sequence
  Synthetic polypeptide
LNLVIQHFGRLRRAHHEVRRSRPSWLTRLAKAAFDDAIAELDTL

SEQ ID NO: 20981 - protein, 75 aa, Artificial Sequence
  Synthetic polypeptide
LNLVIQHFGRLRRAHHEVRRSRPSWLTRLAKAAFDDAIAELDTLSEESYKDSTLIMQLLRDNLTLWTSDMQGDDS

SEQ ID NO: 20982 - protein, 34 aa, Artificial Sequence
  Synthetic polypeptide
LNLVIQHFGRLRRAHHEVRRSRPSWLTRLAKAAF

SEQ ID NO: 20983 - protein, 8 aa, Artificial Sequence
  Synthetic polypeptide
HGWQKQLL

SEQ ID NO: 20984 - protein, 96 aa, Artificial Sequence
  Synthetic polypeptide
KYKISRVWWCMPAIPVTREAETGELFEPRRQRLRLAKAAFDDAIAELDTLSEESYKDSTLIMQLLRDNLTLWTSDMQGDGEEQNKEALQDVEDENQ

SEQ ID NO: 20985 - protein, 55 aa, Artificial Sequence
  Synthetic polypeptide
NSVSIKNTKLAGCGGACLQSQLLGRLRQENCLNPGGRGCGWQKQLLMMQLQNWIR

SEQ ID NO: 20986 - protein, 13 aa, Artificial Sequence
  Synthetic polypeptide
TQEAEVAVGKSSF

SEQ ID NO: 20987 - protein, 50 aa, Artificial Sequence
  Synthetic polypeptide
KYKISRVWWCMPAIPVTREAETGELFEPRRQRLRLAKAAFDDAIAELDTL

SEQ ID NO: 20988 - protein, 81 aa, Artificial Sequence
  Synthetic polypeptide
KYKISRVWWCMPAIPVTREAETGELFEPRRQRLRLAKAAFDDAIAELDTLSEESYKDSTLIMQLLRDNLTLWTSDMQGDDS

SEQ ID NO: 20989 - protein, 40 aa, Artificial Sequence
  Synthetic polypeptide
KYKISRVWWCMPAIPVTREAETGELFEPRRQRLRLAKAAF

SEQ ID NO: 20990 - protein, 46 aa, Artificial Sequence
  Synthetic polypeptide
NSVSIKNTKLAGCGGACLQSQLLGRLRQENCLNPGGRGCGWQKQLL

SEQ ID NO: 20991 - protein, 9 aa, Artificial Sequence
  Synthetic polypeptide
EGCHYYLQS

SEQ ID NO: 20992 - protein, 418 aa, Artificial Sequence
  Synthetic polypeptide
ASQLGPLTPQRTFGNIWKRSWLSQPRRDAIITCNPEEFIVEALQLPNFQQSVQEYRRSAQDGPAPAEKRSQYPEIIFLGTGSAIPMKIRNVSATLVNISPDTSLLLDCGEGTFGQLCRHYGDQVDRVLGTLAAVFVSHLHADHHTGLPSILLQRERALASLGKPLHPLLVVAPNQLKAWLQQYHNQCQEVLHHISMIPAKCLQEGAEISSPAVERLISSLLRTCDLEEFQTCLVRHCKHAFGCALVHTSGWKVVYSGDTMPCEALVRMGKDATLLIHEATLEDGLEEEAVEKTHSTTSQAISVGMRMNAEFIMLNHFSQRYAKVPLFSPNFSEKVGVAFDHMKVCFGDFPTMPKLIPPLKALFAGDIEEMEERREKRELRQVRAALLSRELAGGLEDGEPQQKRAHTEEPQAKKVRAQ

SEQ ID NO: 20993 - protein, 31 aa, Artificial Sequence
  Synthetic polypeptide
PLRGHLATSGNVLGCHSLGGMPLLLAILRNS

SEQ ID NO: 20994 - protein, 98 aa, Artificial Sequence
  Synthetic polypeptide
ASQLGPLTPQRTFGNIWKRSWLSQPRRDAIITCNPEEFIVEALQLPNFQQSVQEYRRSAQDGPAPAEKRSQYPEIIFLGTGSAIPMKIRNVSATLVNI

SEQ ID NO: 20995 - protein, 42 aa, Artificial Sequence
  Synthetic polypeptide
GRARWLTPGIPALWEAEAGGSPEVRSSRPAWPTWPWAVTGFG

SEQ ID NO: 20996 - protein, 37 aa, Artificial Sequence
  Synthetic polypeptide
AGRDGSRLESQHFGRPRRVDHLRSGVPDQLGQHGPGQ

SEQ ID NO: 20997 - protein, 1049 aa, Artificial Sequence
  Synthetic polypeptide
GQEFQTSLANMALGSDGVRVTMESALTARDRVGVQDFVLLENFTSEAAFIENLRRRFRENLIYTYIGPVLVSVNPYRDLQIYSRQHMERYRGVSFYEVPPHLFAVADTVYRALRTERRDQAVMISGESGAGKTEATKRLLQFYAETCPAPERGGAVRDRLLQSNPVLEAFGNAKTLRNDNSSRFGKYMDVQFDFKGAPVGGHILSYLLEKSRVVHQNHGERNFHIFYQLLEGGEEETLRRLGLERNPQSYLYLVKGQCAKVSSINDKSDWKVVRKALTVIDFTEDEVEDLLSIVASVLHLGNIHFAANEESNAQVTTENQLKYLTRLLSVEGSTLREALTHRKIIAKGEELLSPLNLEQAAYARDALAKAVYSRTFTWLVGKINRSLASKDVESPSWRSTTVLGLLDIYGFEVFQHNSFEQFCINYCNEKLQQLFIELTLKSEQEEYEAEGIAWEPVQYFNNKIICDLVEEKFKGIISILDEECLRPGEATDLTFLEKLEDTVKHHPHFLTHKLADQRTRKSLGRGEFRLLHYAGEVTYSVTGFLDKNNDLLFRNLKETMCSSKNPIMSQCFDRSELSDKKRPETVATQFKMSLLQLVEILQSKEPAYVRCIKPNDAKQPGRFDEVLIRHQVKYLGLLENLRVRRAGFAYRRKYEAFLQRYKSLCPETWPTWAGRPQDGVAVLVRHLGYKPEEYKMGRTKIFIRFPKTLFATEDALEVRRQSLATKIQAAWRGFHWRQKFLRVKRSAICIQSWWRGTLGRRKAAKRKWAAQTIRRLIRGFVLRHAPRCPENAFFLDHVRTSFLLNLRRQLPQNVLDTSWPTPPPALREASELLRELCIKNMVWKYCRSISPEWKQQLQQKAVASEIFKGKKDNYPQSVPRLFISTRLGTDEISPRVLQALGSEPIQYAVPVVKYDRKGYKPRSRQLLLTPNAVVIVEDAKVKQRIDYANLTGISVSSLSDSLFVLHVQRADNKQKGDVVLQSDHVIETLTKTALSANRVNSININQGSITFAGGPGRDGTIDFTPGSELLITKAKNGHLAVVAPRLNSR

SEQ ID NO: 20998 - protein, 176 aa, Artificial Sequence
  Synthetic polypeptide
GQEFQTSLANMALGSDGVRVTMESALTARDRVGVQDFVLLENFTSEAAFIENLRRRFRENLIYTYIGPVLVSVNPYRDLQIYSRQHMERYRGVSFYEVPPHLFAVADTVYRALRTERRDQAVMISGESGAGKTEATKRLLQFYAETCPAPERGGAVRDRLLQSNPVLEAFGNAKTL

SEQ ID NO: 20999 - protein, 68 aa, Artificial Sequence
  Synthetic polypeptide
EAKAGRSPEVESSRPAWPTRSPMSVCRGSSYWSLPSISICPISRFCLLNPPPLACLGTGGTKVESTSA

SEQ ID NO: 21000 - protein, 61 aa, Artificial Sequence
  Synthetic polypeptide
AGRGGSRLQSQHFERPRQADHLRSRVQDQPGQHGLPCPYAGDPLTGLCQVSAFALYPDSVY

SEQ ID NO: 21001 - protein, 372 aa, Artificial Sequence
  Synthetic polypeptide
GREFKTSLANTVSHVRMQGILLLVFAKYQHLPYIQILSTKSTPTGLFGYWGNKGGVNICLKLYGYYVSIINCHLPPHISNNYQRLEHFDRILEMQNCEGRDIPNILDHDLIIWFGDMNFRIEDFGLHFVRESIKNRCYGGLWEKDQLSIAKKHDPLLREFQEGRLLFPPTYKFDRNSNDYDTSEKKRKPAWTDRILWRLKRQPCAGPDTPIPPASHFSLSLRGYSSHMTYGISDHKPVSGTFDLELKPLVSAPLIVLMPEDLWTVENDMMVSYSSTSDFPSSPWDWIGLYKVGLRDVNDYVSYAWVGDSKVSCSDNLNQVYIDISNIPTTEDEFLLCYYSNSLRSVVGISRPFQIPPGSLREDPLGEAQPQI

SEQ ID NO: 21002 - protein, 60 aa, Artificial Sequence
  Synthetic polypeptide
GREFKTSLANTVSHVRMQGILLLVFAKYQHLPYIQILSTKSTPTGLFGYWGNKGGVNICL

SEQ ID NO: 21003 - protein, 111 aa, Artificial Sequence
  Synthetic polypeptide
EAKAGRSPEVESSRPAWPTRSPMSVCRGSSYWSLPSISICPISRFCLLNPPPLACLGTGSALPRNMTRCSGSSRRAAYSSRPPTSLIGTPTTMTPVRKNASLHGPIASCGG

SEQ ID NO: 21004 - protein, 276 aa, Artificial Sequence
  Synthetic polypeptide
GREFKTSLANTVSHVRMQGILLLVFAKYQHLPYIQILSTKSTPTGLFGYWLSIAKKHDPLLREFQEGRLLFPPTYKFDRNSNDYDTSEKKRKPAWTDRILWRLKRQPCAGPDTPIPPASHFSLSLRGYSSHMTYGISDHKPVSGTFDLELKPLVSAPLIVLMPEDLWTVENDMMVSYSSTSDFPSSPWDWIGLYKVGLRDVNDYVSYAWVGDSKVSCSDNLNQVYIDISNIPTTEDEFLLCYYSNSLRSVVGISRPFQIPPGSLREDPLGEAQPQI

SEQ ID NO: 21005 - protein, 91 aa, Artificial Sequence
  Synthetic polypeptide
EAKAGRSPEVESSRPAWPTRSPMSVCRGSSYWSLPSISICPISRFCLLNPPPLACLGTGSALPRNMTRCSGSSRRAAYSSRPPTSLIGTPT

SEQ ID NO: 21006 - protein, 82 aa, Artificial Sequence
  Synthetic polypeptide
GREFKTSLANTVSHVRMQGILLLVFAKYQHLPYIQILSTKSTPTGLFGYWLSIAKKHDPLLREFQEGRLLFPPTYKFDRNSN

SEQ ID NO: 21007 - protein, 84 aa, Artificial Sequence
  Synthetic polypeptide
GREFKTSLANTVSHVRMQGILLLVFAKYQHLPYIQILSTKSTPTGLFGYWGNKGGVNICLKLYGYYVSIINCHLPPHISNNYQR

SEQ ID NO: 21008 - protein, 58 aa, Artificial Sequence
  Synthetic polypeptide
EAKAGRSPEVESSRPAWPTRSPMSVCRGSSYWSLPSISICPISRFCLLNPPPLACLGT

SEQ ID NO: 21009 - protein, 50 aa, Artificial Sequence
  Synthetic polypeptide
GREFKTSLANTVSHVRMQGILLLVFAKYQHLPYIQILSTKSTPTGLFGYW

SEQ ID NO: 21010 - protein, 51 aa, Artificial Sequence
  Synthetic polypeptide
DRARWLMPVIPAPWEAKQSTHVCSNAGPRGSPEYTRESLECLPLLQNRYYK

SEQ ID NO: 21011 - protein, 212 aa, Artificial Sequence
  Synthetic polypeptide
SQHRGRPSKVPTFVRMLAPEGALNIHEKAWNAYPYCRTVITNEYMKEDFLIKIETWHKPDLGTQENVHKLEPEAWKHVEAVYIDIADRSQVLSKDYKAEEDPAKFKSIKTGRGPLGPNWKQELVNQKDCPYMCAYKLVTVKFKWWGLQNKVENFIHKQERRLFTNFHRQLFCWLDKWVDLTMDDIRRMEEETKRQLDEMRQKDPVKGMTADD

SEQ ID NO: 21012 - protein, 31 aa, Artificial Sequence
  Synthetic polypeptide
PGAVAHACNPSTVGGQAKYPRLFECWPQREP

SEQ ID NO: 21013 - protein, 51 aa, Artificial Sequence
  Synthetic polypeptide
DRARWLMPVIPAPWEAKQSTHVCSNAGPRGSPEYTRESLECLPLLQNRSSK

SEQ ID NO: 21014 - protein, 212 aa, Artificial Sequence
  Synthetic polypeptide
SQHRGRPSKVPTFVRMLAPEGALNIHEKAWNAYPYCRTVLPNEYMKEDFLIKIETWHKPDLGTQENVHKLEPEAWKHVEAVYIDIADRSQVLSKDYKAEEDPAKFKSIKTGRGPLGPNWKQELVNQKDCPYMCAYKLVTVKFKWWGLQNKVENFIHKQERRLFTNFHRQLFCWLDKWVDLTMDDIRRMEEETKRQLDEMRQKDPVKGMTADD

SEQ ID NO: 21015 - protein, 50 aa, Artificial Sequence
  Synthetic polypeptide
DRARWLMPVIPAPWEAKQSTHVCSNAGPRGSPEYTRESLECLPLLQNRCI

SEQ ID NO: 21016 - protein, 40 aa, Artificial Sequence
  Synthetic polypeptide
SQHRGRPSKVPTFVRMLAPEGALNIHEKAWNAYPYCRTGA

SEQ ID NO: 21017 - protein, 193 aa, Artificial Sequence
  Synthetic polypeptide
SQHRGRPSKVPTFVRMLAPEGALNIHEKAWNAYPYCRTVITNEYMKEDFLIKIETWHKPDLGTQENVHKLEPEAWKHVEAVYIDIADRSQVLSKVFPGDLDAHPRLKVSVFNTDYKAEEDPAKFKSIKTGRGPLGPNWKQELVNQKDCPYMCAYKLVTVKFKWWGLQNKVENFIHKQERRLFTNFHRQLFCWL

SEQ ID NO: 21018 - protein, 50 aa, Artificial Sequence
  Synthetic polypeptide
DRARWLMPVIPAPWEAKQSTHVCSNAGPRGSPEYTRESLECLPLLQNRYY

SEQ ID NO: 21019 - protein, 41 aa, Artificial Sequence
  Synthetic polypeptide
SQHRGRPSKVPTFVRMLAPEGALNIHEKAWNAYPYCRTVIT

SEQ ID NO: 21020 - protein, 106 aa, Artificial Sequence
  Synthetic polypeptide
SQHFDPLLHPAHNRARIHPLRCRGPVRCRVPLHPVRQPHGTAVSDQRALRPSAAAAVSGHDGSSPGRPSVGERGAAPSQPAGLLPPALPDLLPAPAGAAAAAEAGG

SEQ ID NO: 21021 - protein, 131 aa, Artificial Sequence
  Synthetic polypeptide
RPVAHACNLNTLILSFILHTIVRGFIHSAVGGLYAAVYPSTQFGSLTGLQSLISALFALLQQPLFLAMMGPLQGDPLWVNVGLLLLSLLGFCLPLYLICYRRQLERQLQQRQEDDKLFLKINGSSNQEAFV

SEQ ID NO: 21022 - protein, 40 aa, Artificial Sequence
  Synthetic polypeptide
HLDLGLPVSRTDSQKTLDFPGSYLKNMTPGRPMSPIPLRQ

SEQ ID NO: 21023 - protein, 56 aa, Artificial Sequence
  Synthetic polypeptide
DTDTQRKDRVKTKGEDAVHKPRREALEETSPADTLILGFQSPELTHRKHWTSPEAT

SEQ ID NO: 21024 - protein, 25 aa, Artificial Sequence
  Synthetic polypeptide
HLDLGLPVSRTDSQKTLDFPGSYLK

SEQ ID NO: 21025 - protein, 21 aa, Artificial Sequence
  Synthetic polypeptide
HLDLGLPVSRTESEPVMLRNQ

SEQ ID NO: 21026 - protein, 48 aa, Artificial Sequence
  Synthetic polypeptide
DTDTQRKDRVKTKGEDAVHKPRREALEETSPADTLILGFQSPELNLNL

SEQ ID NO: 21027 - protein, 85 aa, Artificial Sequence
  Synthetic polypeptide
HLDLGLPVSRTRRSRHIAQTGLKVLGSRDPPASAFQSAGITGVSRCPGHPSRKFHQDSQKTLDFPGSYLKNMTPGRPMSPIPLRQ

SEQ ID NO: 21028 - protein, 54 aa, Artificial Sequence
  Synthetic polypeptide
DTDTQRKDRVKTKGEDAVHKPRREALEETSPADTLILGFQSPELDGLATLPRLV

SEQ ID NO: 21029 - protein, 133 aa, Artificial Sequence
  Synthetic polypeptide
HLDLGLPVSRTRRSRHIAQTGLKVLGSRDPPASAFQSAGITGVSRCPGHPSRKFHQVDINSFTRITDRALYWKPAPRLSSPPLRAAPGNCQQMAPARLFLSLRLWAWRGGGESPNSRGTGEPGPKFHLASGMH

SEQ ID NO: 21030 - protein, 29 aa, Artificial Sequence
  Synthetic polypeptide
NERTLDNNSNPHEEIKNIIKGDCIWRQDL

SEQ ID NO: 21031 - protein, 21 aa, Artificial Sequence
  Synthetic polypeptide
KTSLKVTVFGDRTFKDMIKIK

SEQ ID NO: 21032 - protein, 135 aa, Artificial Sequence
  Synthetic polypeptide
QGLANYGLQTKSSPTPVFAVVIMGVVLQGANLYGYIRCKVRSRKHLTSMATSYFGKQFLRQRRSRHIAQTGLKVLGSRDPPASAFQSAGITGVSRCPGHPSRKFHQDSQKTLDFPGSYLKNMTPGRPMSPIPLRQ

SEQ ID NO: 21033 - protein, 45 aa, Artificial Sequence
  Synthetic polypeptide
KGWQTMACRPNPARHLFLRWLLWVWCYKVPTCMVTSGVRCAAESI

SEQ ID NO: 21034 - protein, 37 aa, Artificial Sequence
  Synthetic polypeptide
RVGKLWPADQIQPDTCFCGGYYGCGATRCQPVWLHQV

SEQ ID NO: 21035 - protein, 69 aa, Artificial Sequence
  Synthetic polypeptide
QGLANYGLQTKSSPTPVFAVVIMGVVLQGANLYGYIRCKVRSRKHLTSMATSYFGKQFLRQNTGDDQTS

SEQ ID NO: 21036 - protein, 67 aa, Artificial Sequence
  Synthetic polypeptide
QGLANYGLQTKSSPTPVFAVVIMGVVLQGANLYGYIRCKVRSRKHLTSMATSYFGKQFLRQVSVFWM

SEQ ID NO: 21037 - protein, 38 aa, Artificial Sequence
  Synthetic polypeptide
QGLANYGLQTKSSPTPVFAVVIMGVVLQGANLYGYIRC

SEQ ID NO: 21038 - protein, 37 aa, Artificial Sequence
  Synthetic polypeptide
KGWQTMACRPNPARHLFLRWLLWVWCYKVPTCMVTSG

SEQ ID NO: 21039 - protein, 172 aa, Artificial Sequence
  Synthetic polypeptide
LRPVIPALWEDEDSNDDTEDVSLFDAEEETTNRPRKAKIRHPVASFFHLFFRVSAIIVCLLCELLSSSFITCMVTIILLLSCDFWAVKNVTGRLMVGLRWWNHIDEDGKSHWVFESRKESSQENKTVSEAESRIFWLGLIACSVLWVIFAFSALFSFTVKWLESEPVMLRNQ

SEQ ID NO: 21040 - protein, 38 aa, Artificial Sequence
  Synthetic polypeptide
SQHFGRTRIVMMTLKMFHCLMRKRRRLIDQEKPKSDIQ

SEQ ID NO: 21041 - protein, 17 aa, Artificial Sequence
  Synthetic polypeptide
PGVVTQACNPSTLGGRG

SEQ ID NO: 21042 - protein, 45 aa, Artificial Sequence
  Synthetic polypeptide
LRPVIPALWEDEDSNDDTEDVSLFDAEEETTNRPRKAKIRMSQVD

SEQ ID NO: 21043 - protein, 39 aa, Artificial Sequence
  Synthetic polypeptide
SQHFGRTRIVMMTLKMFHCLMRKRRRLIDQEKPKSECHR

SEQ ID NO: 21044 - protein, 61 aa, Artificial Sequence
  Synthetic polypeptide
LRPVIPALWEDEDSNDDTEDVSLFDAEEETTNRPRKAKIRHPVASFFHLFFRVSAIIVCLL

SEQ ID NO: 21045 - protein, 284 aa, Artificial Sequence
  Synthetic polypeptide
LRPVIPALWEDEDSNDDTEDVSLFDAEEETTNRPRKAKIRHPVASFFHLFFRVSAIIVCLLCELLSSSFITCMVTIILLLSCDFWAVKNVTGRLMVGLRWWNHIDEDGKSHWVFESRKESSQENKTVSEAESRIFWLGLIACSVLWVIFAFSALFSFTVKWLRRSRHIAQTGLKVLGSRDPPASAFQSAGITGVSRCPGHPSRKFHQVDINSFTRITDRALYWKPAPRLSSPPLRAAPGNCQQMAPARLFLSLRLWAWRGGGESPNSRGTGEPGPKFHLASGMH

SEQ ID NO: 21046 - protein, 213 aa, Artificial Sequence
  Synthetic polypeptide
LRPVIPALWEDEDSNDDTEDVSLFDAEEETTNRPRKAKIRHPVASFFHLFFRVSAIIVCLLCELLSSSFITCMVTIILLLSCDFWAVKNVTGRLMVGLRWWNHIDEDGKSHWVFESRKESSQENKTVSEAESRIFWLGLIACSVLWVIFAFSALFSFTVKWLAVVIMGVVLQGANLYGYIRCKVRSRKHLTSMATSYFGKQFLRQNTGDDQTS

SEQ ID NO: 21047 - protein, 211 aa, Artificial Sequence
  Synthetic polypeptide
LRPVIPALWEDEDSNDDTEDVSLFDAEEETTNRPRKAKIRHPVASFFHLFFRVSAIIVCLLCELLSSSFITCMVTIILLLSCDFWAVKNVTGRLMVGLRWWNHIDEDGKSHWVFESRKESSQENKTVSEAESRIFWLGLIACSVLWVIFAFSALFSFTVKWLAVVIMGVVLQGANLYGYIRCKVRSRKHLTSMATSYFGKQFLRQVSVFWM

SEQ ID NO: 21048 - protein, 14 aa, Artificial Sequence
  Synthetic polypeptide
AEIPPVHSSLATGL

SEQ ID NO: 21049 - protein, 37 aa, Artificial Sequence
  Synthetic polypeptide
SQLHRRLRQENRWNPGGGGCSEPRSHQCTPAWQQDCE

SEQ ID NO: 21050 - protein, 1104 aa, Artificial Sequence
  Synthetic polypeptide
GRRIAGTREAEVAVSRDPTSALQPGNRIVNKWNTALIGLMTYFREAVVNTQELLDLLVKCENKIQTRIKIGLNSKMPSRFPPVVFYTPKELGGLGMLSMGHVLIPQSDLRWSKQTDVGITHFRSGMSHEEDQLIPNLYRYIQPWESEFIDSQRVWAEYALKRQEAIAQNRRLTLEDLEDSWDRGIPRINTLFQKDRHTLAYDKGWRVRTDFKQYQVLKQNPFWWTHQRHDGKLWNLNNYRTDMIQALGGVEGILEHTLFKGTYFPTWEGLFWEKASGFEESMKWKKLTNAQRSGLNQIPNRRFTLWWSPTINRANVYVGFQVQLDLTGIFMHGKIPTLKISLIQIFRAHLWQKIHESIVMDLCQVFDQELDALEIETVQKETIHPRKSYKMNSSCADILLFASYKWNVSRPSLLADSKDVMDSTTTQKYWIDIQLRWGDYDSHDIERYARAKFLDYTTDNMSIYPSPTGVLIAIDLAYNLHSAYGNWFPGSKPLIQQAMAKIMKANPALYVLRERIRKGLQLYSSEPTEPYLSSQNYGELFSNQIIWFVDDTNVYRVTIHKTFEGNLTTKPINGAIFIFNPRTGQLFLKIIHTSVWAGQKRLGQLAKWKTAEEVAALIRSLPVEEQPKQIIVTRKGMLDPLEVHLLDFPNIVIKGSELQLPFQACLKVEKFGDLILKATEPQMVLFNLYDDWLKTISSYTAFSRLILILRALHVNNDRAKVILKPDKTTITEPHHIWPTLTDEEWIKVEVQLKDLILADYGKKNNVNVASLTQSEIRDIILGMEISAPSQQRQQIAEIEKQTKEQSQLTATQTRTVNKHGDEIITSTTSNYETQTFSSKTEWRVRAISAANLHLRTNHIYVSSDDIKETGYTYILPKNVLKKFICISDLRAQIAGYLYGVSPPDNPQVKEIRCIVMVPQWGTHQTVHLPGQLPQHEYLKEMEPLGWIHTQPNESPQLSPQDVTTHAKIMADNPSWDGEKTIIITCSFTPGSCTLTAYKLTPSGYEWGRQNTDKGNNPKGYLPSHYERVQMLLSDRFLGFFMVPAQSSWNYNFMGVRHDPNMKYELQLANPKEFYHEVHRPSHFLNFALLQEGEVYSADREDLYA

SEQ ID NO: 21051 - protein, 44 aa, Artificial Sequence
  Synthetic polypeptide
PTWRNPVSTKNTKLAGCGGTCLQSQLLGRLRQENRLNSGGRGYG

SEQ ID NO: 21052 - protein, 23 aa, Artificial Sequence
  Synthetic polypeptide
TREAEVTAEVSLWLISHPGLGPS

SEQ ID NO: 21053 - protein, 141 aa, Artificial Sequence
  Synthetic polypeptide
KYKISRVWWHMPAIPATWEAEAGESLELGRQRLRLKFLFGSSATQALDLVDRQSITLISSPSGRRVYQVLGSSSKTYTCLASCHYCSCPAFAFSVLRKSDSILCKHLLAVYLSQVMRTCQQLSVSDKQLTDILLMEKKQEA

SEQ ID NO: 21054 - protein, 8 aa, Artificial Sequence
  Synthetic polypeptide
TREAEVTA

SEQ ID NO: 21055 - protein, 35 aa, Artificial Sequence
  Synthetic polypeptide
KYKISRVWWHMPAIPATWEAEAGESLELGRQRLRL

SEQ ID NO: 21056 - protein, 82 aa, Artificial Sequence
  Synthetic polypeptide
KYKISRVWWHMPAIPATWEAEAGESLELGRQRLRLKFLFGSSATQALDLVDRQSITLISSPSGRRVYQRQGLTMLPRLVSNS

SEQ ID NO: 21057 - protein, 22 aa, Artificial Sequence
  Synthetic polypeptide
SQLLCRLRQENCLNPGSGGCVP

SEQ ID NO: 21058 - protein, 9 aa, Artificial Sequence
  Synthetic polypeptide
TREVEVAFL

SEQ ID NO: 21059 - protein, 16 aa, Artificial Sequence
  Synthetic polypeptide
AEAGELLEPGKWRLRS

SEQ ID NO: 21060 - protein, 135 aa, Artificial Sequence
  Synthetic polypeptide
SQLLCRLRQENCLNPGSGGCVPDEYLLSLKFLFGSSATQALDLVDRQSITLISSPSGRRVYQVLGSSSKTYTCLASCHYCSCPAFAFSVLRKSDSILCKHLLAVYLSQVMRTCQQLSVSDKQLTDILLMEKKQEA

SEQ ID NO: 21061 - protein, 15 aa, Artificial Sequence
  Synthetic polypeptide
TREVEVAFLMNICYR

SEQ ID NO: 21062 - protein, 76 aa, Artificial Sequence
  Synthetic polypeptide
SQLLCRLRQENCLNPGSGGCVPDEYLLSLKFLFGSSATQALDLVDRQSITLISSPSGRRVYQRQGLTMLPRLVSNS

SEQ ID NO: 21063 - protein, 10 aa, Artificial Sequence
  Synthetic polypeptide
KCKEEFANQS

SEQ ID NO: 21064 - protein, 21 aa, Artificial Sequence
  Synthetic polypeptide
HKSARRSLQTKADQQVKQQEI

SEQ ID NO: 21065 - protein, 132 aa, Artificial Sequence
  Synthetic polypeptide
RSRLCNIKVQGGVCKPKLISKSNSRKSKSPIPGQGYLGTERPSSVSSVHSEGDYHRQTPGWAWEDRPSSTGSTQFPYNPLTMRMLSSTPPTPIACAPSAVNQAAPHQQNRIWEREPAPLLSAQYETLSDSDD

SEQ ID NO: 21066 - protein, 74 aa, Artificial Sequence
  Synthetic polypeptide
RSRLCNIKVQGGVCKPKLISKSNSRKSKSPIPGQGYLGTERPSSVSSVHSEGDYHRQTPGWAWEDRPSSTGSTQ

SEQ ID NO: 21067 - protein, 1306 aa, Artificial Sequence
  Synthetic polypeptide
GQARWLTPVIPALWEAKESGSRGQEFETSLTNMGTPALPQTGIPTEALVKGSISRMPIEDSSPEKGREEAASKGHVIYEGKSGHILSYDNIKNAREGTRSPRTAHEISLKRSYESVEGNIKQGMSMRESPVSAPLEGLICRALPRGSPHSDLKERTVLSGSIMQGTPRATTESFEDGLKYPKQIKRESPPIRAFEGAITKGKPYDGITTIKEMGRSIHEIPRQDILTQESRKTPEVVQSTRPIIEGSISQGTPIKFDNNSGQSAIKHNVKSLITGPSKLSRGMPPLEIVPENIKVVERGKYEDVKAGETVRSRHTSVVSSGPSVLRSTLHEAPKAQLSPGIYDDTSARRTPVSYQNTMSRGSPMMNRTSDVTISSNKSTNHERKSTLTPTQRESIPAKSPVPGVDPVVSHSPFDPHHRGSTAGEVYRSHLPTHLDPAMPFHRALDPAAAAYLFQRQLSPTPGYPSQYQLYAMENTRQTILNDYITSQQMQVNLRPDVARGLSPREQPLGLPYPATRGIIDLTNMPPTILVPHPGGTSTPPMDRITYIPGTQITFPPRPYNSASMSPGHPTHLAAAASAEREREREREKERERERIAAASSDLYLRPGSEQPGRPGSHGYVRSPSPSVRTQETMLQQRPSVFQGTNGTSVITPLDPTAQLRIMPLPAGGPSISQGLPASRYNTAADALAALVDAAASAPQMDVSKTKESKHEAARLEENLRSRSAAVSEQQQLEQKTLEVEKRSVQCLYTSSAFPSGKPQPHSSVVYSEAGKDKGPPPKSRYEEELRTRGKTTITAANFIDVIITRQIASDKDARERGSQSSDSSSSLSSHRYETPSDAIEVISPASSPAPPQEKLQTYQPEVVKANQAENDPTRQYEGPLHHYRPQQESPSPQQQLPPSSQAEGMGQVPRTHRLITLADHICQIITQDFARNQVSSQTPQQPPTSTFQNSPSALVSTPVRTKTSNRYSPESQAQSVHHQRPGSRVSPENLVDKSRGSRPGKSPERSHVSSEPYEPISPPQVPVVHEKQDSLLLLSQRGAEPAEQRNDARSPGSISYLPSFFTKLENTSPMVKSKKQEIFRKLNSSGGGDSDMAAAQPGTEIFNLPAVTTSGSVSSRGHSFADPASNLGLEDIIRKALMGSFDDKVEDHGVVMSQPMGVVPGTANTSVVTSGETRREEGDPSPHSGGVCKPKLISKSNSRKSKSPIPGQGYLGTERPSSVSSVHSEGDYHRQTPGWAWEDRPSSTGSTQFPYNPLTMRMLSSTPPTPIACAPSAVNQAAPHQQNRIWEREPAPLLSAQYETLSDSDD

SEQ ID NO: 21068 - protein, 18 aa, Artificial Sequence
  Synthetic polypeptide
PTWAPRLCPRLAYQQRLW

SEQ ID NO: 21069 - protein, 31 aa, Artificial Sequence
  Synthetic polypeptide
DQPDQHGHPGSAPDWHTNRGFGEGVHFENAH

SEQ ID NO: 21070 - protein, 1187 aa, Artificial Sequence
  Synthetic polypeptide
GQARWLTPVIPALWEAKESGSRGQEFETSLTNMGTPALPQTGIPTEALVKGSISRMPIEDSSPEKGREEAASKGHVIYEGKSGHILSYDNIKNAREGTRSPRTAHEISLKRSYESVEGNIKQGMSMRESPVSAPLEGLICRALPRGSPHSDLKERTVLSGSIMQGTPRATTESFEDGLKYPKQIKRESPPIRAFEGAITKGKPYDGITTIKEMGRSIHEIPRQDILTQESRKTPEVVQSTRPIIEGSISQGTPIKFDNNSGQSAIKHNVKSLITGPSKLSRGMPPLEIVPENIKVVERGKYEDVKAGETVRSRHTSVVSSGPSVLRSTLHEAPKAQLSPGIYDDTSARRTPVSYQNTMSRGSPMMNRTSDVTISSNKSTNHERKSTLTPTQRESIPAKSPVPGVDPVVSHSPFDPHHRGSTAGEVYRSHLPTHLDPAMPFHRALDPAAAAYLFQRQLSPTPGYPSQYQLYAMENTRQTILNDYITSQQMQVNLRPDVARGLSPREQPLGLPYPATRGIIDLTNMPPTILVPHPGGTSTPPMDRITYIPGTQITFPPRPYNSASMSPGHPTHLAAAASAEREREREREKERERERIAAASSDLYLRPGSEQPGRPGSHGYVRSPSPSVRTQETMLQQRPSVFQGTNGTSVITPLDPTAQLRIMPLPAGGPSISQGLPASRYNTAADALAALVDAAASAPQMDVSKTKEISSHRYETPSDAIEVISPASSPAPPQEKLQTYQPEVVKANQAENDPTRQYEGPLHHYRPQQESPSPQQQLPPSSQAEGMGQVPRTHRLITLADHICQIITQDFARNQVSSQTPQQPPTSTFQNSPSALVSTPVRTKTSNRYSPESQAQSVHHQRPGSRVSPENLVDKSRGSRPGKSPERSHVSSEPYEPISPPQVPVVHEKQDSLLLLSQRGAEPAEQRNDARSPGSISYLPSFFTKLENTSPMVKSKKQEIFRKLNSSGGGDSDMAAAQPGTEIFNLPAVTTSGSVSSRGHSFADPASNLGLEDIIRKALMGSFDDKVEDHGVVMSQPMGVVPGTANTSVVTSGETRREEGDPSPHSGGVCKPKLISKSNSRKSKSPIPGQGYLGTERPSSVSSVHSEGDYHRQTPGWAWEDRPSSTGSTQFPYNPLTMRMLSSTPPTPIACAPSAVNQAAPHQQNRIWEREPAPLLSAQYETLSDSDD

SEQ ID NO: 21071 - protein, 47 aa, Artificial Sequence
  Synthetic polypeptide
GQARWLTPVIPALWEAKESGSRGHPGSAPDWHTNRGFGEGVHFENAH

SEQ ID NO: 21072 - protein, 1286 aa, Artificial Sequence
  Synthetic polypeptide
SQHFGRPRRADHEGTPALPQTGIPTEALVKGSISRMPIEDSSPEKGREEAASKGHVIYEGKSGHILSYDNIKNAREGTRSPRTAHEISLKRSYESVEGNIKQGMSMRESPVSAPLEGLICRALPRGSPHSDLKERTVLSGSIMQGTPRATTESFEDGLKYPKQIKRESPPIRAFEGAITKGKPYDGITTIKEMGRSIHEIPRQDILTQESRKTPEVVQSTRPIIEGSISQGTPIKFDNNSGQSAIKHNVKSLITGPSKLSRGMPPLEIVPENIKVVERGKYEDVKAGETVRSRHTSVVSSGPSVLRSTLHEAPKAQLSPGIYDDTSARRTPVSYQNTMSRGSPMMNRTSDVTISSNKSTNHERKSTLTPTQRESIPAKSPVPGVDPVVSHSPFDPHHRGSTAGEVYRSHLPTHLDPAMPFHRALDPAAAAYLFQRQLSPTPGYPSQYQLYAMENTRQTILNDYITSQQMQVNLRPDVARGLSPREQPLGLPYPATRGIIDLTNMPPTILVPHPGGTSTPPMDRITYIPGTQITFPPRPYNSASMSPGHPTHLAAAASAEREREREREKERERERIAAASSDLYLRPGSEQPGRPGSHGYVRSPSPSVRTQETMLQQRPSVFQGTNGTSVITPLDPTAQLRIMPLPAGGPSISQGLPASRYNTAADALAALVDAAASAPQMDVSKTKESKHEAARLEENLRSRSAAVSEQQQLEQKTLEVEKRSVQCLYTSSAFPSGKPQPHSSVVYSEAGKDKGPPPKSRYEEELRTRGKTTITAANFIDVIITRQIASDKDARERGSQSSDSSSSLSSHRYETPSDAIEVISPASSPAPPQEKLQTYQPEVVKANQAENDPTRQYEGPLHHYRPQQESPSPQQQLPPSSQAEGMGQVPRTHRLITLADHICQIITQDFARNQVSSQTPQQPPTSTFQNSPSALVSTPVRTKTSNRYSPESQAQSVHHQRPGSRVSPENLVDKSRGSRPGKSPERSHVSSEPYEPISPPQVPVVHEKQDSLLLLSQRGAEPAEQRNDARSPGSISYLPSFFTKLENTSPMVKSKKQEIFRKLNSSGGGDSDMAAAQPGTEIFNLPAVTTSGSVSSRGHSFADPASNLGLEDIIRKALMGSFDDKVEDHGVVMSQPMGVVPGTANTSVVTSGETRREEGDPSPHSGGVCKPKLISKSNSRKSKSPIPGQGYLGTERPSSVSSVHSEGDYHRQTPGWAWEDRPSSTGSTQFPYNPLTMRMLSSTPPTPIACAPSAVNQAAPHQQNRIWEREPAPLLSAQYETLSDSDD

SEQ ID NO: 21073 - protein, 37 aa, Artificial Sequence
  Synthetic polypeptide
PGAVAHACNPSTLGGQGERITRAPRLCPRLAYQQRLW

SEQ ID NO: 21074 - protein, 1167 aa, Artificial Sequence
  Synthetic polypeptide
SQHFGRPRRADHEGTPALPQTGIPTEALVKGSISRMPIEDSSPEKGREEAASKGHVIYEGKSGHILSYDNIKNAREGTRSPRTAHEISLKRSYESVEGNIKQGMSMRESPVSAPLEGLICRALPRGSPHSDLKERTVLSGSIMQGTPRATTESFEDGLKYPKQIKRESPPIRAFEGAITKGKPYDGITTIKEMGRSIHEIPRQDILTQESRKTPEVVQSTRPIIEGSISQGTPIKFDNNSGQSAIKHNVKSLITGPSKLSRGMPPLEIVPENIKVVERGKYEDVKAGETVRSRHTSVVSSGPSVLRSTLHEAPKAQLSPGIYDDTSARRTPVSYQNTMSRGSPMMNRTSDVTISSNKSTNHERKSTLTPTQRESIPAKSPVPGVDPVVSHSPFDPHHRGSTAGEVYRSHLPTHLDPAMPFHRALDPAAAAYLFQRQLSPTPGYPSQYQLYAMENTRQTILNDYITSQQMQVNLRPDVARGLSPREQPLGLPYPATRGIIDLTNMPPTILVPHPGGTSTPPMDRITYIPGTQITFPPRPYNSASMSPGHPTHLAAAASAEREREREREKERERERIAAASSDLYLRPGSEQPGRPGSHGYVRSPSPSVRTQETMLQQRPSVFQGTNGTSVITPLDPTAQLRIMPLPAGGPSISQGLPASRYNTAADALAALVDAAASAPQMDVSKTKEISSHRYETPSDAIEVISPASSPAPPQEKLQTYQPEVVKANQAENDPTRQYEGPLHHYRPQQESPSPQQQLPPSSQAEGMGQVPRTHRLITLADHICQIITQDFARNQVSSQTPQQPPTSTFQNSPSALVSTPVRTKTSNRYSPESQAQSVHHQRPGSRVSPENLVDKSRGSRPGKSPERSHVSSEPYEPISPPQVPVVHEKQDSLLLLSQRGAEPAEQRNDARSPGSISYLPSFFTKLENTSPMVKSKKQEIFRKLNSSGGGDSDMAAAQPGTEIFNLPAVTTSGSVSSRGHSFADPASNLGLEDIIRKALMGSFDDKVEDHGVVMSQPMGVVPGTANTSVVTSGETRREEGDPSPHSGGVCKPKLISKSNSRKSKSPIPGQGYLGTERPSSVSSVHSEGDYHRQTPGWAWEDRPSSTGSTQFPYNPLTMRMLSSTPPTPIACAPSAVNQAAPHQQNRIWEREPAPLLSAQYETLSDSDD

SEQ ID NO: 21075 - protein, 1776 aa, Artificial Sequence
  Synthetic polypeptide
DVTCSSFPFAMIVKPPQPCGTTSRKPREERDVSQCESVASTVSAQEDEDIEASNEEENPEDSEVEAVKPSEDSPENATSRGNTEPAVELEPTTETAPSTSPSLAVPSTKPAEDESVETQVNDSISAETAEQMDVDQQEHSAEEGSVCDPPPATKADSVDVEVRVPENHASKVEGDNTKERDLDRASEKVEPRDEDLVVAQQINAQRPEPQSDNDSSATCSADEDVDGEPERQRMFPMDSKPSLLNPTGSILVSSPLKPNPLDLPQLQHRAAVIPPMVSCTPCNIPIGTPVSGYALYQRHIKAMHESALLEEQRQRQEQIDLECRSSTSPCGTSKSPNREWEVLQPAPHQVITNLPEGVRLPTTRPTRPPPPLIPSSKTTVASEKPSFIMGGSISQGTPGTYLTSHNQASYTQETPKPSVGSISLGLPRQQESAKSATLPYIKQEEFSPRSQNSQPEGLLVRAQHEGVVRGTAGAIQEGSITRGTPTSKISVESIPSLRGSITQGTPALPQTGIPTEALVKGSISRMPIEDSSPEKGREEAASKGHVIYEGKSGHILSYDNIKNAREGTRSPRTAHEISLKRSYESVEGNIKQGMSMRESPVSAPLEGLICRALPRGSPHSDLKERTVLSGSIMQGTPRATTESFEDGLKYPKQIKRESPPIRAFEGAITKGKPYDGITTIKEMGRSIHEIPRQDILTQESRKTPEVVQSTRPIIEGSISQGTPIKFDNNSGQSAIKHNVKSLITGPSKLSRGMPPLEIVPENIKVVERGKYEDVKAGETVRSRHTSVVSSGPSVLRSTLHEAPKAQLSPGIYDDTSARRTPVSYQNTMSRGSPMMNRTSDVTISSNKSTNHERKSTLTPTQRESIPAKSPVPGVDPVVSHSPFDPHHRGSTAGEVYRSHLPTHLDPAMPFHRALDPAAAAYLFQRQLSPTPGYPSQYQLYAMENTRQTILNDYITSQQMQVNLRPDVARGLSPREQPLGLPYPATRGIIDLTNMPPTILVPHPGGTSTPPMDRITYIPGTQITFPPRPYNSASMSPGHPTHLAAAASAEREREREREKERERERIAAASSDLYLRPGSEQPGRPGSHGYVRSPSPSVRTQETMLQQRPSVFQGTNGTSVITPLDPTAQLRIMPLPAGGPSISQGLPASRYNTAADALAALVDAAASAPQMDVSKTKESKHEAARLEENLRSRSAAVSEQQQLEQKTLEVEKRSVQCLYTSSAFPSGKPQPHSSVVYSEAGKDKGPPPKSRYEEELRTRGKTTITAANFIDVIITRQIASDKDARERGSQSSDSSSSLSSHRYETPSDAIEVISPASSPAPPQEKLQTYQPEVVKANQAENDPTRQYEGPLHHYRPQQESPSPQQQLPPSSQAEGMGQVPRTHRLITLADHICQIITQDFARNQVSSQTPQQPPTSTFQNSPSALVSTPVRTKTSNRYSPESQAQSVHHQRPGSRVSPENLVDKSRGSRPGKSPERSHVSSEPYEPISPPQVPVVHEKQDSLLLLSQRGAEPAEQRNDARSPGSISYLPSFFTKLENTSPMVKSKKQEIFRKLNSSGGGDSDMAAAQPGTEIFNLPAVTTSGSVSSRGHSFADPASNLGLEDIIRKALMGSFDDKVEDHGVVMSQPMGVVPGTANTSVVTSGETRREEGDPSPHSGGVCKPKLISKSNSRKSKSPIPGQGYLGTERPSSVSSVHSEGDYHRQTPGWAWEDRPSSTGSTQFPYNPLTMRMLSSTPPTPIACAPSAVNQAAPHQQNRIWEREPAPLLSAQYETLSDSDD

SEQ ID NO: 21076 - protein, 89 aa, Artificial Sequence
  Synthetic polypeptide
SLPSHVELLHENLVKSEMCLNVKVSLPLFLLRRMKILKPPMKKKIQKTAKLKLSSPARTVLKMLLLEETQNLRLSLSPPRKLHPVHLPP

SEQ ID NO: 21077 - protein, 59 aa, Artificial Sequence
  Synthetic polypeptide
ISLRRSTGFRKRSSPAQVFFFFFFFFACRHHVRRYLLLLPFCHDCEASPAMWNYFTKTS

SEQ ID NO: 21078 - protein, 1673 aa, Artificial Sequence
  Synthetic polypeptide
DVTCSSFPFAMIVKPPQPCGTTSRKPREERDVSQCESVASTVSAQEDEDIEASNEEENPEDSEGAENSSDTESAPSPSPVEAVKPSEDSPENATSRGNTEPAVELEPTTETAPSTSPSLAVPSTKPAEDESVETQVNDSISAETAEQMDVDQQEHSAEEGSVCDPPPATKADSVDVEVRVPENHASKVEGDNTKERDLDRASEKVEPRDEDLVVAQQINAQRPEPQSDNDSSATCSADEDVDGEPERQRMFPMDSKPSLLNPTGSILVSSPLKPNPLDLPQLQHRAAVIPPMVSCTPCNIPIGTPVSGYALYQRHIKAMHESALLEEQRQRQEQIDLECRSSTSPCGTSKSPNREWEVLQPAPHQVITNLPEGVRLPTTRPTRPPPPLIPSSKTTVASEKPSFIMGGSISQGTPGTYLTSHNQASYTQETPKPSVGSISLGLPRQQESAKSATLPYIKQEEFSPRSQNSQPEGLLVRAQHEGVVRGTAGAIQEGSITRGTPTSKISVESIPSLRGSITQGTPALPQTGIPTEALVKGSISRMPIEDSSPEKGREEAASKGHVIYEGKSGHILSYDNIKNAREGTRSPRTAHEISLKRSYESVEGNIKQGMSMRESPVSAPLEGLICRALPRGSPHSDLKERTVLSGSIMQGTPRATTESFEDGLKYPKQIKRESPPIRAFEGAITKGKPYDGITTIKEMGRSIHEIPRQDILTQESRKTPEVVQSTRPIIEGSISQGTPIKFDNNSGQSAIKHNVKSLITGPSKLSRGMPPLEIVPENIKVVERGKYEDVKAGETVRSRHTSVVSSGPSVLRSTLHEAPKAQLSPGIYDDTSARRTPVSYQNTMSRGSPMMNRTSDVTISSNKSTNHERKSTLTPTQRESIPAKSPVPGVDPVVSHSPFDPHHRGSTAGEVYRSHLPTHLDPAMPFHRALDPAAAAYLFQRQLSPTPGYPSQYQLYAMENTRQTILNDYITSQQMQVNLRPDVARGLSPREQPLGLPYPATRGIIDLTNMPPTILVPHPGGTSTPPMDRITYIPGTQITFPPRPYNSASMSPGHPTHLAAAASAEREREREREKERERERIAAASSDLYLRPGSEQPGRPGSHGYVRSPSPSVRTQETMLQQRPSVFQGTNGTSVITPLDPTAQLRIMPLPAGGPSISQGLPASRYNTAADALAALVDAAASAPQMDVSKTKEISSHRYETPSDAIEVISPASSPAPPQEKLQTYQPEVVKANQAENDPTRQYEGPLHHYRPQQESPSPQQQLPPSSQAEGMGQVPRTHRLITLADHICQIITQDFARNQVSSQTPQQPPTSTFQNSPSALVSTPVRTKTSNRYSPESQAQSVHHQRPGSRVSPENLVDKSRGSRPGKSPERSHVSSEPYEPISPPQVPVVHEKQDSLLLLSQRGAEPAEQRNDARSPGSISYLPSFFTKLENTSPMVKSKKQEIFRKLNSSGGGDSDMAAAQPGTEIFNLPAVTTSGSVSSRGHSFADPASNLGLEDIIRKALMGSFDDKVEDHGVVMSQPMGVVPGTANTSVVTSGETRREEGDPSPHSGGVCKPKLISKSNSRKSKSPIPGQGYLGTERPSSVSSVHSEGDYHRQTPGWAWEDRPSSTGSTQFPYNPLTMRMLSSTPPTPIACAPSAVNQAAPHQQNRIWEREPAPLLSAQYETLSDSDD

SEQ ID NO: 21079 - protein, 105 aa, Artificial Sequence
  Synthetic polypeptide
SLPSHVELLHENLVKSEMCLNVKVSLPLFLLRRMKILKPPMKKKIQKTAKVQKIVLIQKVLLLLHQLKLSSPARTVLKMLLLEETQNLRLSLSPPRKLHPVHLPP

SEQ ID NO: 21080 - protein, 359 aa, Artificial Sequence
  Synthetic polypeptide
DVTCSSFPFAMIVKPPQPCGTTSRKPREERDVSQCESVASTVSAQEDEDIEASNEEENPEDSEGAENSSDTESAPSPSPVEAVKPSEDSPENATSRGNTEPAVELEPTTETAPSTSPSLAVPSTKPAEDESVETQVNDSISAETAEQMDVDQQEHSAEEGSVCDPPPATKADSVDVEVRVPENHASKVEGDNTKERDLDRASEKVEPRDEDLVVAQQINAQRPEPQSDNDSSATCSADEDVDGEPERQRMFPMDSKPSLLNPTGSILVSSPLKPNPLDLPQLQHRAAVIPPMVSCTPCNIPIGTPVSGYALYQRHIKAMHESALLEEQRQRQEQIDLECRSSTSPCGTSKSPNREWEGR

SEQ ID NO: 21081 - protein, 269 aa, Artificial Sequence
  Synthetic polypeptide
EQGPCLSLACLLQYSQCLMNHRCSLNSWRLVERLETMRRNVMGNGLSQCLLCGEVLGFLGSSSVFCKDCRKKVCTKCGIEASPGQKRPLWLCKICSEQREVWKRSGAWFYKGLPKYILPLKTPGRADDPHFRPLPTEPAEREPRSSETSRIYTWARGRVVSSDSDSDSDLSSSSLEDRLPSTGVRDRKGDKPWKESGGSVEAPRMGFTHPPGHLSGCQSSLASGETGTGSADPPGGPRPGLTRRAPVKDTPGRAPAADAAPAGPSSCLG

SEQ ID NO: 21082 - protein, 11 aa, Artificial Sequence
  Synthetic polypeptide
IVGGWWSGWRP

SEQ ID NO: 21083 - protein, 65 aa, Artificial Sequence
  Synthetic polypeptide
LAAGGAAGDHEAECDGERPVPVSALRGGAGLPGQLVGVLQRLQEESLHQMWDRGLPWPEAAPVAV

SEQ ID NO: 21084 - protein, 240 aa, Artificial Sequence
  Synthetic polypeptide
EQGPCLSLACLLQYSQCLMNHRCSLNSWRLVERLETMRRNVMGNGLSQCLLCGEVLGFLGSSSVFCKDCRKVWKRSGAWFYKGLPKYILPLKTPGRADDPHFRPLPTEPAEREPRSSETSRIYTWARGRVVSSDSDSDSDLSSSSLEDRLPSTGVRDRKGDKPWKESGGSVEAPRMGFTHPPGHLSGCQSSLASGETGTGSADPPGGPRPGLTRRAPVKDTPGRAPAADAAPAGPSSCLG

SEQ ID NO: 21085 - protein, 70 aa, Artificial Sequence
  Synthetic polypeptide
LAAGGAAGDHEAECDGERPVPVSALRGGAGLPGQLVGVLQRLQEGLEEVGGLVLQRAPQVYLAPEDPWPS

SEQ ID NO: 21086 - protein, 155 aa, Artificial Sequence
  Synthetic polypeptide
EQGPCLSLACLLQYSQCLMNHRCSLNSWRLVERLETMRRNVMGNGLSQCLLCGEVLGFLGSSSVFCKDCRKKVCTKCGIEASPGQKRPLWLCKICSEQREVWKRSGAWFYKGLPKYILPLKTPGRADDPHFRPLPTEPAEREPRSSETSRIYTWA

SEQ ID NO: 21087 - protein, 147 aa, Artificial Sequence
  Synthetic polypeptide
EQGPCLSLACLLQYSQCLMNHRCSLNSWRLVERLETMRRNVMGNGLSQCLLCGEVLGFLGSSSVFCKDCRKKVCTKCGIEASPGQKRPLWLCKICSEQREVWKRSGAWFYKGLPKYILPLKTPGRADDPHFRPLPTEPAEREPRSSE

SEQ ID NO: 21088 - protein, 102 aa, Artificial Sequence
  Synthetic polypeptide
EQGPCLSLACLLQYSQCLMNHRCSLNSWRLVERLETMRRNVMGNGLSQCLLCGEVLGFLGSSSVFCKDCRKVWKRSGAWFYKGLPKYILPLKTPGRADDPHF

SEQ ID NO: 21089 - protein, 106 aa, Artificial Sequence
  Synthetic polypeptide
EQGPCLSLACLLQYSQCLMNHRCSLNSWRLVERLETMRRNVMGNGLSQCLLCGEVLGFLGSSSVFCKDCRKKVCTKCGIEASPGQKRPLWLCKICSEQREVWKRSG

SEQ ID NO: 21090 - protein, 115 aa, Artificial Sequence
  Synthetic polypeptide
EQGPCLSLACLLQYSQCLMNHRCSLNSWRLVERLETMRRNVMGNGLSQCLLCGEVLGFLGSSSVFCKDCRKKVCTKCGIEASPGQKRPLWLCKICSEQRELFYFTIYRVEPSVFL

SEQ ID NO: 21091 - protein, 99 aa, Artificial Sequence
  Synthetic polypeptide
EQGPCLSLACLLQYSQCLMNHRCSLNSWRLVERLETMRRNVMGNGLSQCLLCGEVLGFLGSSSVFCKDCRKKVCTKCGIEASPGQKRPLWLCKICSEQR

SEQ ID NO: 21092 - protein, 80 aa, Artificial Sequence
  Synthetic polypeptide
EQGPCLSLACLLQYSQCLMNHRCSLNSWRLVERLETMRRNVMGNGLSQCLLCGEVLGFLGSSSVFCKDCRKKVCTKCGIE

SEQ ID NO: 21093 - protein, 53 aa, Artificial Sequence
  Synthetic polypeptide
LAAGGAAGDHEAECDGERPVPVSALRGGAGLPGQLVGVLQRLQEESLHQMWDR

SEQ ID NO: 21094 - protein, 64 aa, Artificial Sequence
  Synthetic polypeptide
EQGPCLSLACLLQYSQCLMNHRCSLNSWRLVERLETMRRNVMGNGLSQCLLCGEVLGFLGSSSV

SEQ ID NO: 21095 - protein, 37 aa, Artificial Sequence
  Synthetic polypeptide
LAAGGAAGDHEAECDGERPVPVSALRGGAGLPGQLVG

SEQ ID NO: 21096 - protein, 42 aa, Artificial Sequence
  Synthetic polypeptide
EQGPCLSLACLLQYSQCLMNHRCSLNSWRLVERLETMRRNVM

SEQ ID NO: 21097 - protein, 15 aa, Artificial Sequence
  Synthetic polypeptide
LAAGGAAGDHEAECD

SEQ ID NO: 21098 - protein, 37 aa, Artificial Sequence
  Synthetic polypeptide
EQGPCLSLACLLQYSQCLMNHRCSLNSWRLVERLETM

SEQ ID NO: 21099 - protein, 10 aa, Artificial Sequence
  Synthetic polypeptide
LAAGGAAGDH

SEQ ID NO: 21100 - protein, 40 aa, Artificial Sequence
  Synthetic polypeptide
ALETQALVSNRLQILTTTSRVCCHRGGPRSRTFHPPPCGV

SEQ ID NO: 21101 - protein, 165 aa, Artificial Sequence
  Synthetic polypeptide
HWKHRLWFQTDFKFLPLRAEFAVIVEVHAAARSTLHPVGCEDDQSLSKYEFVVTSGSPVAADRVGPTILNKIEAALTNQNLSVDVVDQCLVCLKEEWMNKVKVLFKFTKVDSRPKEDTQKLLSILGASEEDNVKLLKFWMTGLSKTYKSHLMSTVRSPTASESRN

SEQ ID NO: 21102 - protein, 52 aa, Artificial Sequence
  Synthetic polypeptide
IGNTGSGFKQTSNSYHYEQSLLSSWRSTQPHVPPSTLWGVRMTSLSASTSLW

SEQ ID NO: 21103 - protein, 70 aa, Artificial Sequence
  Synthetic polypeptide
IQPFSVFSLPEFSAAFAFKPCLLQVTPSSLVFSGSAWQVYPRLICHHAEGGYKHKAHPPSHQHPSHYYGE

SEQ ID NO: 21104 - protein, 663 aa, Artificial Sequence
  Synthetic polypeptide
KTLAEGTSGLQVAKSSPFPFSAYLSSQQRLRLSPACFRSHPLPWFLVAQLGRSIPVLFAIMQKGDTNIKPILQVINIRPITTGNSPPRYRLLMSDGLNTLSSFMLATQLNPLVEEEQLSSNCVCQIHRFIVNTLKDGRRVVILMELEVLKSAEAVGVKIGNPVPYNEGLGQPQVAPPAPAASPAASSRPQPQNGSSGMGSTVSKAYGASKTFGKAAGPSLSHTSGGTQSKVVPIASLTPYQSKWTICARVTNKSQIRTWSNSRGEGKLFSLELVDESGEIRATAFNEQVDKFFPLIEVNKVYYFSKGTLKIANKQFTAVKNDYEMTFNNETSVMPCEDDHHLPTVQFDFTGIDDLENKSKDSLVDIIGICKSYEDATKITVRSNNREVAKRNIYLMDTSGKVVTATLWGEDADKFDGSRQPVLAIKGARVSDFGGRSLSVLSSSTIIANPDIPEAYKLRGWFDAEGQALDGVSISDLKSGGVGGSNTNWKTLYEVKSENLGQGDKPDYFSSVATVVYLRKENCMYQACPTQDCNKKVIDQQNGLYRCEKCDTEFPNFKYRMILSVNIADFQENQWVTCFQESAEAILGQNAAYLGELKDKNEQAFEEVFQNANFRSFIFRVRVKVETYNDESRIKATVMDVKPVDYREYGRRLVMSIRRSALM

SEQ ID NO: 21105 - protein, 21 aa, Artificial Sequence
  Synthetic polypeptide
WLSLAGLSPSYLPSCRRGIQT

SEQ ID NO: 21106 - protein, 55 aa, Artificial Sequence
  Synthetic polypeptide
QHGQGQPGGPPGPERPQKQVPGDAQAHQHHARHPPEPRTAAAAAAEPPGASQDQE

SEQ ID NO: 21107 - protein, 16 aa, Artificial Sequence
  Synthetic polypeptide
QVHKAWTRTARRSTRT

SEQ ID NO: 21108 - protein, 58 aa, Artificial Sequence
  Synthetic polypeptide
KYIRHGQGQPGGPPGPERPQKQVPGDAQAHQHHARHPPEPRTAAAAAAEPPGASQDQE

SEQ ID NO: 21109 - protein, 1043 aa, Artificial Sequence
  Synthetic polypeptide
VLDMLQLINNQDSDFPGLFDPPYAGSGAGGTDPASPDTSSPGSLSPPPATLSSSLEAFLSGPQAAPSPLSPPQPAPTPLKMYPSMPAFSPGPGIKEESVPLSILQTPTPQPLPGALLPQSFPAPAPPQFSSTPVLGYPSPPGGFSTGSPPGNTQQPLPGLPLASPPGVPPVSLHTQVQSVVPQQLLTVTAAPTAAPVTTTVTSQIQQVPVLLQPHFIKADSLLLTAMKTDGATVKAAGLSPLVSGTTVQTGPLPTLVSGGTILATVPLVVDAEKLPINRLAAGSKAPASAQSRGEKRTAHNAIEKRYRSSINDKIIELKDLVVGTEAKLNKSAVLRKAIDYIRFLQHSNQKLKQENLSLRTAVHKSKSLKDLVSACGSGGNTDVLMEGVKTEVEDTLTPPPSDAGSPFQSSPLSLGSRGSGSGGSGSDSEPDSPVFEDSKAKPEQRPSLHSRGMLDRSRLALCTLVFLCLSCNPLASLLGARGLPSPSDTTSVYHSPGRNVLGTESRDGPGWAQWLLPPVVWLLNGLLVLVSLVLLFVYGEPVTRPHSGPAVYFWRHRKQADLDLARGDFAQAAQQLWLALRALGRPLPTSHLDLACSLLWNLIRHLLQRLWVGRWLAGRAGGLQQDCALRVDASASARDAALVYHKLHQLHTMGKHTGGHLTATNLALSALNLAECAGDAVSVATLAEIYVAAALRVKTSLPRALHFLTRFFLSSARQACLAQSGSVPPAMQWLCHPVGHRFFVDGDWSVLSTPWESLYSLAGNPVDPLAQVTQLFREHLLERALNCVTQPNPSPGSADGDKEFSDALGYLQLLNSCSDAAGAPAYSFSISSSMATTTGVDPVAKWWASLTAVVIHWLRRDEEAAERLCPLVEHLPRVLQESERPLPRAALHSFKAARALLGCAKAESGPASLTICEKASGYLQDSLATTPASSSIDKAVQLFLCDLLLVVRTSLWRQQQPPAPAPAAQGTSSRPQASALELRGFQRDLSSLRRLAQSFRPAMRRLMDVLTSESAWALPQHLGKGFPSPSGHKVPGWHGRMD

SEQ ID NO: 21110 - protein, 53 aa, Artificial Sequence
  Synthetic polypeptide
NCRCWTCFSLSTTKTVTSLAYLTHPMLGVGQGAQTLPAPIPAPQAACLHLLPH

SEQ ID NO: 21111 - protein, 15 aa, Artificial Sequence
  Synthetic polypeptide
TVGVGHASAYQQPRQ

SEQ ID NO: 21112 - protein, 1119 aa, Artificial Sequence
  Synthetic polypeptide
VLDMLQLINNQDSDFPGLFDPPYAGSGAGGTDPASPDTSSPGSLSPPPATLSSSLEAFLSGPQAAPSPLSPPQPAPTPLKMYPSMPAFSPGPGIKEESVPLSILQTPTPQPLPGALLPQSFPAPAPPQFSSTPVLGYPSPPGGFSTGSPPGNTQQPLPGLPLASPPGVPPVSLHTQVQSVVPQQLLTVTAAPTAAPVTTTVTSQIQQVPVLLQPHFIKADSLLLTAMKTDGATVKAAGLSPLVSGTTVQTGPLPTLVSGGTILATVPLVVDAEKLPINRLAAGSKAPASAQSRGEKRTAHNAIEKRYRSSINDKIIELKDLVVGTEAKLNKSAVLRKAIDYIRFLQHSNQKLKQENLSLRTAVHKSKSLKDLVSACGSGGNTDVLMEGVKTEVEDTLTPPPSDAGSPFQSSPLSLGSRGSGSGGSGSDSEPDSPVFEDSKAKPEQRPSLHSRGMLDRSRLALCTLVFLCLSCNPLASLLGARGLPSPSDTTSVYHSPGRNVLGTESRDGPGWAQWLLPPVVWLLNGLLVLVSLVLLFVYGEPVTRPHSGPAVYFWRHRKQADLDLARGDFAQAAQQLWLALRALGRPLPTSHLDLACSLLWNLIRHLLQRLWVGRWLAGRAGGLQQDCALRVDASASARDAALVYHKLHQLHTMGKHTGGHLTATNLALSALNLAECAGDAVSVATLAEIYVAAALRVKTSLPRALHFLTRFFLSSARQACLAQSGSVPPAMQWLCHPVGHRFFVDGDWSVLSTPWESLYSLAGNPVDPLAQVTQLFREHLLERALNCVTQPNPSPGSADGDKEFSDALGYLQLLNSCSDAAGAPAYSFSISSSMATTTGVDPVAKWWASLTAVVIHWLRRDEEAAERLCPLVEHLPRVLQESERPLPRAALHSFKAARALLGCAKAESGPASLTICEKASGYLQDSLATTPASSSIDKAVQLFLCDLLLVVRTSLWRQQQPPAPAPAAQGTSSRPQASALELRGFQRDLSSLRRLAQSFRPAMRRVFLHEATARLMAGASPTRTHQLLDRSLRRRAGPGGKGGAVAELEPRPTRREHAEALLLASCYLPPGFLSAPGQRVGMLAEAARTLEKLGDRRLLHDCQQMLMRLGGGTTVTSS

SEQ ID NO: 21113 - protein, 442 aa, Artificial Sequence
  Synthetic polypeptide
VLDMLQLINNQDSDFPGLFDPPYAGSGAGGTDPASPDTSSPGSLSPPPATLSSSLEAFLSGPQAAPSPLSPPQPAPTPLKMYPSMPAFSPGPGIKEESVPLSILQTPTPQPLPGALLPQSFPAPAPPQFSSTPVLGYPSPPGGFSTGSPPGNTQQPLPGLPLASPPGVPPVSLHTQVQSVVPQQLLTVTAAPTAAPVTTTVTSQIQQVPVLLQPHFIKADSLLLTAMKTDGATVKAAGLSPLVSGTTVQTGPLPTLVSGGTILATVPLVVDAEKLPINRLAAGSKAPASAQSRGEKRTAHNAIEKRYRSSINDKIIELKDLVVGTEAKLNKSAVLRKAIDYIRFLQHSNQKLKQENLSLRTAVHKSKSLKDLVSACGSGGNTDVLMEGVKTEVEDTLTPPPSDAGSPFQSSPLSLGSRGSGSGGSGSDSEPDSPVFEDSKTE

SEQ ID NO: 21114 - protein, 321 aa, Artificial Sequence
  Synthetic polypeptide
VLDMLQLINNQDSDFPGLFDPPYAGSGAGGTDPASPDTSSPGSLSPPPATLSSSLEAFLSGPQAAPSPLSPPQPAPTPLKMYPSMPAFSPGPGIKEESVPLSILQTPTPQPLPGALLPQSFPAPAPPQFSSTPVLGYPSPPGGFSTGSPPGNTQQPLPGLPLASPPGVPPVSLHTQVQSVVPQQLLTVTAAPTAAPVTTTVTSQIQQVLLQPHFIKADSLLLTAMKTDGATVKAAGLSPLVSGTTVQTGPLPTLVSGGTILATVPLVVDAEKLPINRLAAGSKAPASAQSRGEKRTAHNAIEKRYRSSINDKIIELKDLVV

SEQ ID NO: 21115 - protein, 31 aa, Artificial Sequence
  Synthetic polypeptide
GWAQWLTPVIPALWEAEKRQQMAPCKVRIGR

SEQ ID NO: 21116 - protein, 17 aa, Artificial Sequence
  Synthetic polypeptide
SQHFGRLRKGNRWLPAK

SEQ ID NO: 21117 - protein, 15 aa, Artificial Sequence
  Synthetic polypeptide
EKRQQMAPCKVRIGR

SEQ ID NO: 21118 - protein, 37 aa, Artificial Sequence
  Synthetic polypeptide
EVRRPSAWQPPRLRSEEPLCPAAAPSEKKGNRWLPAK

SEQ ID NO: 21119 - protein, 454 aa, Artificial Sequence
  Synthetic polypeptide
EVRSPSAQQPPRLRKKATDGSLQSEDWTLNMEICDIINETEEGPKDAIRALKKRLNGNRNYREVMLALTAWADAFRSSPDLTGVVHIYEELKRKGVEFPMADLDALSPIHTPQRSVPEVDPAATMPRSQSQQRTSAGSYSSPPPAPYSAPQAPALSVTGPITANSEQIARLRSELDVVRGNTKVMSEMLTEMVPGQEDSSDLELLQELNRTCRAMQQRIVELISRVSNEEVTEELLHVNDDLNNVFLRYERFERYRSGRSVQNASNGVLNEVTEDNLIDLGPGSPAVVSPMVGNTAPPSSLSSQLAGLDLGTESVSGTLSSLQQCNPRDGFDMFAQTRGNSLAEQRKTVTYEDPQAVGGLASALDNRKQSSEGIPVAQPSVMDDIEVWLRTDLKGDDLEEGVTSEEFDKFLEERAKAAEMVPDLPSPPMEAPAPASNPSGRKKPERSEDALFAL

SEQ ID NO: 21120 - protein, 504 aa, Artificial Sequence
  Synthetic polypeptide
EVRSPSAQQPPRLRKKATDGSLQSEDWTLNMEICDIINETEEGPKDAIRALKKRLNGNRNYREVMLALTVLETCVKNCGHRFHILVANRDFIDSVLVKIISPKNNPPTIVQDKVLALIQAWADAFRSSPDLTGVVHIYEELKRKGVEFPMADLDALSPIHTPQRSVPEVDPAATMPRSQSQQRTSAGSYSSPPPAPYSAPQAPALSVTGPITANSEQIARLRSELDVVRGNTKVMSEMLTEMVPGQEDSSDLELLQELNRTCRAMQQRIVELISRVSNEEVTEELLHVNDDLNNVFLRYERFERYRSGRSVQNASNGVLNEVTEDNLIDLGPGSPAVVSPMVGNTAPPSSLSSQLAGLDLGTESVSGTLSSLQQCNPRDGFDMFAQTRGNSLAEQRKTVTYEDPQAVGGLASALDNRKQSSEGIPVAQPSVMDDIEVWLRTDLKGDDLEEGVTSEEFDKFLEERAKAAEMVPDLPSPPMEAPAPASNPSGRKKPERSEDALFAL

SEQ ID NO: 21121 - protein, 459 aa, Artificial Sequence
  Synthetic polypeptide
EVRSPSAQQPPRLRKKATDGSLQSEDWTLNMEICDIINETEEGPKDAIRALKKRLNGNRNYREVMLALTVLETCVKNCGHRFHILVANRDFIDSVLVKIISPKNNPPTIVQDKVLALIQSVPEVDPAATMPRSQSQQRTSAGSYSSPPPAPYSAPQAPALSVTGPITANSEQIARLRSELDVVRGNTKVMSEMLTEMVPGQEDSSDLELLQELNRTCRAMQQRIVELISRVSNEEVTEELLHVNDDLNNVFLRYERFERYRSGRSVQNASNGVLNEVTEDNLIDLGPGSPAVVSPMVGNTAPPSSLSSQLAGLDLGTESVSGTLSSLQQCNPRDGFDMFAQTRGNSLAEQRKTVTYEDPQAVGGLASALDNRKQSSEGIPVAQPSVMDDIEVWLRTDLKGDDLEEGVTSEEFDKFLEERAKAAEMVPDLPSPPMEAPAPASNPSGRKKPERSEDALFAL

SEQ ID NO: 21122 - protein, 480 aa, Artificial Sequence
  Synthetic polypeptide
EVRSPSAQQPPRLRKKATDGSLQSEDWTLNMEICDIINETEEGPKDAIRALKKRLNGNRNYREVMLALTVLETCVKNCGHRFHILVANRDFIDSVLVKIISPKNNPPTIVQDKVLALIQAWADAFRSSPDLTGVVHIYEELKRKGVEFPMADLDALSPIHTPQRIARLRSELDVVRGNTKVMSEMLTEMVPGQEDSSDLELLQELNRTCRAMQQRIVELISRVSNEEVTEELLHVNDDLNNVFLRYERFERYRSGRSVQNASNGVLNEVTEDNLIDLGPGSPAVVSPMVGNTAPPSSLSSQLAGLDLGTESVSGTLSSLQQCNPRDGFDMFAQTRGNSLAEQRKTVTYEDPQAVGGLASALDNRKQSSEGTFLSSAQKRGRGGESDLEPIDSWLITQGMIPVAQPSVMDDIEVWLRTDLKGDDLEEGVTSEEFDKFLEERAKAAEMVPDLPSPPMEAPAPASNPSGRKKPERSEDALFAL

SEQ ID NO: 21123 - protein, 386 aa, Artificial Sequence
  Synthetic polypeptide
EVRSPSAQQPPRLRKKATDGSLQSEDWTLNMEICDIINETEEGPKDAIRALKKRLNGNRNYREVMLALTVLETCVKNCGHRFHILVANRDFIDSVLVKIISPKNNPPTIVQDKVLALIQIARLRSELDVVRGNTKVMSEMLTEMVPGQEDSSDLELLQELNRTCRAMQQRIVELISRVSNEEVTEELLHVNDDLNNVFLRYERFERYRSGRSVQNASNGVLNEVTEDNLIDLGPGSPAVVSPMVGNTAPPSSLSSQLAGLDLGTESVSGTLSSLQQCNPRDGFDMFAQTRGNSLAEQRKTVTYEDPQAVGGLASALDNRKQSSEGKGDDLEEGVTSEEFDKFLEERAKAAEMVPDLPSPPMEAPAPASNPSGRKKPERSEDALFAL

SEQ ID NO: 21124 - protein, 385 aa, Artificial Sequence
  Synthetic polypeptide
EVRSPSAQQPPRLRKKATDGSLQSEDWTLNMEICDIINETEEGPKDAIRALKKRLNGNRNYREVMLALTIARLRSELDVVRGNTKVMSEMLTEMVPGQEDSSDLELLQELNRTCRAMQQRIVELISRVSNEEVTEELLHVNDDLNNVFLRYERFERYRSGRSVQNASNGVLNEVTEDNLIDLGPGSPAVVSPMVGNTAPPSSLSSQLAGLDLGTESVSGTLSSLQQCNPRDGFDMFAQTRGNSLAEQRKTVTYEDPQAVGGLASALDNRKQSSEGTFLSSAQKRGRGGESDLEPIDSWLITQGMIPVAQPSVMDDIEVWLRTDLKGDDLEEGVTSEEFDKFLEERAKAAEMVPDLPSPPMEAPAPASNPSGRKKPERSEDALFAL

SEQ ID NO: 21125 - protein, 26 aa, Artificial Sequence
  Synthetic polypeptide
GAPLPGRDPVWEKRQQMAPCKVRIGR

SEQ ID NO: 21126 - protein, 36 aa, Artificial Sequence
  Synthetic polypeptide
DVGSASAPPPRLGCEERLCQAVTPSGRKGNRWLPAK

SEQ ID NO: 21127 - protein, 444 aa, Artificial Sequence
  Synthetic polypeptide
PRLGEKATDGSLQSEDWTLNMEICDIINETEEGPKDAIRALKKRLNGNRNYREVMLALTAWADAFRSSPDLTGVVHIYEELKRKGVEFPMADLDALSPIHTPQRSVPEVDPAATMPRSQSQQRTSAGSYSSPPPAPYSAPQAPALSVTGPITANSEQIARLRSELDVVRGNTKVMSEMLTEMVPGQEDSSDLELLQELNRTCRAMQQRIVELISRVSNEEVTEELLHVNDDLNNVFLRYERFERYRSGRSVQNASNGVLNEVTEDNLIDLGPGSPAVVSPMVGNTAPPSSLSSQLAGLDLGTESVSGTLSSLQQCNPRDGFDMFAQTRGNSLAEQRKTVTYEDPQAVGGLASALDNRKQSSEGIPVAQPSVMDDIEVWLRTDLKGDDLEEGVTSEEFDKFLEERAKAAEMVPDLPSPPMEAPAPASNPSGRKKPERSEDALFAL

SEQ ID NO: 21128 - protein, 494 aa, Artificial Sequence
  Synthetic polypeptide
PRLGEKATDGSLQSEDWTLNMEICDIINETEEGPKDAIRALKKRLNGNRNYREVMLALTVLETCVKNCGHRFHILVANRDFIDSVLVKIISPKNNPPTIVQDKVLALIQAWADAFRSSPDLTGVVHIYEELKRKGVEFPMADLDALSPIHTPQRSVPEVDPAATMPRSQSQQRTSAGSYSSPPPAPYSAPQAPALSVTGPITANSEQIARLRSELDVVRGNTKVMSEMLTEMVPGQEDSSDLELLQELNRTCRAMQQRIVELISRVSNEEVTEELLHVNDDLNNVFLRYERFERYRSGRSVQNASNGVLNEVTEDNLIDLGPGSPAVVSPMVGNTAPPSSLSSQLAGLDLGTESVSGTLSSLQQCNPRDGFDMFAQTRGNSLAEQRKTVTYEDPQAVGGLASALDNRKQSSEGIPVAQPSVMDDIEVWLRTDLKGDDLEEGVTSEEFDKFLEERAKAAEMVPDLPSPPMEAPAPASNPSGRKKPERSEDALFAL

SEQ ID NO: 21129 - protein, 449 aa, Artificial Sequence
  Synthetic polypeptide
PRLGEKATDGSLQSEDWTLNMEICDIINETEEGPKDAIRALKKRLNGNRNYREVMLALTVLETCVKNCGHRFHILVANRDFIDSVLVKIISPKNNPPTIVQDKVLALIQSVPEVDPAATMPRSQSQQRTSAGSYSSPPPAPYSAPQAPALSVTGPITANSEQIARLRSELDVVRGNTKVMSEMLTEMVPGQEDSSDLELLQELNRTCRAMQQRIVELISRVSNEEVTEELLHVNDDLNNVFLRYERFERYRSGRSVQNASNGVLNEVTEDNLIDLGPGSPAVVSPMVGNTAPPSSLSSQLAGLDLGTESVSGTLSSLQQCNPRDGFDMFAQTRGNSLAEQRKTVTYEDPQAVGGLASALDNRKQSSEGIPVAQPSVMDDIEVWLRTDLKGDDLEEGVTSEEFDKFLEERAKAAEMVPDLPSPPMEAPAPASNPSGRKKPERSEDALFAL

SEQ ID NO: 21130 - protein, 470 aa, Artificial Sequence
  Synthetic polypeptide
PRLGEKATDGSLQSEDWTLNMEICDIINETEEGPKDAIRALKKRLNGNRNYREVMLALTVLETCVKNCGHRFHILVANRDFIDSVLVKIISPKNNPPTIVQDKVLALIQAWADAFRSSPDLTGVVHIYEELKRKGVEFPMADLDALSPIHTPQRIARLRSELDVVRGNTKVMSEMLTEMVPGQEDSSDLELLQELNRTCRAMQQRIVELISRVSNEEVTEELLHVNDDLNNVFLRYERFERYRSGRSVQNASNGVLNEVTEDNLIDLGPGSPAVVSPMVGNTAPPSSLSSQLAGLDLGTESVSGTLSSLQQCNPRDGFDMFAQTRGNSLAEQRKTVTYEDPQAVGGLASALDNRKQSSEGTFLSSAQKRGRGGESDLEPIDSWLITQGMIPVAQPSVMDDIEVWLRTDLKGDDLEEGVTSEEFDKFLEERAKAAEMVPDLPSPPMEAPAPASNPSGRKKPERSEDALFAL

SEQ ID NO: 21131 - protein, 376 aa, Artificial Sequence
  Synthetic polypeptide
PRLGEKATDGSLQSEDWTLNMEICDIINETEEGPKDAIRALKKRLNGNRNYREVMLALTVLETCVKNCGHRFHILVANRDFIDSVLVKIISPKNNPPTIVQDKVLALIQIARLRSELDVVRGNTKVMSEMLTEMVPGQEDSSDLELLQELNRTCRAMQQRIVELISRVSNEEVTEELLHVNDDLNNVFLRYERFERYRSGRSVQNASNGVLNEVTEDNLIDLGPGSPAVVSPMVGNTAPPSSLSSQLAGLDLGTESVSGTLSSLQQCNPRDGFDMFAQTRGNSLAEQRKTVTYEDPQAVGGLASALDNRKQSSEGKGDDLEEGVTSEEFDKFLEERAKAAEMVPDLPSPPMEAPAPASNPSGRKKPERSEDALFAL

SEQ ID NO: 21132 - protein, 375 aa, Artificial Sequence
  Synthetic polypeptide
PRLGEKATDGSLQSEDWTLNMEICDIINETEEGPKDAIRALKKRLNGNRNYREVMLALTIARLRSELDVVRGNTKVMSEMLTEMVPGQEDSSDLELLQELNRTCRAMQQRIVELISRVSNEEVTEELLHVNDDLNNVFLRYERFERYRSGRSVQNASNGVLNEVTEDNLIDLGPGSPAVVSPMVGNTAPPSSLSSQLAGLDLGTESVSGTLSSLQQCNPRDGFDMFAQTRGNSLAEQRKTVTYEDPQAVGGLASALDNRKQSSEGTFLSSAQKRGRGGESDLEPIDSWLITQGMIPVAQPSVMDDIEVWLRTDLKGDDLEEGVTSEEFDKFLEERAKAAEMVPDLPSPPMEAPAPASNPSGRKKPERSEDALFAL

SEQ ID NO: 21133 - protein, 44 aa, Artificial Sequence
  Synthetic polypeptide
KYKKFIWAWWRVPVIPATWEMEAGESLEPGRQRLRKGNRWLPAK

SEQ ID NO: 21134 - protein, 21 aa, Artificial Sequence
  Synthetic polypeptide
TREAEIEKRQQMAPCKVRIGR

SEQ ID NO: 21135 - protein, 273 aa, Artificial Sequence
  Synthetic polypeptide
GDPISTETTKISQKKLAEAKHQYSIDELKHQENLMQAQLEDEQAQREELEKHKTAFVEHLNGSFLFDSMYAEDSEGNNLSYLPGVGELLETYKDKFVIICVNIFEYGLKQQEKRKTELDTFSECVREAIQENQEQGKRKIAKFEEKHLSSLSAIREELELPNIEKMILECSADISELFDALMTLEMQLVEQLEETINMFERNIVDMVGLFIENVQSLMAQCRDLENHHHEKLLEISISTLEKIVEGDLDEDLPNDLRAGRFQKFNYVEASGTF

SEQ ID NO: 21136 - protein, 52 aa, Artificial Sequence
  Synthetic polypeptide
SQHFERLRREDRLSQGVQDQPGQHRETPSLQKLPKLARKSLRRLSTSTASTS

SEQ ID NO: 21137 - protein, 7 aa, Artificial Sequence
  Synthetic polypeptide
PEKACGG

SEQ ID NO: 21138 - protein, 339 aa, Artificial Sequence
  Synthetic polypeptide
GDPISTETTKISQKKLAEAKHQYSIDELKHQENLMQAQLEDEQAQREELEKHKTAFVEHLNGSFLFDSMYAEDSEGNNLSYLPGVGELLETYKDKFVIICVNIFEYGLKQQEKRKTELDTFSECVREAIQENQEQGKRKIAKFEEKHLSSLSAIREELELPNIEKMILECSADISELFDALMTLEMQLVEQLEETINMFERNIVDMVGLFIENVQSLMAQCRDLENHHHEKLLEISISTLEKIVEGDLDEDLPNDLRALFVDKDTIVNAVGASHDIHLLKIDNREDELVTRINSWCTRLIDRIHKDEIMRNRKRVKEINQYIDHMQSELDNLECGDILD

SEQ ID NO: 21139 - protein, 8 aa, Artificial Sequence
  Synthetic polypeptide
AKASSHRV

SEQ ID NO: 21140 - protein, 43 aa, Artificial Sequence
  Synthetic polypeptide
MGLSCELRDSGQNQGAPGSESSELRHPVTEFKCHSRGVGTAQH

SEQ ID NO: 21141 - protein, 129 aa, Artificial Sequence
  Synthetic polypeptide
GIQSQSLSAIREELELPNIEKMILECSADISELFDALMTLEMQLVEQLEETINMFERNIVDMVGLFIENVQSLMAQCRDLENHHHEKLLEISISTLEKIVEGDLDEDLPNDLRAGRFQKFNYVEASGTF

SEQ ID NO: 21142 - protein, 195 aa, Artificial Sequence
  Synthetic polypeptide
GIQSQSLSAIREELELPNIEKMILECSADISELFDALMTLEMQLVEQLEETINMFERNIVDMVGLFIENVQSLMAQCRDLENHHHEKLLEISISTLEKIVEGDLDEDLPNDLRALFVDKDTIVNAVGASHDIHLLKIDNREDELVTRINSWCTRLIDRIHKDEIMRNRKRVKEINQYIDHMQSELDNLECGDILD

SEQ ID NO: 21143 - protein, 68 aa, Artificial Sequence
  Synthetic polypeptide
GLAWWFTPVIPALWVAEEDGSFEIQKWGNIEWAHDYELQELRARTAAGTLFIHLCSESTTVKHKLLKE

SEQ ID NO: 21144 - protein, 56 aa, Artificial Sequence
  Synthetic polypeptide
SQHFGWLRRMDHLRSRSGATLSGPMTMSCRSCGPAPPPAPSSSISAPRAPQSSTSS

SEQ ID NO: 21145 - protein, 66 aa, Artificial Sequence
  Synthetic polypeptide
GLAWWFTPVIPALWVAEEDGSFEIQKWGNIEWAHDYELQELRARTAAGTLFIHLCSESTTVKHKLL

SEQ ID NO: 21146 - protein, 55 aa, Artificial Sequence
  Synthetic polypeptide
LFYVCTFIVCLFHCLVSNRRAGAMSVLLISVWTATSRPHCATHHWTTQPRETRIS

SEQ ID NO: 21147 - protein, 68 aa, Artificial Sequence
  Synthetic polypeptide
ATEGQEPCLFYSSVSGQPLADHIVQHIIGQPNPEKQGSADPGSREVSGHRHHLLQGGGARDISGTSKE

SEQ ID NO: 21148 - protein, 49 aa, Artificial Sequence
  Synthetic polypeptide
QTTLCNTSLDNPTQRNKDQLIRAAVKFLDTDTICYRVEEPETLVELQRN

SEQ ID NO: 21149 - protein, 182 aa, Artificial Sequence
  Synthetic polypeptide
QTTLCNTSLDNPTQRNKDQLIRAAVKFLDTDTICYRVEEPETLVELQRNEWDPIIEWAEKRYGVEISSSTSIMGPSIPAKTREVLVSHLASYNTWALQGIEFVAAQLKSMVLTLGLIDLRLTVEQAVLLSRLEEEYQIQKWGNIEWAHDYELQELRARTAAGTLFIHLCSESTTVKHKLLKE

SEQ ID NO: 21150 - protein, 98 aa, Artificial Sequence
  Synthetic polypeptide
QTTLCNTSLDNPTQRNKDQLIRAAVKFLDTDTICYRVEEPETLVELQRNEWDPIIEWAEKRYGVEISSSTSIMGPSIPAKTREVLVSHLASYNTWALQ

SEQ ID NO: 21151 - protein, 23 aa, Artificial Sequence
  Synthetic polypeptide
SQHFERLRQEDCLQPGVQDQPGH

SEQ ID NO: 21152 - protein, 357 aa, Artificial Sequence
  Synthetic polypeptide
GRRIAYSQEFKTSLATEYHLGLLKAKLAKYRAQLLEPSKSASSKGEGFDVMKSGDARVALIGFPSVGKSTFLSLMTSTASEAASYEFTTLTCIPGVIEYKGANIQLLDLPGIIEGAAQGKGRGRQVIAVARTADVIIMMLDATKGEVQRSLLEKELESVGIRLNKHKPNIYFKPKKGGGISFNSTVTLTQCSEKLVQLILHEYKIFNAEVLFREDCSPDEFIDVIVGNRVYMPCLYVYNKIDQISMEEVDRLARKPNSVVISCGMKLNLDYLLEMLWEYLALTCIYTKKRGQRPDFTDAIILRKGASVEHVCHRIHRSLASQFKYALVWGTSTKYSPQRVGLTHTMEHEDVIQIVKK

SEQ ID NO: 21153 - protein, 25 aa, Artificial Sequence
  Synthetic polypeptide
EAEAGGLLTARSSRPAWPLSIIWAC

SEQ ID NO: 21154 - protein, 83 aa, Artificial Sequence
  Synthetic polypeptide
GRRIAYSQEFKTSLATEYHLGLLKAKLAKYRAQLLEPSKSASSKGEGFDVMKSGDARVALIGFPSVVHILESDDLHGQRGSVL

SEQ ID NO: 21155 - protein, 336 aa, Artificial Sequence
  Synthetic polypeptide
GRRIAYSQEFKTSLATEYHLGLLKAKLAKYRAQLLEPSKSASSKGEGFDVMKSGDARVALIGFPSVGKSTFLSLMTSTASEAASYEFTTLTCIPGVIEYKGANIQLLDLPGIIEGAAQGKGRGRQVIAVARTADVIIMMLDATKGEVQRSLLEKELESVGIRLNKHKPNIYFKPKKGGGISFNSTVTLTQCSEKLVQLILHEYKIFNAEVLFREDCSPDEFIDVIVGNRVYMPCLYVYNKIDQISMEEVDRLARKPNSVVISCGMKLNLDYLLEMLWEYLALTCIYTKKRGQRPDFTDAIILRKGASVEHVCHRIHRSLASQFKAPAPSTVRSGWA

SEQ ID NO: 21156 - protein, 151 aa, Artificial Sequence
  Synthetic polypeptide
GRRIAYSQEFKTSLATEYHLGLLKAKLAKYRAQLLEPSKSASSKGEGFDVMKSGDARVALIGFPSVGKFHSCCPSWSTMARSQLTTTSASQSTFLSLMTSTASEAASYEFTTLTCIPGVIEYKGANIQLLDLPGIIEGAAQGKGRGRQVIA

SEQ ID NO: 21157 - protein, 237 aa, Artificial Sequence
  Synthetic polypeptide
GRRIAYSQEFKTSLATEYHLGLLKAKLAKYRAQLLEPSKSASSKGEGFDVMKSGDARVALIGFPSVGKSTFLSLMTSTASEAASYEFTTLTCIPGVIEYKGANIQLLDLPGIIEGAAQGKGRGRQVIAVARTADVIIMMLDATKGEVQRSLLEKELESVGIRLNKHKPNIYFKPKKGGGISFNSTVTLTQCSEKLVQLILHEYNLQCRSAFPRRLLPGRVHRCDRGQPGVHALPVCL

SEQ ID NO: 21158 - protein, 165 aa, Artificial Sequence
  Synthetic polypeptide
GRRIAYSQEFKTSLATEYHLGLLKAKLAKYRAQLLEPSKSASSKGEGFDVMKSGDARVALIGFPSVGKSTFLSLMTSTASEAASYEFTTLTCIPGVIEYKGANIQLLDLPGIIEGAAQGKGRGRQVIAVARTADVIIMMLDATKGEVSAGEGAGVCGHPPQQAQA

SEQ ID NO: 21159 - protein, 105 aa, Artificial Sequence
  Synthetic polypeptide
GRRIAYSQEFKTSLATEYHLGLLKAKLAKYRAQLLEPSKSASSKGEGFDVMKSGDARVALIGFPSVGKSTFLSLMTSTASEAASYEFTTLTCIPGVIEEKAVAGR

SEQ ID NO: 21160 - protein, 106 aa, Artificial Sequence
  Synthetic polypeptide
GRRIAYSQEFKTSLATEYHLGLLKAKLAKYRAQLLEPSKSASSKGEGFDVMKSGDARVALIGFPSVGKPKKGGGISFNSTVTLTQCSEKLVQLILHEYKIFNAEVL

SEQ ID NO: 21161 - protein, 154 aa, Artificial Sequence
  Synthetic polypeptide
GRRIAYSQEFKTSLATEYHLGLLKAKLAKYRAQLLEPSKSASSKGEGFDVMKSGDARVALIGFPSVGKLRHEAEPGLSAGDALGVLGPDLHLHQEERTEARLHRRHHSPERGLSGARVPPHPPVTRQPVQVRPGVGHQHQVQSAAGGPDPHHGA

SEQ ID NO: 21162 - protein, 306 aa, Artificial Sequence
  Synthetic polypeptide
GRARWLTPVNPALWEAKSTFLSLMTSTASEAASYEFTTLTCIPGVIEYKGANIQLLDLPGIIEGAAQGKGRGRQVIAVARTADVIIMMLDATKGEVQRSLLEKELESVGIRLNKHKPNIYFKPKKGGGISFNSTVTLTQCSEKLVQLILHEYKIFNAEVLFREDCSPDEFIDVIVGNRVYMPCLYVYNKIDQISMEEVDRLARKPNSVVISCGMKLNLDYLLEMLWEYLALTCIYTKKRGQRPDFTDAIILRKGASVEHVCHRIHRSLASQFKYALVWGTSTKYSPQRVGLTHTMEHEDVIQIVKK

SEQ ID NO: 21163 - protein, 11 aa, Artificial Sequence
  Synthetic polypeptide
TQHFGRPSPHS

SEQ ID NO: 21164 - protein, 33 aa, Artificial Sequence
  Synthetic polypeptide
PGAVAHTCKPSTLGGQVHILESDDLHGQRGSVL

SEQ ID NO: 21165 - protein, 34 aa, Artificial Sequence
  Synthetic polypeptide
GRARWLTPVNPALWEAKSTFLSLMTSTASEAASY

SEQ ID NO: 21166 - protein, 285 aa, Artificial Sequence
  Synthetic polypeptide
GRARWLTPVNPALWEAKSTFLSLMTSTASEAASYEFTTLTCIPGVIEYKGANIQLLDLPGIIEGAAQGKGRGRQVIAVARTADVIIMMLDATKGEVQRSLLEKELESVGIRLNKHKPNIYFKPKKGGGISFNSTVTLTQCSEKLVQLILHEYKIFNAEVLFREDCSPDEFIDVIVGNRVYMPCLYVYNKIDQISMEEVDRLARKPNSVVISCGMKLNLDYLLEMLWEYLALTCIYTKKRGQRPDFTDAIILRKGASVEHVCHRIHRSLASQFKAPAPSTVRSGWA

SEQ ID NO: 21167 - protein, 77 aa, Artificial Sequence
  Synthetic polypeptide
GRARWLTPVNPALWEAKSTFLSLMTSTASEAASYEFTTLTCIPGVIEYKGANIQLLDLPGIIEGAAQGKGRGRQVIA

SEQ ID NO: 21168 - protein, 186 aa, Artificial Sequence
  Synthetic polypeptide
GRARWLTPVNPALWEAKSTFLSLMTSTASEAASYEFTTLTCIPGVIEYKGANIQLLDLPGIIEGAAQGKGRGRQVIAVARTADVIIMMLDATKGEVQRSLLEKELESVGIRLNKHKPNIYFKPKKGGGISFNSTVTLTQCSEKLVQLILHEYNLQCRSAFPRRLLPGRVHRCDRGQPGVHALPVCL

SEQ ID NO: 21169 - protein, 114 aa, Artificial Sequence
  Synthetic polypeptide
GRARWLTPVNPALWEAKSTFLSLMTSTASEAASYEFTTLTCIPGVIEYKGANIQLLDLPGIIEGAAQGKGRGRQVIAVARTADVIIMMLDATKGEVSAGEGAGVCGHPPQQAQA

SEQ ID NO: 21170 - protein, 54 aa, Artificial Sequence
  Synthetic polypeptide
GRARWLTPVNPALWEAKSTFLSLMTSTASEAASYEFTTLTCIPGVIEEKAVAGR

SEQ ID NO: 21171 - protein, 102 aa, Artificial Sequence
  Synthetic polypeptide
AEIVPLHSSLGNRAGSPGVHPSPALPYNGRLDLAQPGQPAPAADTGAQPPPGPCPVSGPPQRLTYVRLLLLLHPELQQHCCASPLHPCHQPQWPQLSQHRDS

SEQ ID NO: 21172 - protein, 204 aa, Artificial Sequence
  Synthetic polypeptide
RQLLGRLRQKNCLNARGRGCSELRLYHYTPAWAIEREVQEYIPAQLYRTTAGSTWLNLVSQHRQQTQALSPHQARAQFLGLLSALPMFGSSFFFIQSCSNIAVPAPCILAINHNGLNFLSTETHELMVKFPLKEIQSTRTQRPTANSSYPYVEIALGDVAAQRTLQLQLEQGLELCRVVAVHVENLLSAHEKRLTLPPSEITLL

SEQ ID NO: 21173 - protein, 207 aa, Artificial Sequence
  Synthetic polypeptide
RQLLGRLRQKNCLNARGRGCSELRLYHYTPAWAIEREVQEYIPAQLYRTTAGSTWLNLVSQHRQQTQALSPHQARAQFLGLLSALPMFGSSFFFIQSCSNIAVPAPCILAINHNGLNFLSTETHELMVKFPLKEIQSTRTQRPTANSSYPYVEIALGDVAAQRTLQLQLEQVRAGEVLDGRGLSLSPAGTGTVSCGGRARGEPAQCP

SEQ ID NO: 21174 - protein, 103 aa, Artificial Sequence
  Synthetic polypeptide
AEIVPLHSSLGNRAGSPGVHPSPALPYNGRLDLAQPGQPAPAADTGAQPPPGPCPVSGPPQRLTYVRLLLLLHPELQQHCCASPLHPCHQPQWPQLSQHRDSC

SEQ ID NO: 21175 - protein, 125 aa, Artificial Sequence
  Synthetic polypeptide
RQLLGRLRQKNCLNARGRGCSELRLYHYTPAWAIEREVQEYIPAQLYRTTAGSTWLNLVSQHRQQTQALSPHQARAQFLGLLSALPMFGSSFFFIQSCSNIAVPAPCILAINHNGLNFLSTETHV

SEQ ID NO: 21176 - protein, 46 aa, Artificial Sequence
  Synthetic polypeptide
PPPPPAILCDPGPLRSLPLSEPRLSQPVKGLKSLLLGRKEYRRLLP

SEQ ID NO: 21177 - protein, 692 aa, Artificial Sequence
  Synthetic polypeptide
RGLKVSSLDARSIGGYFPENVKAMTSLRWLKLNRTGLCYLPEELAALQKLEHLSVSHNNLTTLHGELSSLPSLRAIVARANSLKNSGVPDDIFKLDDLSVLDLSHNQLTECPRELENAKNMLVLNLSHNSIDTIPNQLFINLTDLLYLDLSENRLESLPPQMRRLVHLQTLVLNGNPLLHAQLRQLPAMTALQTLHLRSTQRTQSNLPTSLEGLSNLADVDLSCNDLTRVPECLYTLPSLRRLNLSSNQITELSLCIDQWVHVETLNLSRNQLTSLPSAICKLSKLKKLYLNSNKLDFDGLPSGIGKLTNLEEFMAANNNLELVPESLCRCPKLRKLVLNKNHLVTLPEAIHFLTEIEVLDVRENPNLVMPPKPADRAAEWYNIDFSLQNQLRLAGASPATVAAAAAGSGPKDPMARKMRLRRRKDSAQDDQAKQVLKGMSDVAQEKNKKQEESADARAPSGKVRRWDQGLEKPRLDYSEFFTEDVGQLPGLTIWQIENFVPVLVEEAFHGKFYEADCYIVLKTFLDDSGSLNWEIYYWIGGEATLDKKACSAIHAVNLRNYLGAECRTVREEMGDESEEFLQVFDNDISYIEGGTASGFYTVEDTHYVTRMYRVYGKKNIKLEPVPLKGTSLDPRNMSGRAGCAWSARAMSSTPLPAASTPGAPSARPWPKTGWHSPRLGEEEEGASSTVC

SEQ ID NO: 21178 - protein, 1261 aa, Artificial Sequence
  Synthetic polypeptide
RGLKVSSLDARSIGGYFPENVKAMTSLRWLKLNRTGLCYLPEELAALQKLEHLSVSHNNLTTLHGELSSLPSLRAIVARANSLKNSGVPDDIFKLDDLSVLDLSHNQLTECPRELENAKNMLVLNLSHNSIDTIPNQLFINLTDLLYLDLSENRLESLPPQMRRLVHLQTLVLNGNPLLHAQLRQLPAMTALQTLHLRSTQRTQSNLPTSLEGLSNLADVDLSCNDLTRVPECLYTLPSLRRLNLSSNQITELSLCIDQWVHVETLNLSRNQLTSLPSAICKLSKLKKLYLNSNKLDFDGLPSGIGKLTNLEEFMAANNNLELVPESLCRCPKLRKLVLNKNHLVTLPEAIHFLTEIEVLDVRENPNLVMPPKPADRAAEWYNIDFSLQNQLRLAGASPATVAAAAAAGSGPKDPMARKMRLRRRKDSAQDDQAKQVLKGMSDVAQEKNKKQEESADARAPSGKVRRWDQGLEKPRLDYSEFFTEDVGQLPGLTIWQIENFVPVLVEEAFHGKFYEADCYIVLKTFLDDSGSLNWEIYYWIGGEATLDKKACSAIHAVNLRNYLGAECRTVREEMGDESEEFLQVFDNDISYIEGGTASGFYTVEDTHYVTRMYRVYGKKNIKLEPVPLKGTSLDPRFVFLLDRGLDIYVWRGAQATLSSTTKARLFAEKINKNERKGKAEITLLVQGQELPEFWEALGGEPSEIKKHVPEDFWPPQPKLYKVGLGLGYLELPQINYKLSVEHKQRPKVELMPRMRLLQSLLDTRCVYILDCWSDVFIWLGRKSPRLVRAAALKLGQELCGMLHRPRHATVSRSLEGTEAQVFKAKFKNWDDVLTVDYTRNAEAVLQSPGLSGKVKRDAEKKDQMKADLTALFLPRQPPMSLAEAEQLMEEWNEDLDGMEGFVLEGKKFARLPEEEFGHFYTQDCYVFLCRYWVPVEYEEEEKKEDKEEKAEGKEGEEATAEAEEKQPEEDFQCIVYFWQGREASNMGWLTFTFSLQKKFESLFPGKLEVVRMTQQQENPKFLSHFKRKFIIHRGKRKAVQGAQQPSLYQIRTNGSALCTRCIQINTDSSLLNSEFCFILKVPFESEDNQGIVYAWVGRASDPDEAKLAEDILNTMFDTSYSKQVINEGEEPENFFWVGIGAQKPYDDDAEYMKHTRLFRCSNEKGYFAVTEKCSDFCQDDLADDDIMLLDNGQEVYMWVGTQTSQVEIKLSLKACQVYIQHMRSKEHERPRRLRLVRKGNEQHAFTRCFHAWSAFCKALA

SEQ ID NO: 21179 - protein, 1206 aa, Artificial Sequence
  Synthetic polypeptide
RGLKVSSLDARSIGGYFPENVKAMTSLRWLKLNRTGLCYLPEELAALQKLEHLSVSHNNLTTLHGELSSLPSLRAIVARANSLKNSGVPDDIFKLDDLSVLDLSHNQLTECPRELENAKNMLVLNLSHNRQLPAMTALQTLHLRSTQRTQSNLPTSLEGLSNLADVDLSCNDLTRVPECLYTLPSLRRLNLSSNQITELSLCIDQWVHVETLNLSRNQLTSLPSAICKLSKLKKLYLNSNKLDFDGLPSGIGKLTNLEEFMAANNNLELVPESLCRCPKLRKLVLNKNHLVTLPEAIHFLTEIEVLDVRENPNLVMPPKPADRAAEWYNIDFSLQNQLRLAGASPATVAAAAAGSGPKDPMARKMRLRRRKDSAQDDQAKQVLKGMSDVAQEKNKKQEESADARAPSGKVRRWDQGLEKPRLDYSEFFTEDVGQLPGLTIWQIENFVPVLVEEAFHGKFYEADCYIVLKTFLDDSGSLNWEIYYWIGGEATLDKKACSAIHAVNLRNYLGAECRTVREEMGDESEEFLQVFDNDISYIEGGTASGFYTVEDTHYVTRMYRVYGKKNIKLEPVPLKGTSLDPRFVFLLDRGLDIYVWRGAQATLSSTTKARLFAEKINKNERKGKAEITLLVQGQELPEFWEALGGEPSEIKKHVPEDFWPPQPKLYKVGLGLGYLELPQINYKLSVEHKQRPKVELMPRMRLLQSLLDTRCVYILDCWSDVFIWLGRKSPRLVRAAALKLGQELCGMLHRPRHATVSRSLEGTEAQVFKAKFKNWDDVLTVDYTRNAEAVLQSPGLSGKVKRDAEKKDQMKADLTALFLPRQPPMSLAEAEQLMEEWNEDLDGMEGFVLEGKKFARLPEEEFGHFYTQDCYVFLCRYWVPVEYEEEEKKEDKEEKAEGKEGEEATAEAEEKQPEEDFQCIVYFWQGREASNMGWLTFTFSLQKKFESLFPGKLEVVRMTQQQENPKFLSHFKRKFIIHRGKRKAVQGAQQPSLYQIRTNGSALCTRCIQINTDSSLLNSEFCFILKVPFESEDNQGIVYAWVGRASDPDEAKLAEDILNTMFDTSYSKQVINEGEEPENFFWVGIGAQKPYDDDAEYMKHTRLFRCSNEKGYFAVTEKCSDFCQDDLADDDIMLLDNGQEVYMWVGTQTSQVEIKLSLKACQVYIQHMRSKEHERPRRLRLVRKGNEQHAFTRCFHAWSAFCKALA

SEQ ID NO: 21180 - protein, 30 aa, Artificial Sequence
  Synthetic polypeptide
FTPIIPAFWEAEVEADHLRSGVQDQPDQHG

SEQ ID NO: 21181 - protein, 402 aa, Artificial Sequence
  Synthetic polypeptide
GQEFKTSLTNMAELQCTQLDLERKLKLNENAISRLQANQKSVLVSVSEVKAVAEMQFGELLAAVRKAQANVMLFLEEKEQAALSQANGIKAHLEYRSAEMEKSKQELETMAAISNTVQFLEEYCKFKNTEDITFPSVYIGLKDKLSGIRKVITESTVHLIQLLENYKKKLQEFSKEEEYDIRTQVSAIVQRKYWTSKPEPSTREQFLQYVHDITFDPDTAHKYLRLQEENRKVTNTTPWEHPYPDLPSRFLHWRQVLSQQSLYLHRYYFEVEIFGAGTYVGLTCKGIDQKGEERSSCISGNNFSWSLQWNGKEFTAWYSDMETPLKAGPFWRLGVYIDFPGGILSFYGVEYDSMTLVHKFACKFSEPVYAAFWLSKKENAIRIVDLGEEPEKPAPSLVGTAP

SEQ ID NO: 21182 - protein, 10 aa, Artificial Sequence
  Synthetic polypeptide
PTWLNSSAPS

SEQ ID NO: 21183 - protein, 69 aa, Artificial Sequence; identical to SEQ ID NO: 21035
  Synthetic polypeptide

SEQ ID NO: 21184 - protein, 45 aa, Artificial Sequence
  Synthetic polypeptide
KGWQTMACRPNPARHLFLRWLSWVWCYKVPTCMVTSGVRCAAESI

SEQ ID NO: 21185 - protein, 37 aa, Artificial Sequence
  Synthetic polypeptide
RVGKLWPADQIQPDTCFCGGYHGCGATRCQPVWLHQV

SEQ ID NO: 21186 - protein, 67 aa, Artificial Sequence; identical to SEQ ID NO: 21036
  Synthetic polypeptide

SEQ ID NO: 21187 - protein, 60 aa, Artificial Sequence
  Synthetic polypeptide
QGLANYGLQTKSSPTPVFAVVIMGVVLQGANLYGYIRCKVRSRKHLTSMATSYFGKQFLR

SEQ ID NO: 21188 - protein, 31 aa, Artificial Sequence
  Synthetic polypeptide
GQAQVAHTCNPSTLGGRGHSLLLSACAWELQ

SEQ ID NO: 21189 - protein, 22 aa, Artificial Sequence
  Synthetic polypeptide
ARRKWLTPVIPALWEVEGTVFC

SEQ ID NO: 21190 - protein, 81 aa, Artificial Sequence
  Synthetic polypeptide
SQHFGRSRAQSFAERLRLGIAVIHGEAQDAESDLVDGRHSPPMVRSVAAIHPSLEIPMLIPKEKPPITVVGDVGGRIAIIV

SEQ ID NO: 21191 - protein, 182 aa, Artificial Sequence
  Synthetic polypeptide
SQHFGRSRAQSFAERLRLGIAVIHGEAQDAESDLVDGRHSPPMVRSVAAIHPSLEIPMLIPKEKPPITVVGDVGGRIAIIVDDIIDDVDSFLAAAETLKERGAYKIFVMATHGLLSSDAPRRIEESAIDEVVVTNTIPHEVQKLQCPKIKTVDISMILSEAIRRIHNGESMSYLFRNIGLDD

SEQ ID NO: 21192 - protein, 23 aa, Artificial Sequence
  Synthetic polypeptide
GQAQVAHTCNPSTLGGRGHSLLL

SEQ ID NO: 21193 - protein, 13 aa, Artificial Sequence
  Synthetic polypeptide
SQHFGRSRAQSFA

SEQ ID NO: 21194 - protein, 57 aa, Artificial Sequence
  Synthetic polypeptide
SQHFGRSRAQSFAERLRLGIAVIHGEAQDAESDLVDGRHSPPMVRSVAAIHPSLEIP

SEQ ID NO: 21195 - protein, 133 aa, Artificial Sequence
  Synthetic polypeptide
SQHFGRSRAQSFAERLRLGIAVIHGEAQDAESDLVDGRHSPPMVRSVAAIHPSLEIPMLIPKEKPPITVVGDVGGRIAIIVVVVTNTIPHEVQKLQCPKIKTVDISMILSEAIRRIHNGESMSYLFRNIGLDD

SEQ ID NO: 21196 - protein, 217 aa, Artificial Sequence
  Synthetic polypeptide
SQHFGRSRAQSFAERLRLGIAVIHGEAQDAESDLVDGRHSPPMVRSVAAIHPSLEIPTWSAVVQSWHTATSASQVQAILLGSWDYRYMPPCPVLIPKEKPPITVVGDVGGRIAIIVDDIIDDVDSFLAAAETLKERGAYKIFVMATHGLLSSDAPRRIEESAIDEVVVTNTIPHEVQKLQCPKIKTVDISMILSEAIRRIHNGESMSYLFRNIGLDD

SEQ ID NO: 21197 - protein, 3 aa, Artificial Sequence
  Synthetic polypeptide
TRR

SEQ ID NO: 21198 - protein, 652 aa, Artificial Sequence
  Synthetic polypeptide
DSEVIAVVMDMFTDVDIFKDLLDAGFKRKVAVYIIVDESNVKYFLHMCERACMHLGHLKNLRVRSSGGTEFFTRSATKFKGALAQKFMFVDGDRAVCGSYSFTWSAARTDRNVISVLSGQVVEMFDRQFQELYLMSHSVSLKGIPMEKEPEPEPIVLPSVVPLVPAGTVAKKLVNPKYALVKAKSVDEIAKISSEKQEAKKPLGLKGPALAEHPGELPELLPPIHPGLLHLERANMFEYLPTWVEPDPEPGSDILGYINIIDPNIWNPQPSQMNRIKIRDTSQASAQHQLWKQSQDSRPRPEPCPPPEPSAPQDGVPAENGLPQGDPEPLPPVPKPRTVPVADVLARDSSDIGWVLELPKEEAPQNGTDHRLPRMAGPGHAPLQRQLSVTQDDPESLGVGLPNGLDGVEEEDDDDYVTLSDQDSHSGSSGRGPGPRRPSVASSVSEEYFEVREHSVPLRRRHSEQVANGPTPPPRRQLSAPHITRGTFVGPQGGSPWAQSRGREEADALKRMQAQRSTDKEAQGQQFHHHRVPASGTRDKDGFPGPPRYRSAADSVQSSTRNAGPAMAGPHHWQAKGGQVPRLLPDPGSPRLAQNARPMTDGRATEEHPSPFGIPYSKLSQSKHLKARTGGSQWASSDSKRRAQAPRDRKDP

SEQ ID NO: 21199 - protein, 36 aa, Artificial Sequence
  Synthetic polypeptide
LGGDSCGHGHVHRRGHLQGPAGRRLQEESGRVHHRG

SEQ ID NO: 21200 - protein, 78 aa, Artificial Sequence
  Synthetic polypeptide
AQEFETRLGNTVPSQLPPLTHGGCPLEPPYNLSPRTRTPGQLHSSLPPVLGKELLTRGAQSPPPSPCLSLGPLSSSVI

SEQ ID NO: 21201 - protein, 39 aa, Artificial Sequence
  Synthetic polypeptide
AWWLTPVFLALWETEAGGLLEPRSLRPDWATRYQASCLH

SEQ ID NO: 21202 - protein, 265 aa, Artificial Sequence
  Synthetic polypeptide
DQTGQHGTKPAASIDPWGVPTGATVQSVPKNSDPWAASQQPASSAGKRASDAWGAVSTTKPVSVSGSFELFSNLNGTIKDDFSEFDNLRTSKKTAESVTSLPSQNNGTTSPDPFESQPLTVASSKPSSARKTPESFLGPNAALVNLDSLVTRPAPPAQSLNPFLAPGAPATSAPVNPFQVNQPQPLTLNQLRGSPVLGTSTSFGPGPGVESMAVASMTSAAPQPALGATGSSLTPLGPAMMNMVGSVGIPPSAAQATGTTNPFLL

SEQ ID NO: 21203 - protein, 90 aa, Artificial Sequence
  Synthetic polypeptide
DQTGQHGTKPAASIDPWGVPTGATVQSVPKNSDPWAASQQPASSAGKRASDAWGAVSTTKPVSVSGSFELFSNLNGTIKDDFSEFDNLRT

SEQ ID NO: 21204 - protein, 166 aa, Artificial Sequence
  Synthetic polypeptide
DQTGQHGTKPAASIDPWGVPTGATVQSVPKNSDPWAASQQPASSAGKRASDAWGAVSTTKPVSVSGSFELFSNLNGTIKDDFSEFDNLRTSKKTAESVTSLPSQNNGTTSPDPFESQPLTVASSKPSSARKTPESFLGPNAALVNLDSLVTRPAPPAQSLNPFLAP

SEQ ID NO: 21205 - protein, 108 aa, Artificial Sequence
  Synthetic polypeptide
DQTGQHGTKPAASIDPWGVPTGATVQSVPKNSDPWAASQQPASSAGKRASDAWGAVSTTKPVSVSGSFELFSNLNGTIKDDFSEFDNLRTSKKTGMQGLTGLLFTMEI

SEQ ID NO: 21206 - protein, 16 aa, Artificial Sequence
  Synthetic polypeptide
FTAGILEMAASIWSLS

SEQ ID NO: 21207 - protein, 29 aa, Artificial Sequence
  Synthetic polypeptide
TNSQQVSWRWPLPSGVCHDCQPQCPRLPV

SEQ ID NO: 21208 - protein, 222 aa, Artificial Sequence
  Synthetic polypeptide
EIGLRELIHSRYLGDGRFHLESVMIANPNVPAYRYDPYSKVLSREHYDHQRMQAARQEAIATARSAKSWGLILGTLGRQGSPKILEHLESRLRALGLSFVRLLLSEIFPSKLSLLPEVDVWVQVACPRLSIDWGTAFPKPLLTPYEAAVALRDISWQQPYPMDFYAGSSLGPWTVNHGQDRRPHAPGRPARGKVQEGSARPPSAVACEDCSCRDEKVAPLAP

SEQ ID NO: 21209 - protein, 35 aa, Artificial Sequence
  Synthetic polypeptide
EIGLRELIHSRYLGDGRFHLESVMIANPNVPAYRY

SEQ ID NO: 21210 - protein, 117 aa, Artificial Sequence
  Synthetic polypeptide
VWPPSPLSCVLFCPSGIGMIQQEGPQQMLSLDLGLPSLQNLCLWRSSERNWEAGLWCRCECHHILHHRPTTGHPSDLCGQNENHGPLAGHAGLCLPGNCCLCCLYCPAGLEACCRGG

SEQ ID NO: 21211 - protein, 199 aa, Artificial Sequence
  Synthetic polypeptide
YSKKALNRCCHLIWDFPASRTCVYGGVLRGTGKQAFGAAVNAITYYIIGLPLGILLTFVVRMRIMGLWLGMLACVFLATAAFVAYTARLDWKLAAEEAKKHSGRQQQQRAESTATRPGPEKAVLSSVATGSSPGITLTTYSRSECHVDFFRTPEEAHALSAPTSRLSVKQLVIRRGAALGAASATLMVGLTVRILATRH

SEQ ID NO: 21212 - protein, 15 aa, Artificial Sequence
  Synthetic polypeptide
SGTSQPPEPVSMAEF

SEQ ID NO: 21213 - protein, 678 aa, Artificial Sequence
  Synthetic polypeptide
TSFRKYLCDMPVGTAGRRASNEFLVCGGQCQPTVSPHSETAPIPVPTQIRNYQRIEQNLTSTASSGTNVHGSPRSAVVRRSNTSPMGFLRPGSCSPVPADTAQTVGRRLSTGSSRPYSPSPLVGTIPEQFSQCCCGHPQGHDSRSRNSSGSPVPQAQSPQSLLSGARLQSAPTLTDIYQNKQKLRKQHSDPVCPSHTGAGYSYSPQPSRPGSLGTSPTKHLGSSPRSSDWFFKTPLPTIIGSPTKTTAPFKIPKTQASSNLLALVTRHGPAEEQSKDGNEPRECAHCLLVQGSERQRAEQQSKAVFGRSVSTGKLSDQQGKTPICRHQGSTDSLNTERPMDIAPAGACGGVLAPPAGTAASSKAVLFTVGSPPHSAAAPTCTHMFLRTRTTSVGPSNSGGSLCAMSGRVCVGSPPGPGFGSSPPGAEAAPSLRYVPYGASPPSLEGLITFEAPELPEETLMEREHTDTLRHLNVMLMFTECVLDLTAMRGGNPELCTSAVSLYQIQESVVVDQISQLSKDWGRVEQLVLYMKAAQLLAASLHLAKAQIKSGKLSPSTAVKQVVKNLNERYKFCITMCKKLTEKLNRFFSDKQRFIDEINSVTAEKLIYNCAVEMVQSAALDEMFQQTEDIVYRYHKAALLLEGLSRILQDPADIENVHKYKCSIERRLSALCHSTATV

SEQ ID NO: 21214 - protein, 70 aa, Artificial Sequence
  Synthetic polypeptide
GKKGTTHLGKKPESKECYKQSERPSENTYVICQWGLLADVLQMNSWCVEGSVSLLCHLTAKQHQFQFLLK

SEQ ID NO: 21215 - protein, 53 aa, Artificial Sequence
  Synthetic polypeptide
EMISNSVCIQTERNRETSRMSETKERKEQLIWGKNLSQKSVINNLNVLQKILM

SEQ ID NO: 21216 - protein, 21 aa, Artificial Sequence
  Synthetic polypeptide
EHLDTGIHVLTSYEEMGARKY

SEQ ID NO: 21217 - protein, 96 aa, Artificial Sequence
  Synthetic polypeptide
VHVLCRDMDEAGNHHSEQTVSRIENQTPHALTHRWELNNENTWTQGSMFSQAMKKWVQGNTDEAQEELAWKIAKMIVSDIMQQAQYDQPLEKSTKL

SEQ ID NO: 21218 - protein, 15 aa, Artificial Sequence
  Synthetic polypeptide
TMRTLGHRDPCSHKL

SEQ ID NO: 21219 - protein, 75 aa, Artificial Sequence
  Synthetic polypeptide
VHVLCRDMDEAGNHHSEQTVSRIENQTPHALTHRWELNNENTWTQGSMFSQAMKKWVQGNTDEAQEELAWKIAKM

SEQ ID NO: 21220 - protein, 49 aa, Artificial Sequence
  Synthetic polypeptide
VHVLCRDMDEAGNHHSEQTVSRIENQTPHALTHRIHVLTSYEEMGARKY

SEQ ID NO: 21221 - protein, 61 aa, Artificial Sequence
  Synthetic polypeptide
KTKHRMLSLIGSMFSQAMKKWVQGNTDEAQEELAWKIAKMIVSDIMQQAQYDQPLEKSTKL

SEQ ID NO: 21222 - protein, 40 aa, Artificial Sequence
  Synthetic polypeptide
KTKHRMLSLIGSMFSQAMKKWVQGNTDEAQEELAWKIAKM

SEQ ID NO: 21223 - protein, 21 aa, Artificial Sequence
  Synthetic polypeptide
AKITPLHCSLRDREDDIWKSQ

SEQ ID NO: 21224 - protein, 113 aa, Artificial Sequence
  Synthetic polypeptide
SQLLRRLRQENCLNPGGGGCSEPRSHHCTAACATEKMTFGRVSDLGQFIRESEPEPDVRKSKGSMFSQAMKKWVQGNTDEAQEELAWKIAKMIVSDIMQQAQYDQPLEKSTKL

SEQ ID NO: 21225 - protein, 23 aa, Artificial Sequence
  Synthetic polypeptide
TREAEVAVSQDHTIALQPARQRR

SEQ ID NO: 21226 - protein, 92 aa, Artificial Sequence
  Synthetic polypeptide
SQLLRRLRQENCLNPGGGGCSEPRSHHCTAACATEKMTFGRVSDLGQFIRESEPEPDVRKSKGSMFSQAMKKWVQGNTDEAQEELAWKIAKM

SEQ ID NO: 21227 - protein, 37 aa, Artificial Sequence
  Synthetic polypeptide
AFTFTYHSLADSPRATSSLASSIHGLFAWLFVQQSLL

SEQ ID NO: 21228 - protein, 200 aa, Artificial Sequence
  Synthetic polypeptide
CARPSHSLTTHSLTHPEQLPVLQAPFMVFLPGFLSSNLYYKYLNDLIHSVRGDEFLGGNVSLTAPGSVGPPDESHPGSSDSSASQSSVKKASIKILKNFDEAIIVDAASLDPESLYQRTYAGKMTFGRVSDLGQFIRESEPEPDVRKSKGSMFSQAMKKWVQGNTDEAQEELAWKIAKMIVSDIMQQAQYDQPLEKSTKL

SEQ ID NO: 21229 - protein, 29 aa, Artificial Sequence
  Synthetic polypeptide
LTQSNFQSCKLHSWSFCLAFCPAIFIINI

SEQ ID NO: 21230 - protein, 237 aa, Artificial Sequence
  Synthetic polypeptide
YLLYYTFNHYFRVLLLLTKKTVNCKTASDRSFRRFPEGGIVIKGDDGSMRVTAPEDLPVGQDVEVFLPGFLSSNLYYKYLNDLIHSVRGDEFLGGNVSLTAPGSVGPPDESHPGSSDSSASQSSVKKASIKILKNFDEAIIVDAASLDPESLYQRTYAGKMTFGRVSDLGQFIRESEPEPDVRKSKGSMFSQAMKKWVQGNTDEAQEELAWKIAKMIVSDIMQQAQYDQPLEKSTKL

SEQ ID NO: 21231 - protein, 79 aa, Artificial Sequence
  Synthetic polypeptide
IYCTILLIIILECSFYLLRKQLTVKQLQTGPSGGFQKEALLSKEMTAPCVLLPLKTFQWDKMWRSFCLAFCPAIFIINI

SEQ ID NO: 21232 - protein, 22 aa, Artificial Sequence
  Synthetic polypeptide
RPSSGTRCGGLFAWLFVQQSLL

SEQ ID NO: 21233 - protein, 984 aa, Artificial Sequence
  Synthetic polypeptide
AAQQWKGLSSGAFTTTKRTGIPAPREFSVTVSRERSVPRGPSNPRKSVSSPTSSNTPTPTKHLRTPSTKPKQENEGGEKAALESQVRELLAEAKAKDSEINRLRSELKKYKEKRTLNAEGTDALGPNVDGTSVSPGDTEPMIRALEEKNKNFQKELSDLEEENRVLKEKLIYLEHSPNSEGAASHTGDSSCPTSITQESSFGSPTGNQMSSDIDEYKKNIHGNALRTSGSSSSDVTKASLSPDASDFEHITAETPSRPLSSTSNPFKSSKCSTAGSSPNSVSELSLASLTEKIQKMEENHHSTAEELQATLQELSDQQQMVQELTAENEKLVDEKTILETSFHQHRERAEQLSQENEKLMNLLQERVKNEEPTTQEGKIIELEQKCTGILEQGRFEREKLLNIQQQLTCSLRKVEEENQGALEMIKRLKEENEKLNEFLELERHNNNMMAKTLEECRVTLEGLKMENGSLKSHLQGEKQKATEASAVEQTAESCEVQEMLKVARAEKDLLELSCNELRQELLKANGEIKHVSSLLAKVEKDYSYLKEICDHQAEQLSRTSLKLQEKASESDAEIKDMKETIFELEDQVEQHRAVKLHNNQLISELESSVIKLEEQKSDLERQLKTLTKQMKEETEEWRRFQADLQTAVVVANDIKCEAQQELRTVKRKLLEEEEKNARLQKELGDVQGHGRVVTSRAAPPPVDEEPESSEVDAAGRWPGVCVSRTSPTPPESATTVKSLIKSFDLGRPGGAGQNISVHKTPRSPLSGIPVRTAPAAAVSPMQRHSTYSSVRPASRGVTQRLDLPDLPLSDILKGRTETLKPDPHLRKSPSLESLSRPPSLGFGDTRLLSASTRAWKPQSKLSVERKDPLAALAREYGGSKRNALLKWCQKKTQGYANIDITNFSSSWSDGLAFCALLHTYLPAHIPYQELNSQEKKRNLLLAFEAAESVGIKPSLELSEMLYTDRPDWQSVMQYVAQIYKYFET

SEQ ID NO: 21234 - protein, 36 aa, Artificial Sequence
  Synthetic polypeptide
GRIVQLFELLNSGRGCLVGPLQQLNGQAFQPHGNFQ

SEQ ID NO: 21235 - protein, 17 aa, Artificial Sequence
  Synthetic polypeptide
AAQQWKGLSSGAFTTTK

SEQ ID NO: 21236 - protein, 24 aa, Artificial Sequence
  Synthetic polypeptide
GRIVQLFELLNSGRGCLVGPLQQL

SEQ ID NO: 21237 - protein, 48 aa, Artificial Sequence
  Synthetic polypeptide
AAQQWKGLSSGAFTTTKRTGIPAPREFSVTVSRERSVPRGPSNPRKSV

SEQ ID NO: 21238 - protein, 706 aa, Artificial Sequence
  Synthetic polypeptide
AAQQWKGLSSGAFTTTKRTGIPAPREFSVTVSRERSVPRGPSNPRKSVSSPTSSNTPTPTKHLRTPSTKPKQENEGGEKAALESQVRELLAEAKAKDSEINRLRSELKKYKEKRTLNAEGTDALGPNVDGTSVSPGDTEPMIRALEEKNKNFQKELSDLEEENRVLKEKLIYLEHSPNSEGAASHTGDSSCPTSITQESSFGSPTGNQMSSDIDEYKKNIHGNALRTSGSSSSDVTKASLSPDASDFEHITAETPSRPLSSTSNPFKSSKCSTAGSSPNSVSELSLASLTEKIQKMEENHHSTAEELQATLQELSDQQQMVQELTAENEKLVDEKTILETSFHQHRERAEQLSQENEKLMNLLQERVKNEEPTTQEGKIIELEQKCTGILEQGRFEREKLLNIQQQLTCSLRKVEEENQGALEMIKRLKEENEKLNEFLELERHNNNMMAKTLEECRVTLEGLKMENGSLKSHLQGEKQKATEASAVEQTAESCEVQEMLKVARAEKDLLELSCNELRQELLKANGEIKHVSSLLAKVEKDYSYLKEICDHQAEQLSRTSLKLQEKASESDAEIKDMKETIFELEDQVEQHRAVKLHNNQLISELESSVIKLEEQKSDLERQLKTLTKQMKEETEEWRRFQADLQTAVVVANDIKCEAQQELRTVKRKLLEEEEKNARLQKELGDVQGHGRVVTSRAAPPSLGSVS

SEQ ID NO: 21239 - protein, 18 aa, Artificial Sequence
  Synthetic polypeptide
AAQQWKGLSSGAFTTTKR

SEQ ID NO: 21240 - protein, 26 aa, Artificial Sequence
  Synthetic polypeptide
GRIVQLFELLNSGRGCLVGPLQQLNG

SEQ ID NO: 21241 - protein, 700 aa, Artificial Sequence
  Synthetic polypeptide
AAQQWKGLSSGAFTTTKRTGIPAPREFSVTVSRERSVPRGPSNPRKSVSSPTSSNTPTPTKHLRTPSTKPKQENEGGEKAALESQVRELLAEAKAKDSEINRLRSELKKYKEKRTLNAEGTDALGPNVDGTSVSPGDTEPMIRALEEKNKNFQKELSDLEEENRVLKEKLIYLEHSPNSEGAASHTGDSSCPTSITQESSFGSPTGNQMSSDIDEYKKNIHGNALRTSGSSSSDVTKASLSPDASDFEHITAETPSRPLSSTSNPFKSSKCSTAGSSPNSVSELSLASLTEKIQKMEENHHSTAEELQATLQELSDQQQMVQELTAENEKLVDEKTILETSFHQHRERAEQLSQENEKLMNLLQERVKNEEPTTQEGKIIELEQKCTGILEQGRFEREKLLNIQQQLTCSLRKVEEENQGALEMIKRLKEENEKLNEFLELERHNNNMMAKTLEECRVTLEGLKMENGSLKSHLQGEKQKATEASAVEQTAESCEVQEMLKVARAEKDLLELSCNELRQELLKANGEIKHVSSLLAKVEKDYSYLKEICDHQAEQLSRTSLKLQEKASESDAEIKDMKETIFELEDQVEQHRAVKLHNNQLISELESSVIKLEEQKSDLERQLKTLTKQMKEETEEWRRFQADLQTAVVVANDIKCEAQQELRTVKRKLLEEEEKNARLQKELGDVQGHGRVVTSRAAPP

SEQ ID NO: 21242 - protein, 31 aa, Artificial Sequence
  Synthetic polypeptide
GRVQWLMPVIPALWEAEAGGSLEDGDIPCSG

SEQ ID NO: 21243 - protein, 525 aa, Artificial Sequence
  Synthetic polypeptide
SQHFGRPRQVDHLRMETFPAVAEKVLKEFQVLLQHSPSPIGSTRMLQLMTINMFAVHNSQLKDCFSEECRSVIQEQAAALGLAMFSLLVRRCTCLLKESAKAQLSSPEDQDDQDDIKVSSFVPDLKELLPSVKVWSDWMLGYPDTWNPPPTSLDLPSHVAVDVWSTLADFCNILTAVNQSEVPLYKDPDDDLTLLILEEDRLLSGFVPLLAAPQDPCYVEKTSDKVIAADCKRVTVLKYFLEALCGQEEPLLAFKGGKYVSVAPVPDTMGKEMGSQEGTRLEDEEEDVVIEDFEEDSEAEGSGGEDDIRELRAKKLALARKIAEQQRRQEKIQAVLEDHSQMRQMELEIRPLFLVPDTNGFIDHLASLARLLESRKYILVVPLIVINELDGLAKGQETDHRAGGYARVVQEKARKSIEFLEQRFESRDSCLRALTSRGNELESIAFRSEDITGQLGNNDDLILSCCLHYCKDKAKDFMPASKEEPIRLLREVVLLTDDRNLRVKALTRNVPVRDIPAFLTWAQVG

SEQ ID NO: 21244 - protein, 37 aa, Artificial Sequence
  Synthetic polypeptide
EAEASRSQAEQKVHPQFSPCPWEAVYPDWDGDIPCSG

SEQ ID NO: 21245 - protein, 545 aa, Artificial Sequence
  Synthetic polypeptide
SQHFRRPRRADHKLNKRFILSFLHAHGKLFTRIGMETFPAVAEKVLKEFQVLLQHSPSPIGSTRMLQLMTINMFAVHNSQLKDCFSEECRSVIQEQAAALGLAMFSLLVRRCTCLLKESAKAQLSSPEDQDDQDDIKVSSFVPDLKELLPSVKVWSDWMLGYPDTWNPPPTSLDLPSHVAVDVWSTLADFCNILTAVNQSEVPLYKDPDDDLTLLILEEDRLLSGFVPLLAAPQDPCYVEKTSDKVIAADCKRVTVLKYFLEALCGQEEPLLAFKGGKYVSVAPVPDTMGKEMGSQEGTRLEDEEEDVVIEDFEEDSEAEGSGGEDDIRELRAKKLALARKIAEQQRRQEKIQAVLEDHSQMRQMELEIRPLFLVPDTNGFIDHLASLARLLESRKYILVVPLIVINELDGLAKGQETDHRAGGYARVVQEKARKSIEFLEQRFESRDSCLRALTSRGNELESIAFRSEDITGQLGNNDDLILSCCLHYCKDKAKDFMPASKEEPIRLLREVVLLTDDRNLRVKALTRNVPVRDIPAFLTWAQVG

SEQ ID NO: 21246 - protein, 22 aa, Artificial Sequence
  Synthetic polypeptide
PDAVAYACNPSTLGGRGEQITS

SEQ ID NO: 21247 - protein, 12 aa, Artificial Sequence
  Synthetic polypeptide
AEIRGALNAVRS

SEQ ID NO: 21248 - protein, 30 aa, Artificial Sequence
  Synthetic polypeptide
GAAGEARGGWSWRRGAGELRFVVLSMPSEA

SEQ ID NO: 21249 - protein, 286 aa, Artificial Sequence
  Synthetic polypeptide
AEIRGALNAVRSLVPDALERKPKAVVTHSSGNHGQALTYAAKLEGIPAYIVVPQTAPDCKKLAIQAYGASIVYCEPSDESRENVAKRVTEETEGIMVHPNQEPAVIAGQGTIALEVLNQVPLVDALVVPVGGGGMLAGIAITVKALKPSVKVYAAEPSNADDCYQSKLKGKLMPNLYPPETIADGVKSSIGLNTWPIIRDLVDDIFTVTEDEIKCATQLVWERMKLLIEPTAGVGVAAVLSQHFQTVSPEVKNICIVLSGGNVDLTSSITWVKQAERPASYQSVSV

SEQ ID NO: 21250 - protein, 35 aa, Artificial Sequence
  Synthetic polypeptide
GAAGEARGGWSWRRGAGELRFVVLSMPSEAWFLML

SEQ ID NO: 21251 - protein, 39 aa, Artificial Sequence
  Synthetic polypeptide
AEIRGALNAVRSLVPDALERKPKAVVTHSSGNHGQALTY

SEQ ID NO: 21252 - protein, 96 aa, Artificial Sequence
  Synthetic polypeptide
AEIRGALNAVRSLVPDALERKPKAVVTHSSGNHGQALTYAAKLEGIPAYIVVPQTAPDCKKLAIQAYGASIVYCEPSDESKLKGKLMPNLYPPETI

SEQ ID NO: 21253 - protein, 46 aa, Artificial Sequence
  Synthetic polypeptide
AEIRGALNAVRSLVPDALERKPKAVVTHSSGNHGQALTYAAKLEGI

SEQ ID NO: 21254 - protein, 17 aa, Artificial Sequence
  Synthetic polypeptide
TQKAEVAIRGALNAVRS

SEQ ID NO: 21255 - protein, 44 aa, Artificial Sequence
  Synthetic polypeptide
KYKMSGTWCQAPVIPAAWEAEAGELLEPRRQRLQFVVLSMPSEA

SEQ ID NO: 21256 - protein, 30 aa, Artificial Sequence
  Synthetic polypeptide
SQLLGRLRQENCLNPEGRGCNSWCSQCRQK

SEQ ID NO: 21257 - protein, 291 aa, Artificial Sequence
  Synthetic polypeptide
TQKAEVAIRGALNAVRSLVPDALERKPKAVVTHSSGNHGQALTYAAKLEGIPAYIVVPQTAPDCKKLAIQAYGASIVYCEPSDESRENVAKRVTEETEGIMVHPNQEPAVIAGQGTIALEVLNQVPLVDALVVPVGGGGMLAGIAITVKALKPSVKVYAAEPSNADDCYQSKLKGKLMPNLYPPETIADGVKSSIGLNTWPIIRDLVDDIFTVTEDEIKCATQLVWERMKLLIEPTAGVGVAAVLSQHFQTVSPEVKNICIVLSGGNVDLTSSITWVKQAERPASYQSVSV

SEQ ID NO: 21258 - protein, 49 aa, Artificial Sequence
  Synthetic polypeptide
KYKMSGTWCQAPVIPAAWEAEAGELLEPRRQRLQFVVLSMPSEAWFLML

SEQ ID NO: 21259 - protein, 33 aa, Artificial Sequence
  Synthetic polypeptide
SQLLGRLRQENCLNPEGRGCNSWCSQCRQKLGS

SEQ ID NO: 21260 - protein, 44 aa, Artificial Sequence
  Synthetic polypeptide
TQKAEVAIRGALNAVRSLVPDALERKPKAVVTHSSGNHGQALTY

SEQ ID NO: 21261 - protein, 101 aa, Artificial Sequence
  Synthetic polypeptide
TQKAEVAIRGALNAVRSLVPDALERKPKAVVTHSSGNHGQALTYAAKLEGIPAYIVVPQTAPDCKKLAIQAYGASIVYCEPSDESKLKGKLMPNLYPPETI

SEQ ID NO: 21262 - protein, 51 aa, Artificial Sequence
  Synthetic polypeptide
TQKAEVAIRGALNAVRSLVPDALERKPKAVVTHSSGNHGQALTYAAKLEGI

SEQ ID NO: 21263 - protein, 22 aa, Artificial Sequence
  Synthetic polypeptide
SQHFGRLRWVDHKRTNINCRDS

SEQ ID NO: 21264 - protein, 9 aa, Artificial Sequence
  Synthetic polypeptide
GGWITSGQT

SEQ ID NO: 21265 - protein, 191 aa, Artificial Sequence
  Synthetic polypeptide
MARWLTPVIPALWEIEVGGSQADKHKLQRFLTADMALVATVYAPITFPPASVLLFKQKSNGMHSLIATGHLMSVDPDRMVIKRVVLSGHPFKIFTKMAVVRYMFFNREDVLWFKPVELRTKWGRRGHIKEPLGTHGHMKCSFDGKLKSQDTVLMNLYKRVFPKWTYDPYVPEPVPWLKSEISSTVPQGGME

SEQ ID NO: 21266 - protein, 31 aa, Artificial Sequence
  Synthetic polypeptide
MARWLTPVIPALWEIEVGGSQADKHKLQRFL

SEQ ID NO: 21267 - protein, 21 aa, Artificial Sequence
  Synthetic polypeptide
GWARRLTPVIPALFGRPRCQY

SEQ ID NO: 21268 - protein, 18 aa, Artificial Sequence
  Synthetic polypeptide
SQHFLGGQDVSIEYGGEA

SEQ ID NO: 21269 - protein, 231 aa, Artificial Sequence
  Synthetic polypeptide
MGAAAHACNPSTFWEAKMSVLNMVVRRDPGNTEPVKAKEELIFHCGFRRFRASPLFSQHTAADKHKLQRFLTADMALVATVYAPITFPPASVLLFKQKSNGMHSLIATGHLMSVDPDRMVIKRVVLSGHPFKIFTKMAVVRYMFFNREDVLWFKPVELRTKWGRRGHIKEPLGTHGHMKCSFDGKLKSQDTVLMNLYKRVFPKWTYDPYVPEPVPWLKSEISSTVPQGGME

SEQ ID NO: 21270 - protein, 10 aa, Artificial Sequence
  Synthetic polypeptide
CLPLWLLSAW

SEQ ID NO: 21271 - protein, 24 aa, Artificial Sequence
  Synthetic polypeptide
ACLCGCCLPGEANHGGGCHQEVCA

SEQ ID NO: 21272 - protein, 306 aa, Artificial Sequence
  Synthetic polypeptide
PASVAVVCLVKQIMEEAVTRKFVHEDSSHIIALCGAVEACLLHQLRRRAAGFLRSDKMAALFTKVGKTCPVAGEICHKVQELQQQAEGRKPSGVSQEALRRQGSASGKAPALSPQALKHVWVRTALIEKVLDKVVQYLAENCSKYYEKEALLADPVFGPILASLLGEPESTGTVGTGQVLREHRLGWLSLSPQWDPVPWNTLSSRQPITTGLTPLLMSWSSGTASGVHLLARTPLQSAQPWGSGNGTQAAARRRTGWLPVPASVWSPCTRTHGRGCSMARTTCWCSRRRIWRRSLATSPCTSLQRA

SEQ ID NO: 21273 - protein, 1041 aa, Artificial Sequence
  Synthetic polypeptide
PASVAVVCLVKQIMEEAVTRKFVHEDSSHIIALCGAVEACLLHQLRRRAAGFLRSDKMAALFTKVGKTCPVAGEICHKVQELQQQAEGRKPSGVSQEALRRQGSASGKAPALSPQALKHVWVRTALIEKVLDKVVQYLAENCSKYYEKEALLADPVFGPILASLLVGPCALEYTKLKTADHYWTDPSADELVQRHRIRGPPTRQDSPAKRPALGIRKRHSSGSASEDRLAACARECVESLHQNSRTRLLYGKNHVLVQPKEDMEAVPGYLSLHQSAESLTLKWTPNQLMNGTLGDSELEKSVYWDYALVVPFSQVVCIHCHQQKSGGTLVLVSQDGIQRPPLHFPQGGHLLSFLSCLENGLLPRGQLEPPLWTQQGKGKVFPKLRKRSSIRSVDMEEMGTGRATDYVFRIIYPGHRHEHITINYHHLAASRAASVDDDEEEEDKLHAMLSMICSRNLTAPNPMKDAGDMIEMQGFGPSLPAWHLEPLCSQGSSCLSCSSSSSPHATPSHCSCIPDRLPLRLLCESMKRQIVSRAFYGWLAHCRHLSTVRTHLSALVHHSVIPPDRPPGASAGLTKDVWSKYQKDKKNYKELELLRQVYYGGIEHEIRKDVWPFLLGHYKFGMSKKEMEQVDAVVAARYQQVLAEWKACEVVVRQREREAHPATRTKFSSGSSIDSHVQRLIHRDSTISNDVFISVDDLEPPEPQDPEDSRPKPEQEAGPGTPGTAVVEQQHSVEFDSPDSGLPSSRNYSVASGIQSSLDEGQSVGFEEEDGGGEEGSSGPGPAAHTLREPQDPSQEKPQAGELEAGEELAAVCAAAYTIELLDTVALNLHRIDKDVQRCDRNYWYFTPPNLERLRDVMCSYVWEHLDVGYVQGMCDLLAPLLVTLDNDQLAYSCFSHLMKRMSQNFPNGGAMDTHFANMRSLIQILDSELFELMHQNGDYTHFYFCYRWFLLDFKRELLYEDVFAVWEVIWAARHISSEHFVLFIALALVEAYREIIRDNNMDFTDIIKFFNERAEHHDAQEILRIARDLVHKVQMLIENK

SEQ ID NO: 21274 - protein, 996 aa, Artificial Sequence
  Synthetic polypeptide
PASVAVVCLVKQIMEEAVTRKFVHEDSSHIIALCGAVEACLLHQLRRRAAGFLRSDKMAALFTKVGKTCPVAGEICHKVQELQQQAEGRKPSGVSQEALRRQGSASGKAPALSPQALKHVWVRTALIEKVLDKVVQYLAENCSKYYEKEALLADPVFGPILASLLVGPCALEYTKLKTADHYWTDPSADELVQRHRIRGPPTRQDSPAKRPALGIRKRHSSGSASEDRLAACARECVESLHQNSRTRLLYGKNHVLVQPKEDMEAVPGYLSLHQSAESLTLKWTPNQLMNGTLGDSELEKSVYWDYALVVPFSQVVCIHCHQQKSGGTLVLVSQDGIQRPPLHFPQGGHLLSFLSCLENGLLPRGQLEPPLWTQQGKGKVFPKLRKRSSIRSVDMEEMGTGRATDYVFRIIYPGHRHEHNAGDMIEMQGFGPSLPAWHLEPLCSQGSSCLSCSSSSSPHATPSHCSCIPDRLPLRLLCESMKRQIVSRAFYGWLAHCRHLSTVRTHLSALVHHSVIPPDRPPGASAGLTKDVWSKYQKDKKNYKELELLRQVYYGGIEHEIRKDVWPFLLGHYKFGMSKKEMEQVDAVVAARYQQVLAEWKACEVVVRQREREAHPATRTKFSSGSSIDSHVQRLIHRDSTISNDVFISVDDLEPPEPQDPEDSRPKPEQEAGPGTPGTAVVEQQHSVEFDSPDSGLPSSRNYSVASGIQSSLDEGQSVGFEEEDGGGEEGSSGPGPAAHTLREPQDPSQEKPQAGELEAGEELAAVCAAAYTIELLDTVALNLHRIDKDVQRCDRNYWYFTPPNLERLRDVMCSYVWEHLDVGYVQGMCDLLAPLLVTLDNDQLAYSCFSHLMKRMSQNFPNGGAMDTHFANMRSLIQILDSELFELMHQNGDYTHFYFCYRWFLLDFKRELLYEDVFAVWEVIWAARHISSEHFVLFIALALVEAYREIIRDNNMDFTDIIKFFNERAEHHDAQEILRIARDLVHKVQMLIENK

SEQ ID NO: 21275 - protein, 977 aa, Artificial Sequence
  Synthetic polypeptide
PASVAVVCLVKQIMEEAVTRKFVHEDSSHIIALCGAVEACLLHQLRRRAAGFLRSDKMAALFTKVGKTCPVAGEICHKVQELQQQAEGRKPSGVSQEALRRQGSASGKAPALSPQALKHVWVRTALIEKVLDKVVQYLAENCSKYYEKEALLADPVFGPILASLLVGPCALEYTKLKTADHYWTDPSADELVQRHRIRGPPTRQDSPAKRPALGIRKRHSSGSASEDRLAACARECVESLHQNSRTRLLYGKNHVLVQPKEDMEAVPGYLSLHQSAESLTLKWTPNQLMNGTLGDSELEKSVYWDYALVVPFSQVVCIHCHQQKSGGTLVLVSQDGIQRPPLHFPQGGHLLSFLSCLENGLLPRGQLEPPLWTQQGKGKVFPKLRKRSSIRSVDMEEMGTGRATDYVFRIIYPGHRHEHNAGDMIEMQGFGPSLPAWHLEPLCSQGSSCLSCSSSSSPHATPSHCSCIPDRLPLRLLCESMKRQIVSRAFYGWLAHCRHLSTVRTHLSALVHHSVIPPDRPPGASAGLTKDVWSKYQKDKKNYKELELLRQVYYGGIEHEIRKDVWPFLLGHYKFGMSKKEMEQVDAVVAARYQQVLAEWKACEVVVRQREREAHPATRTKFSSGSSIDSHVQRLIHRDSTISNDVFISVDDLEPPEPQDPEDSRPKPEQEAGPGTPGTAVVEQQHSVEFDSPDSGLPSSRNYSVASGIQSSLDEGQSVGFEEEDGGGEEGSSGPGPAAHTLREPQDPSQEKPQAGELEAGEELAAVCAAAYTIELLDTVALNLHRIDKDVQRCDRNYWYFTPPNLERLRDVMCSYVWEHLDVGYVQGMCDLLAPLLVTLDNDQLAYSCFSHLMKRMSQNFPNGGAMDTHFANMRSLIQILDSELFELMHQNGDYTHFYFCYRWFLLDFKRELLYEDVFAVWEVIWAARHISSEHFVLFIALALVEAYREIIRDNNMDFTDIIKFFNGTSLKTTCKK

SEQ ID NO: 21276 - protein, 304 aa, Artificial Sequence
  Synthetic polypeptide
TNFRMTQVKQIMEEAVTRKFVHEDSSHIIALCGAVEACLLHQLRRRAAGFLRSDKMAALFTKVGKTCPVAGEICHKVQELQQQAEGRKPSGVSQEALRRQGSASGKAPALSPQALKHVWVRTALIEKVLDKVVQYLAENCSKYYEKEALLADPVFGPILASLLGEPESTGTVGTGQVLREHRLGWLSLSPQWDPVPWNTLSSRQPITTGLTPLLMSWSSGTASGVHLLARTPLQSAQPWGSGNGTQAAARRRTGWLPVPASVWSPCTRTHGRGCSMARTTCWCSRRRIWRRSLATSPCTSLQRA

SEQ ID NO: 21277 - protein, 2 aa, Artificial Sequence
  Synthetic polypeptide
HR

SEQ ID NO: 21278 - protein, 86 aa, Artificial Sequence
  Synthetic polypeptide
KHKSQTFVHQKTVLNVHSSSIHNSPKLETTQTPGVCTFTPRRVNNLQLYTTRTENEQSTAIHNMNKFQNDTGEANHGGGCHQEVCA

SEQ ID NO: 21279 - protein, 1039 aa, Artificial Sequence
  Synthetic polypeptide
TNFRMTQVKQIMEEAVTRKFVHEDSSHIIALCGAVEACLLHQLRRRAAGFLRSDKMAALFTKVGKTCPVAGEICHKVQELQQQAEGRKPSGVSQEALRRQGSASGKAPALSPQALKHVWVRTALIEKVLDKVVQYLAENCSKYYEKEALLADPVFGPILASLLVGPCALEYTKLKTADHYWTDPSADELVQRHRIRGPPTRQDSPAKRPALGIRKRHSSGSASEDRLAACARECVESLHQNSRTRLLYGKNHVLVQPKEDMEAVPGYLSLHQSAESLTLKWTPNQLMNGTLGDSELEKSVYWDYALVVPFSQVVCIHCHQQKSGGTLVLVSQDGIQRPPLHFPQGGHLLSFLSCLENGLLPRGQLEPPLWTQQGKGKVFPKLRKRSSIRSVDMEEMGTGRATDYVFRIIYPGHRHEHITINYHHLAASRAASVDDDEEEEDKLHAMLSMICSRNLTAPNPMKDAGDMIEMQGFGPSLPAWHLEPLCSQGSSCLSCSSSSSPHATPSHCSCIPDRLPLRLLCESMKRQIVSRAFYGWLAHCRHLSTVRTHLSALVHHSVIPPDRPPGASAGLTKDVWSKYQKDKKNYKELELLRQVYYGGIEHEIRKDVWPFLLGHYKFGMSKKEMEQVDAVVAARYQQVLAEWKACEVVVRQREREAHPATRTKFSSGSSIDSHVQRLIHRDSTISNDVFISVDDLEPPEPQDPEDSRPKPEQEAGPGTPGTAVVEQQHSVEFDSPDSGLPSSRNYSVASGIQSSLDEGQSVGFEEEDGGGEEGSSGPGPAAHTLREPQDPSQEKPQAGELEAGEELAAVCAAAYTIELLDTVALNLHRIDKDVQRCDRNYWYFTPPNLERLRDVMCSYVWEHLDVGYVQGMCDLLAPLLVTLDNDQLAYSCFSHLMKRMSQNFPNGGAMDTHFANMRSLIQILDSELFELMHQNGDYTHFYFCYRWFLLDFKRELLYEDVFAVWEVIWAARHISSEHFVLFIALALVEAYREIIRDNNMDFTDIIKFFNERAEHHDAQEILRIARDLVHKVQMLIENK

SEQ ID NO: 21280 - protein, 994 aa, Artificial Sequence
  Synthetic polypeptide
TNFRMTQVKQIMEEAVTRKFVHEDSSHIIALCGAVEACLLHQLRRRAAGFLRSDKMAALFTKVGKTCPVAGEICHKVQELQQQAEGRKPSGVSQEALRRQGSASGKAPALSPQALKHVWVRTALIEKVLDKVVQYLAENCSKYYEKEALLADPVFGPILASLLVGPCALEYTKLKTADHYWTDPSADELVQRHRIRGPPTRQDSPAKRPALGIRKRHSSGSASEDRLAACARECVESLHQNSRTRLLYGKNHVLVQPKEDMEAVPGYLSLHQSAESLTLKWTPNQLMNGTLGDSELEKSVYWDYALVVPFSQVVCIHCHQQKSGGTLVLVSQDGIQRPPLHFPQGGHLLSFLSCLENGLLPRGQLEPPLWTQQGKGKVFPKLRKRSSIRSVDMEEMGTGRATDYVFRIIYPGHRHEHNAGDMIEMQGFGPSLPAWHLEPLCSQGSSCLSCSSSSSPHATPSHCSCIPDRLPLRLLCESMKRQIVSRAFYGWLAHCRHLSTVRTHLSALVHHSVIPPDRPPGASAGLTKDVWSKYQKDKKNYKELELLRQVYYGGIEHEIRKDVWPFLLGHYKFGMSKKEMEQVDAVVAARYQQVLAEWKACEVVVRQREREAHPATRTKFSSGSSIDSHVQRLIHRDSTISNDVFISVDDLEPPEPQDPEDSRPKPEQEAGPGTPGTAVVEQQHSVEFDSPDSGLPSSRNYSVASGIQSSLDEGQSVGFEEEDGGGEEGSSGPGPAAHTLREPQDPSQEKPQAGELEAGEELAAVCAAAYTIELLDTVALNLHRIDKDVQRCDRNYWYFTPPNLERLRDVMCSYVWEHLDVGYVQGMCDLLAPLLVTLDNDQLAYSCFSHLMKRMSQNFPNGGAMDTHFANMRSLIQILDSELFELMHQNGDYTHFYFCYRWFLLDFKRELLYEDVFAVWEVIWAARHISSEHFVLFIALALVEAYREIIRDNNMDFTDIIKFFNERAEHHDAQEILRIARDLVHKVQMLIENK

SEQ ID NO: 21281 - protein, 975 aa, Artificial Sequence
  Synthetic polypeptide
TNFRMTQVKQIMEEAVTRKFVHEDSSHIIALCGAVEACLLHQLRRRAAGFLRSDKMAALFTKVGKTCPVAGEICHKVQELQQQAEGRKPSGVSQEALRRQGSASGKAPALSPQALKHVWVRTALIEKVLDKVVQYLAENCSKYYEKEALLADPVFGPILASLLVGPCALEYTKLKTADHYWTDPSADELVQRHRIRGPPTRQDSPAKRPALGIRKRHSSGSASEDRLAACARECVESLHQNSRTRLLYGKNHVLVQPKEDMEAVPGYLSLHQSAESLTLKWTPNQLMNGTLGDSELEKSVYWDYALVVPFSQVVCIHCHQQKSGGTLVLVSQDGIQRPPLHFPQGGHLLSFLSCLENGLLPRGQLEPPLWTQQGKGKVFPKLRKRSSIRSVDMEEMGTGRATDYVFRIIYPGHRHEHNAGDMIEMQGFGPSLPAWHLEPLCSQGSSCLSCSSSSSPHATPSHCSCIPDRLPLRLLCESMKRQIVSRAFYGWLAHCRHLSTVRTHLSALVHHSVIPPDRPPGASAGLTKDVWSKYQKDKKNYKELELLRQVYYGGIEHEIRKDVWPFLLGHYKFGMSKKEMEQVDAVVAARYQQVLAEWKACEVVVRQREREAHPATRTKFSSGSSIDSHVQRLIHRDSTISNDVFISVDDLEPPEPQDPEDSRPKPEQEAGPGTPGTAVVEQQHSVEFDSPDSGLPSSRNYSVASGIQSSLDEGQSVGFEEEDGGGEEGSSGPGPAAHTLREPQDPSQEKPQAGELEAGEELAAVCAAAYTIELLDTVALNLHRIDKDVQRCDRNYWYFTPPNLERLRDVMCSYVWEHLDVGYVQGMCDLLAPLLVTLDNDQLAYSCFSHLMKRMSQNFPNGGAMDTHFANMRSLIQILDSELFELMHQNGDYTHFYFCYRWFLLDFKRELLYEDVFAVWEVIWAARHISSEHFVLFIALALVEAYREIIRDNNMDFTDIIKFFNGTSLKTTCKK

SEQ ID NO: 21282 - protein, 33 aa, Artificial Sequence
  Synthetic polypeptide
GRVRWLTPVIPALWEAEAGRSQGSDVAAQQLCT

SEQ ID NO: 21283 - protein, 70 aa, Artificial Sequence
  Synthetic polypeptide
AGCGGSRLSSQHFGRQRQADHKDQMWPPSSCAHRRRRGQVGKGSKRQERAQTSTFRPGFPSSSIPCTGNP

SEQ ID NO: 21284 - protein, 142 aa, Artificial Sequence
  Synthetic polypeptide
PGAVAHACHPSTLGGRGRQITRIRCGRPAVVHIGGEGARWEKGARGRKEHRLRRSDLGSRPVPFLAQGIPDIVIRLLCLSAGSASSHQASDPLSSAAATLAAELDWALVSQKSSEDLAPPSLLLNCISFLITQCPHPRWLPG

SEQ ID NO: 21285 - protein, 15 aa, Artificial Sequence
  Synthetic polypeptide
GQKSSYSRLSSFKWL

SEQ ID NO: 21286 - protein, 73 aa, Artificial Sequence
  Synthetic polypeptide
ARNRAIADYLRSNGYEEAYSVFKKEAELDVNEELDKKYAGLLEKKWTSVIRLQKKVMELESKLNEAKEEFTSG

SEQ ID NO: 21287 - protein, 5 aa, Artificial Sequence
  Synthetic polypeptide
PEIEL

SEQ ID NO: 21288 - protein, 401 aa, Artificial Sequence
  Synthetic polypeptide
ARNRAIADYLRSNGYEEAYSVFKKEAELDVNEELDKKYAGLLEKKWTSVIRLQKKVMELESKLNEAKEEFTSGGPLGQKRDPKEWIPRPPEKYALSGHRSPVTRVIFHPVFSVMVSASEDATIKVWDYETGDFERTLKGHTDSVQDISFDHSGKLLASCSADMTIKLWDFQGFECIRTMHGHDHNVSSVAIMPNGDHIVSASRDKTIKMWEVQTGYCVKTFTGHREWVRMVRPNQDGTLIASCSNDQTVRVWVVATKECKAELREHEHVVECISWAPESSYSSISEATGSETKKSGKPGPFLLSGSRDKTIKMWDVSTGMCLMTLVGHDNWVRGVLFHSGGKFILSCADDKTLRVWDYKNKRCMKTLNAHEHFVTSLDFHKTAPYVVTGSVDQTVKVWECR

SEQ ID NO: 21289 - protein, 24 aa, Artificial Sequence
  Synthetic polypeptide
SQLLWRLMQENRLNLGDRGCEIEL

SEQ ID NO: 21290 - protein, 20 aa, Artificial Sequence
  Synthetic polypeptide
TWETEVVKSSYSRLSSFKWL

SEQ ID NO: 21291 - protein, 25 aa, Artificial Sequence
  Synthetic polypeptide
GRARWLTPVIPALWEAEASRSRGGS

SEQ ID NO: 21292 - protein, 89 aa, Artificial Sequence
  Synthetic polypeptide
SPHFGRPRRADHEVGHDNWVRGVLFHSGGKFILSCADDKTLRVWDYKNKRCMKTLNAHEHFVTSLDFHKTAPYVVTGSVDQTVKVWECR

SEQ ID NO: 21293 - protein, 41 aa, Artificial Sequence
  Synthetic polypeptide
PGTVAHACNPRTLGGRGEQITRWVMITGYVEFCSILGGSLF

SEQ ID NO: 21294 - protein, 46 aa, Artificial Sequence
  Synthetic polypeptide
GRARWLTPVIPALWEAEASRSRDFHKTAPYVVTGSVDQTVKVWECR

SEQ ID NO: 21295 - protein, 26 aa, Artificial Sequence
  Synthetic polypeptide
SPHFGRPRRADHEISTRRHPMSSLAA

SEQ ID NO: 21296 - protein, 46 aa, Artificial Sequence
  Synthetic polypeptide
PGTVAHACNPRTLGGRGEQITRFPQDGTLCRHWQRRSNSKSVGVPL

SEQ ID NO: 21297 - protein, 14 aa, Artificial Sequence
  Synthetic polypeptide
SHLLLKGEAGPLHL

SEQ ID NO: 21298 - protein, 801 aa, Artificial Sequence
  Synthetic polypeptide
RAKLVRYICKQRQCKLSVAPGERTPELNSYPRFSDWLYTFNVRPEVVQEIPRDLTLDALLEMNEAKVKETLRRCGASGDECGRLQYALTCLRKVTGLGGEHKEDSSWSSLDARRESGSGPSTDTLSAASLPWPPGSSQLGRAGNSAQGPRSISVSALPASDSPTPSFSEGLSDTCIPLHASGRLTPRALHSFITPPTTPQLRRHTKLKPPRTPPPPSRKVFQLLPSFPTLTRSKSHESQLGNRIDDVSSMRFDLSHGSPQMVRRDIGLSVTHRFSTKSWLSQVCHVCQKSMIFGVKCKHCRLKCHNKCTKEAPACRISFLPLTRLRRTESVPSDINNPVDRAAEPHFGTLPKALTKKEHPPAMNHLDSSSNPSSTTSSTPSSPAPFPTSSNPSSATTPPNPSPGQRDSRFNFPAAYFIHHRQQFIFPDISAFAHAAPLPEAADGTRLDDQPKADVLEAHEAEAEEPEAGKSEAEDDEDEVDDLPSSRRPWRGPISRKASQTSVYLQEWDIPFEQVELGEPIGQGRWGRVHRGRWHGEVAIRLLEMDGHNQDHLKLFKKEVMNYRQTRHENVVLFMGACMNPPHLAIITSFCKGRTLHSFVRDPKTSLDINKTRQIAQEIIKGMGYLHAKGIVHKDLKSKNVFYDNGKVVITDFGLFGISGVVREGRRENQLKLSHDWLCYLAPEIVREMTPGKDEDQLPFSKAADVYAFGTVWYELQARDWPLKNQAAEASIWQIGSGEGMKRVLTSVSLGKEVSEILSACWAFDLQERPSFSLLMDMLEKLPKLNRRLSHPGHFWKSAEL

SEQ ID NO: 21299 - protein, 25 aa, Artificial Sequence
  Synthetic polypeptide
VPPVKSPSAEGRSWSVTFVSRGSAS

SEQ ID NO: 21300 - protein, 847 aa, Artificial Sequence
  Synthetic polypeptide
RAKLVRYICKQRQCKLSVAPGERTPELNSYPRFSDWLYTFNVRPEVVQEIPRDLTLDALLEMNEAKVKETLRRCGASGDECGRLQYALTCLRKVTGLGGEHKEDSSWSSLDARRESGSGPSTDTLSAASLPWPPGSSQLGRAGNSAQGPRSISVSALPASDSPTPSFSEGLSDTCIPLHASGRLTPRALHSFITPPTTPQLRRHTKLKPPRTPPPPSRKVFQLLPSFPTLTRSKSHESQLGNRIDDVSSMRFDLSHGSPQMVRRDIGLSVTHRFSTKSWLSQVCHVCQKSMIFGVKCKHCRLKCHNKCTKEAPACRISFLPLTRLRRTESVPSDINNPVDRAAEPHFGTLPKALTKKEHPPAMNHLDSSSNPSSTTSSTPSSPAPFPTSSNPSSATTPPNPSPGQRDSRFNFPAAYFIHHRQQFIFPVPSAGHCWKCLLIAESLKENAFNISAFAHAAPLPEAADGTRLDDQPKADVLEAHEAEAEEPEAGKSEAEDDEDEVDDLPSSRRPWRGPISRKASQTSVYLQEWDIPFEQVELGEPIGQGRWGRVHRGRWHGEVAIRLLEMDGHNQDHLKLFKKEVMNYRQTRHENVVLFMGACMNPPHLAIITSFCKGRTLHSFVRDPKTSLDINKTRQIAQEIIKGMGYLHAKGIVHKDLKSKNVFYDNGKVVITDFGLFGISGVVREGRRENQLKLSHDWLCYLAPEIVREMTPGKDEDQLPFSKAADVYAFGTVWYELQARDWPLKNQAAEASIWQIGSGEGMKRVLTSVSLGKEVSEILSACWAFDLQERPSFSLLMDMLEKLPKLNRRLSHPGHFWKSADINSSKVVPRFERFGLGVLESSNPKM

SEQ ID NO: 21301 - protein, 812 aa, Artificial Sequence
  Synthetic polypeptide
SHLLLKGTSSPKAKLVRYICKQRQCKLSVAPGERTPELNSYPRFSDWLYTFNVRPEVVQEIPRDLTLDALLEMNEAKVKETLRRCGASGDECGRLQYALTCLRKVTGLGGEHKEDSSWSSLDARRESGSGPSTDTLSAASLPWPPGSSQLGRAGNSAQGPRSISVSALPASDSPTPSFSEGLSDTCIPLHASGRLTPRALHSFITPPTTPQLRRHTKLKPPRTPPPPSRKVFQLLPSFPTLTRSKSHESQLGNRIDDVSSMRFDLSHGSPQMVRRDIGLSVTHRFSTKSWLSQVCHVCQKSMIFGVKCKHCRLKCHNKCTKEAPACRISFLPLTRLRRTESVPSDINNPVDRAAEPHFGTLPKALTKKEHPPAMNHLDSSSNPSSTTSSTPSSPAPFPTSSNPSSATTPPNPSPGQRDSRFNFPAAYFIHHRQQFIFPDISAFAHAAPLPEAADGTRLDDQPKADVLEAHEAEAEEPEAGKSEAEDDEDEVDDLPSSRRPWRGPISRKASQTSVYLQEWDIPFEQVELGEPIGQGRWGRVHRGRWHGEVAIRLLEMDGHNQDHLKLFKKEVMNYRQTRHENVVLFMGACMNPPHLAIITSFCKGRTLHSFVRDPKTSLDINKTRQIAQEIIKGMGYLHAKGIVHKDLKSKNVFYDNGKVVITDFGLFGISGVVREGRRENQLKLSHDWLCYLAPEIVREMTPGKDEDQLPFSKAADVYAFGTVWYELQARDWPLKNQAAEASIWQIGSGEGMKRVLTSVSLGKEVSEILSACWAFDLQERPSFSLLMDMLEKLPKLNRRLSHPGHFWKSAEL

SEQ ID NO: 21302 - protein, 21 aa, Artificial Sequence
  Synthetic polypeptide
RVHPLPRRSWSVTFVSRGSAS

SEQ ID NO: 21303 - protein, 24 aa, Artificial Sequence
  Synthetic polypeptide
VPPVKSPSAEGYILSQGEAGPLHL

SEQ ID NO: 21304 - protein, 858 aa, Artificial Sequence
  Synthetic polypeptide
SHLLLKGTSSPKAKLVRYICKQRQCKLSVAPGERTPELNSYPRFSDWLYTFNVRPEVVQEIPRDLTLDALLEMNEAKVKETLRRCGASGDECGRLQYALTCLRKVTGLGGEHKEDSSWSSLDARRESGSGPSTDTLSAASLPWPPGSSQLGRAGNSAQGPRSISVSALPASDSPTPSFSEGLSDTCIPLHASGRLTPRALHSFITPPTTPQLRRHTKLKPPRTPPPPSRKVFQLLPSFPTLTRSKSHESQLGNRIDDVSSMRFDLSHGSPQMVRRDIGLSVTHRFSTKSWLSQVCHVCQKSMIFGVKCKHCRLKCHNKCTKEAPACRISFLPLTRLRRTESVPSDINNPVDRAAEPHFGTLPKALTKKEHPPAMNHLDSSSNPSSTTSSTPSSPAPFPTSSNPSSATTPPNPSPGQRDSRFNFPAAYFIHHRQQFIFPVPSAGHCWKCLLIAESLKENAFNISAFAHAAPLPEAADGTRLDDQPKADVLEAHEAEAEEPEAGKSEAEDDEDEVDDLPSSRRPWRGPISRKASQTSVYLQEWDIPFEQVELGEPIGQGRWGRVHRGRWHGEVAIRLLEMDGHNQDHLKLFKKEVMNYRQTRHENVVLFMGACMNPPHLAIITSFCKGRTLHSFVRDPKTSLDINKTRQIAQEIIKGMGYLHAKGIVHKDLKSKNVFYDNGKVVITDFGLFGISGVVREGRRENQLKLSHDWLCYLAPEIVREMTPGKDEDQLPFSKAADVYAFGTVWYELQARDWPLKNQAAEASIWQIGSGEGMKRVLTSVSLGKEVSEILSACWAFDLQERPSFSLLMDMLEKLPKLNRRLSHPGHFWKSADINSSKVVPRFERFGLGVLESSNPKM

SEQ ID NO: 21305 - protein, 21 aa, Artificial Sequence
  Synthetic polypeptide
TRSMNERRSWSVTFVSRGSAS

SEQ ID NO: 21306 - protein, 10 aa, Artificial Sequence
  Synthetic polypeptide
MRGEAGPLHL

SEQ ID NO: 21307 - protein, 801 aa, Artificial Sequence
  Synthetic polypeptide
EAKLVRYICKQRQCKLSVAPGERTPELNSYPRFSDWLYTFNVRPEVVQEIPRDLTLDALLEMNEAKVKETLRRCGASGDECGRLQYALTCLRKVTGLGGEHKEDSSWSSLDARRESGSGPSTDTLSAASLPWPPGSSQLGRAGNSAQGPRSISVSALPASDSPTPSFSEGLSDTCIPLHASGRLTPRALHSFITPPTTPQLRRHTKLKPPRTPPPPSRKVFQLLPSFPTLTRSKSHESQLGNRIDDVSSMRFDLSHGSPQMVRRDIGLSVTHRFSTKSWLSQVCHVCQKSMIFGVKCKHCRLKCHNKCTKEAPACRISFLPLTRLRRTESVPSDINNPVDRAAEPHFGTLPKALTKKEHPPAMNHLDSSSNPSSTTSSTPSSPAPFPTSSNPSSATTPPNPSPGQRDSRFNFPAAYFIHHRQQFIFPDISAFAHAAPLPEAADGTRLDDQPKADVLEAHEAEAEEPEAGKSEAEDDEDEVDDLPSSRRPWRGPISRKASQTSVYLQEWDIPFEQVELGEPIGQGRWGRVHRGRWHGEVAIRLLEMDGHNQDHLKLFKKEVMNYRQTRHENVVLFMGACMNPPHLAIITSFCKGRTLHSFVRDPKTSLDINKTRQIAQEIIKGMGYLHAKGIVHKDLKSKNVFYDNGKVVITDFGLFGISGVVREGRRENQLKLSHDWLCYLAPEIVREMTPGKDEDQLPFSKAADVYAFGTVWYELQARDWPLKNQAAEASIWQIGSGEGMKRVLTSVSLGKEVSEILSACWAFDLQERPSFSLLMDMLEKLPKLNRRLSHPGHFWKSAEL

SEQ ID NO: 21308 - protein, 847 aa, Artificial Sequence
  Synthetic polypeptide
EAKLVRYICKQRQCKLSVAPGERTPELNSYPRFSDWLYTFNVRPEVVQEIPRDLTLDALLEMNEAKVKETLRRCGASGDECGRLQYALTCLRKVTGLGGEHKEDSSWSSLDARRESGSGPSTDTLSAASLPWPPGSSQLGRAGNSAQGPRSISVSALPASDSPTPSFSEGLSDTCIPLHASGRLTPRALHSFITPPTTPQLRRHTKLKPPRTPPPPSRKVFQLLPSFPTLTRSKSHESQLGNRIDDVSSMRFDLSHGSPQMVRRDIGLSVTHRFSTKSWLSQVCHVCQKSMIFGVKCKHCRLKCHNKCTKEAPACRISFLPLTRLRRTESVPSDINNPVDRAAEPHFGTLPKALTKKEHPPAMNHLDSSSNPSSTTSSTPSSPAPFPTSSNPSSATTPPNPSPGQRDSRFNFPAAYFIHHRQQFIFPVPSAGHCWKCLLIAESLKENAFNISAFAHAAPLPEAADGTRLDDQPKADVLEAHEAEAEEPEAGKSEAEDDEDEVDDLPSSRRPWRGPISRKASQTSVYLQEWDIPFEQVELGEPIGQGRWGRVHRGRWHGEVAIRLLEMDGHNQDHLKLFKKEVMNYRQTRHENVVLFMGACMNPPHLAIITSFCKGRTLHSFVRDPKTSLDINKTRQIAQEIIKGMGYLHAKGIVHKDLKSKNVFYDNGKVVITDFGLFGISGVVREGRRENQLKLSHDWLCYLAPEIVREMTPGKDEDQLPFSKAADVYAFGTVWYELQARDWPLKNQAAEASIWQIGSGEGMKRVLTSVSLGKEVSEILSACWAFDLQERPSFSLLMDMLEKLPKLNRRLSHPGHFWKSADINSSKVVPRFERFGLGVLESSNPKM

SEQ ID NO: 21309 - protein, 35 aa, Artificial Sequence
  Synthetic polypeptide
VWGKECWTEPGDRPGTAFYFVRSWSVTFVSRGSAS

SEQ ID NO: 21310 - protein, 28 aa, Artificial Sequence
  Synthetic polypeptide
YGGKSAGQNQETVLALPSTLCEAGPLHL

SEQ ID NO: 21311 - protein, 820 aa, Artificial Sequence
  Synthetic polypeptide
MGERVLDRTRRPSWHCLLLCAKLVRYICKQRQCKLSVAPGERTPELNSYPRFSDWLYTFNVRPEVVQEIPRDLTLDALLEMNEAKVKETLRRCGASGDECGRLQYALTCLRKVTGLGGEHKEDSSWSSLDARRESGSGPSTDTLSAASLPWPPGSSQLGRAGNSAQGPRSISVSALPASDSPTPSFSEGLSDTCIPLHASGRLTPRALHSFITPPTTPQLRRHTKLKPPRTPPPPSRKVFQLLPSFPTLTRSKSHESQLGNRIDDVSSMRFDLSHGSPQMVRRDIGLSVTHRFSTKSWLSQVCHVCQKSMIFGVKCKHCRLKCHNKCTKEAPACRISFLPLTRLRRTESVPSDINNPVDRAAEPHFGTLPKALTKKEHPPAMNHLDSSSNPSSTTSSTPSSPAPFPTSSNPSSATTPPNPSPGQRDSRFNFPAAYFIHHRQQFIFPDISAFAHAAPLPEAADGTRLDDQPKADVLEAHEAEAEEPEAGKSEAEDDEDEVDDLPSSRRPWRGPISRKASQTSVYLQEWDIPFEQVELGEPIGQGRWGRVHRGRWHGEVAIRLLEMDGHNQDHLKLFKKEVMNYRQTRHENVVLFMGACMNPPHLAIITSFCKGRTLHSFVRDPKTSLDINKTRQIAQEIIKGMGYLHAKGIVHKDLKSKNVFYDNGKVVITDFGLFGISGVVREGRRENQLKLSHDWLCYLAPEIVREMTPGKDEDQLPFSKAADVYAFGTVWYELQARDWPLKNQAAEASIWQIGSGEGMKRVLTSVSLGKEVSEILSACWAFDLQERPSFSLLMDMLEKLPKLNRRLSHPGHFWKSAEL

SEQ ID NO: 21312 - protein, 866 aa, Artificial Sequence
  Synthetic polypeptide
MGERVLDRTRRPSWHCLLLCAKLVRYICKQRQCKLSVAPGERTPELNSYPRFSDWLYTFNVRPEVVQEIPRDLTLDALLEMNEAKVKETLRRCGASGDECGRLQYALTCLRKVTGLGGEHKEDSSWSSLDARRESGSGPSTDTLSAASLPWPPGSSQLGRAGNSAQGPRSISVSALPASDSPTPSFSEGLSDTCIPLHASGRLTPRALHSFITPPTTPQLRRHTKLKPPRTPPPPSRKVFQLLPSFPTLTRSKSHESQLGNRIDDVSSMRFDLSHGSPQMVRRDIGLSVTHRFSTKSWLSQVCHVCQKSMIFGVKCKHCRLKCHNKCTKEAPACRISFLPLTRLRRTESVPSDINNPVDRAAEPHFGTLPKALTKKEHPPAMNHLDSSSNPSSTTSSTPSSPAPFPTSSNPSSATTPPNPSPGQRDSRFNFPAAYFIHHRQQFIFPVPSAGHCWKCLLIAESLKENAFNISAFAHAAPLPEAADGTRLDDQPKADVLEAHEAEAEEPEAGKSEAEDDEDEVDDLPSSRRPWRGPISRKASQTSVYLQEWDIPFEQVELGEPIGQGRWGRVHRGRWHGEVAIRLLEMDGHNQDHLKLFKKEVMNYRQTRHENVVLFMGACMNPPHLAIITSFCKGRTLHSFVRDPKTSLDINKTRQIAQEIIKGMGYLHAKGIVHKDLKSKNVFYDNGKVVITDFGLFGISGVVREGRRENQLKLSHDWLCYLAPEIVREMTPGKDEDQLPFSKAADVYAFGTVWYELQARDWPLKNQAAEASIWQIGSGEGMKRVLTSVSLGKEVSEILSACWAFDLQERPSFSLLMDMLEKLPKLNRRLSHPGHFWKSADINSSKVVPRFERFGLGVLESSNPKM

SEQ ID NO: 21313 - protein, 31 aa, Artificial Sequence
  Synthetic polypeptide
LKFCLPLSSPYGLVTSCRRSPETSRWMPCWR

SEQ ID NO: 21314 - protein, 18 aa, Artificial Sequence
  Synthetic polypeptide
PRAGDPPRPHAGCPAGDE

SEQ ID NO: 21315 - protein, 770 aa, Artificial Sequence
  Synthetic polypeptide
KILPATFFTVWPSDLVQEIPRDLTLDALLEMNEAKVKETLRRCGASGDECGRLQYALTCLRKVTGLGGEHKEDSSWSSLDARRESGSGPSTDTLSAASLPWPPGSSQLGRAGNSAQGPRSISVSALPASDSPTPSFSEGLSDTCIPLHASGRLTPRALHSFITPPTTPQLRRHTKLKPPRTPPPPSRKVFQLLPSFPTLTRSKSHESQLGNRIDDVSSMRFDLSHGSPQMVRRDIGLSVTHRFSTKSWLSQVCHVCQKSMIFGVKCKHCRLKCHNKCTKEAPACRISFLPLTRLRRTESVPSDINNPVDRAAEPHFGTLPKALTKKEHPPAMNHLDSSSNPSSTTSSTPSSPAPFPTSSNPSSATTPPNPSPGQRDSRFNFPAAYFIHHRQQFIFPDISAFAHAAPLPEAADGTRLDDQPKADVLEAHEAEAEEPEAGKSEAEDDEDEVDDLPSSRRPWRGPISRKASQTSVYLQEWDIPFEQVELGEPIGQGRWGRVHRGRWHGEVAIRLLEMDGHNQDHLKLFKKEVMNYRQTRHENVVLFMGACMNPPHLAIITSFCKGRTLHSFVRDPKTSLDINKTRQIAQEIIKGMGYLHAKGIVHKDLKSKNVFYDNGKVVITDFGLFGISGVVREGRRENQLKLSHDWLCYLAPEIVREMTPGKDEDQLPFSKAADVYAFGTVWYELQARDWPLKNQAAEASIWQIGSGEGMKRVLTSVSLGKEVSEILSACWAFDLQERPSFSLLMDMLEKLPKLNRRLSHPGHFWKSAEL

SEQ ID NO: 21316 - protein, 816 aa, Artificial Sequence
  Synthetic polypeptide
KILPATFFTVWPSDLVQEIPRDLTLDALLEMNEAKVKETLRRCGASGDECGRLQYALTCLRKVTGLGGEHKEDSSWSSLDARRESGSGPSTDTLSAASLPWPPGSSQLGRAGNSAQGPRSISVSALPASDSPTPSFSEGLSDTCIPLHASGRLTPRALHSFITPPTTPQLRRHTKLKPPRTPPPPSRKVFQLLPSFPTLTRSKSHESQLGNRIDDVSSMRFDLSHGSPQMVRRDIGLSVTHRFSTKSWLSQVCHVCQKSMIFGVKCKHCRLKCHNKCTKEAPACRISFLPLTRLRRTESVPSDINNPVDRAAEPHFGTLPKALTKKEHPPAMNHLDSSSNPSSTTSSTPSSPAPFPTSSNPSSATTPPNPSPGQRDSRFNFPAAYFIHHRQQFIFPVPSAGHCWKCLLIAESLKENAFNISAFAHAAPLPEAADGTRLDDQPKADVLEAHEAEAEEPEAGKSEAEDDEDEVDDLPSSRRPWRGPISRKASQTSVYLQEWDIPFEQVELGEPIGQGRWGRVHRGRWHGEVAIRLLEMDGHNQDHLKLFKKEVMNYRQTRHENVVLFMGACMNPPHLAIITSFCKGRTLHSFVRDPKTSLDINKTRQIAQEIIKGMGYLHAKGIVHKDLKSKNVFYDNGKVVITDFGLFGISGVVREGRRENQLKLSHDWLCYLAPEIVREMTPGKDEDQLPFSKAADVYAFGTVWYELQARDWPLKNQAAEASIWQIGSGEGMKRVLTSVSLGKEVSEILSACWAFDLQERPSFSLLMDMLEKLPKLNRRLSHPGHFWKSADINSSKVVPRFERFGLGVLESSNPKM

SEQ ID NO: 21317 - protein, 1211 aa, Artificial Sequence
  Synthetic polypeptide
PSGASVSSELPSVMLLNGDCPESLKKEAAAAEPPRENGLDEAGPGDETTGQEVIVIQDTGFSVKILAPGIEPFSLQVSPQEMVQEIHQVLMDREDTCHRTCFSLHLDGNVLDHFSELRSVEGLQEGSVLRVVEEPYTVREARIHVRHVRDLLKSLDPSDAFNGVDCNSLSFLSVFTDGDLGDSGKRKKGLEMDPIDCTPPEYILPGSRERPLCPLQPQNRDWKPLQCLKVLTMSGWNPPPGNRKMHGDLMYLFVITAEDRQVSITASTRGFYLNQSTAYHFNPKPASPRFLSHSLVELLNQISPTFKKNFAVLQKKRVQRHPFERIATPFQVYSWTAPQAEHAMDCVRAEDAYTSRLGYEEHIPGQTRDWNEELQTTRELPRKNLPERLLRERAIFKVHSDFTAAATRGAMAVIDGNVMAINPSEETKMQMFIWNNIFFSLGFDVRDHYKDFGGDVAAYVAPTNDLNGVRTYNAVDVEGLYTLGTVVVDYRGYRVTAQSIIPGILERDQEQSVIYGSIDFGKTVVSHPRYLELLERTSRPLKILRHQVLNDRDEEVELCSSVECKGIIGNDGRHYILDLLRTFPPDLNFLPVPGEELPEECARAGFPRAHRHKLCCLRQELVDAFVEHRYLLFMKLAALQLMQQNASQLETPSSLENGGPSSLESKSEDPPGQEAGSEEEGSSASGLAKVKELAETIAADDGTADPRSREVIRNACKAVGSISSTAFDIRFNPDIFSPGVRFPESCQDEVRDQKQLLKDAAAFLLSCQIPGLKIGIGELITRSAKHIFKTYLQGVELSGLSAAISHFLNCFLSSYPNPVAHLPADELVSKKRNKRRKNRPPGAADNTAWAVMTPQELWKNICQEAKNYFDFDLECETVDQAVETYGLQKITLLREISLKTGIQVLLKEYSFDSRHKPAFTEEDVLNIFPVVKHVNPKASDAFHFFQSGQAKVQQGFLKEGCELINEALNLFNNVYGAMHVETCACLRLLARLHYIMGDYAEALSNQQKAVLMSERVMGTEHPNTIQEYMHLALYCFASSQLSTALSLLYRARYLMLLVFGEDHPEMALLDNNIGLVLHGVMEYDLSLRFLENALAVSTKYHGPKALKVALSHHLVARVYESKAEFRSALQHEKEGYTIYKTQLGEDHEKTKESSEYLKCLTQQAVALQRTMNEIYRNGSSANIPPLKFTAPSMASVLEQLNVINGILFIPL

SEQ ID NO: 21318 - protein, 39 aa, Artificial Sequence
  Synthetic polypeptide
VTPGFFLLWVGSSCLCDLGQLLPSLLEPQFPQSCHQSCS

SEQ ID NO: 21319 - protein, 61 aa, Artificial Sequence
  Synthetic polypeptide
HLVFSCSGLAPLASVTLGSCFLAFWSLSFLRAAISHALKRGLPREPEEGGGGGRATQGKWA

SEQ ID NO: 21320 - protein, 14 aa, Artificial Sequence
  Synthetic polypeptide
KIWPESSIFQTIPP

SEQ ID NO: 21321 - protein, 151 aa, Artificial Sequence
  Synthetic polypeptide
GKSCVERSGLRVAYSKLYLHELLEGSEIYLPEVVKPPRNPELVARLEKIKIQLANEEYKRITRNVTCQDTRHGGTLSDLGKQVRSLKALVITIFNFIVTVVAAFVCTYLGSQYIFTEMASRVLAALIVASVVGLAELYVMVRAMEGELGEL

SEQ ID NO: 21322 - protein, 10 aa, Artificial Sequence
  Synthetic polypeptide
HIPNYTSMSS

SEQ ID NO: 21323 - protein, 68 aa, Artificial Sequence
  Synthetic polypeptide
GKSCVERSGLRVAYSKLYLHELLEGSEIYLPEVVKPPRNPELVARLEKIKIQLANEEYKRITRNVTCQ

SEQ ID NO: 21324 - protein, 242 aa, Artificial Sequence
  Synthetic polypeptide
GKSCVERSGLRVAYSKLYLHELLEGSEIYLPEVVKPPRNPELVARLEKIKIQLANEEYKRITRNVTCQDTRHGGTLSDLGKQVRSLKALVITIFNFIVTVVAAFVCTYLGSQYIFTEMASRPRGAHWAGRDPEPGEGTRTRRAGAEWVRHLGAHVQAFGGDMPEAGGGRRPGRGAVLVPPHGPRAAAPLRAGAGQLRAARGPGGAATHGREARSRVALPARLLQGGRAAFAARLPRSSGVGD

SEQ ID NO: 21325 - protein, 34 aa, Artificial Sequence
  Synthetic polypeptide
RSHFSSLGLSSLMCKGKEQDKLAHKIPNYTSMSS

SEQ ID NO: 21326 - protein, 9 aa, Artificial Sequence
  Synthetic polypeptide
HIRFQTIPP

SEQ ID NO: 21327 - protein, 109 aa, Artificial Sequence
  Synthetic polypeptide
ASSEKVQRSKSSPQFWRVVLGCSATSLPCSICTAPPSPPSTSTRQVVAATPYPTWAPHTISTSEWHPRPAPMGTSLSSQNPSIPTASSSSWPLRTVKLGAFPSARSTIL

SEQ ID NO: 21328 - protein, 101 aa, Artificial Sequence
  Synthetic polypeptide
PWTSLNVSEPHLKRFRGQSQAPSSGEWCWDVLLPASLAAYVLLLPAPLPPVLARWWQLPHTLPGLLTLSVPANGTPGQHRWAPASLPKTHLFLQHPHLHGP

SEQ ID NO: 21329 - protein, 453 aa, Artificial Sequence
  Synthetic polypeptide
KGSEVKVKPPVLESGAGMFCYQPPLQHMYCSSQPPFHQYSPGGGSYPIPYLGSSHYQYQRMAPQASTDGHQPLFPKPIYSYSILIFMALKNSKTGSLPVSEIYNFMTEHFPYFKTAPDGWKNSVRHNLSLNKCFEKVENKSGSSSRKGCLWALNPAKIDKMQEELQKWKRKDPIAVRKSMAKPEELDSLIGDKREKLGSPLLGCPPPGLSGSGPIRPLAPPAGLSPPLHSLHPAPGPIPGKNPLQDLLMGHTPSCYGQTYLHLSPGLAPPGPPQPLFPQPDGHLELRAQPGTPQDSPLPAHTPPSHSAKLLAEPSPARTMHDTLLPDGDLGTDLDAINPSLTDFDFQGNLWEQLKDDSLALDPLVLVTSSPTSSSMPPPQPPPHCFPPGPCLTETGSGAGDLAAPGSGGSGALGDLHLTTLYSAFMELEPTPPTAPAGPSVYLSPSSKPVALA

SEQ ID NO: 21330 - protein, 44 aa, Artificial Sequence
  Synthetic polypeptide
GAPLPGRAIWDVRSAFARLPPHLGSGLPIIWEWAAVSDRCNLCG

SEQ ID NO: 21331 - protein, 179 aa, Artificial Sequence
  Synthetic polypeptide
GVPLPGCHPIWEVGCPLSGSGQQSVTGVTSVDDSNSYWRIRGKSATVCERGTPIKCGQPIRLTHVNTGRNLHSHHFTSPLSGNQEVSAFGEEGEGDYLDDWTVLCNGPYWVRDGEVRFKHSSTEVLLSVTGEQYGRPISGQKEVHGMAQPSQNNYWKAMEGIFMKPSELLKAEAHHAEL

SEQ ID NO: 21332 - protein, 49 aa, Artificial Sequence
  Synthetic polypeptide
GAPLPGRPVWEVRSASARPRHLGCEECLCPAATPSGKWAAHYLGVGSSQ

SEQ ID NO: 21333 - protein, 91 aa, Artificial Sequence
  Synthetic polypeptide
GVPLPGCHPIWEVGCPLSGSGQQSVTGVTSVDDSNSYWRIRGKSATVCERGTPIKCGQPIRLTHVNTGRNLHSHHFTSPLSGNQLLCKVIL

SEQ ID NO: 21334 - protein, 45 aa, Artificial Sequence
  Synthetic polypeptide
WLTHVIPAFSDAKVKVTRQKMRSRGGLSSSKPLAETCTPSARVLG

SEQ ID NO: 21335 - protein, 8 aa, Artificial Sequence
  Synthetic polypeptide
SQHFQMLR

SEQ ID NO: 21336 - protein, 51 aa, Artificial Sequence
  Synthetic polypeptide
QEALDSVPCAILGTSGILCSFLEKPVDSPVCFQRPAARAKWGWKLCPVWNR

SEQ ID NO: 21337 - protein, 71 aa, Artificial Sequence
  Synthetic polypeptide
TLYRVPSWAHLEYCAHFLRSLLTHQCASRGQQPGLSGAGNCVLCGTDRICNGDSRGIPVPGPDLPNREWTV

SEQ ID NO: 21338 - protein, 254 aa, Artificial Sequence
  Synthetic polypeptide
VGLETVSCVEQIEYVTVTPEGFRYRGQIFPTVNGLFRWFKDHYQDPVPGITPSSSSRTRTPASINATPANINLADLTRAVNALPQNMTSQMFSAIAAVTGQGQNPNATPAQWASSQYGYGGSGGGSSAYHVFPTPAQQPVATPLMTPSYSYTTPSQPITTPQYHQLQASTTPQSAQAQPQPSSSSRQRQQQPKSNSHAAIDWGKMAEQWLQEKEAERRKQKQRLTPRPSPSPMIESTPMSIAGDATPLLDEMDR

SEQ ID NO: 21339 - protein, 342 aa, Artificial Sequence
  Synthetic polypeptide
SPVLLSSPDVNRLPSWERGHLLAGVASSTDVSTFSEGDCKEPDKCCWRHKQCTGHIIYPFASDCVRHSLHLHSVNHCNCNSRLKDSSEDSSSSRGAGPTCSHVIESPCFELTPEEEHVERFRYGWCKSYRPVSVAVIHHPLYHECGADDLNEEEEEEEEESKPPIPTQVGPATASPDLGTSMATGTPDSTAPITIWRSESPTGKGQGSKVIKKVKKKKEKEKDKEEMDEKAKLKKKAKKGQLTKKKSPVKLEPSPPDVSRSLSARQLARMSESSPESREELESEDSYNGRGQGELSSEDIVESSSPRKRENTVQAKKTGAKPSQARKVNKRKSPPGSNPNLS

SEQ ID NO: 21340 - protein, 18 aa, Artificial Sequence
  Synthetic polypeptide
CSFQEVFHSPQSSFPVLM

SEQ ID NO: 21341 - protein, 130 aa, Artificial Sequence
  Synthetic polypeptide
SPVLLSSPDVNRLPSWERGHLLAGVASSTDVSTFSEGDCKEPDKCCWRHKQCTGHIIYPFASDCVRHSLHLHSVNHCNCNSSFELVLPAQSQLCTPCSALREMGRRSVGLRQAQRKPTVPQASGSGSLGE

SEQ ID NO: 21342 - protein, 58 aa, Artificial Sequence
  Synthetic polypeptide
GQEFETNLANMGISSTIRWTSWLADRREPLGNTLSITSWPWVPSSPASFGAALSVGVS

SEQ ID NO: 21343 - protein, 36 aa, Artificial Sequence
  Synthetic polypeptide
FQHFGEAEAGGSPEVRSLRPTWPTWVFHPRYGGHRG

SEQ ID NO: 21344 - protein, 161 aa, Artificial Sequence
  Synthetic polypeptide
DQPGQHGYFIHDTVDIVASGQTRASWEYLVHHVMAMGAFFSGIFWSSFVGGGVLTLLVEVSNIFLTIRMMMKISNAQDHLLYRVNKYVNLVMYFLFRLAPQAYLTHFFLRYVNQRTLGTFLLGILLMLDVMIIIYFSRLLRSDFCPEHVPKKQHKDKFLTE

SEQ ID NO: 21345 - protein, 132 aa, Artificial Sequence
  Synthetic polypeptide
DQPGQHGYFIHDTVDIVASGQTRASWEYLVHHVMAMGAFFSGIFWSSFVGGGVLTLLVEVSNIFLTIRMMMKISNAQDHLLYRVNKYVNLVMYFLFRLAPQAYLTHFFLRYVNQRTLGTFLLGILLMLDVMI

SEQ ID NO: 21346 - protein, 58 aa, Artificial Sequence
  Synthetic polypeptide
NLVSTKKNFFNEPGVAVWLLSSSVTIALSCFTWIASSRRSLPCPWADGCVRITSNMWC

SEQ ID NO: 21347 - protein, 31 aa, Artificial Sequence
  Synthetic polypeptide
DQPGQHSETLSLQKKIFLMNQELPCGSSHPV

SEQ ID NO: 21348 - protein, 727 aa, Artificial Sequence
  Synthetic polypeptide
TRSCRVAPLIQCDYCPLLFHMDCLEPPLTAMPLGRWMCPNHIEHVVLNQKNMTLSNRCQVFDRFQDTVSQHVVKVDFLNRIHKKHPPNRRVLQSVKRRSLKVPDAIKSQYQFPPPLIAPAAIRDGELICNGIPEESQMHLLNSEHLATQAEQQEWLCSVVALQCSILKHLSAKQMPSHWDSEQTEKADIKPVIVTDSSVTTSLQTADKTPTPSHYPLSCPSGISTQNSLSCSPPHQSPALEDIGCSSCAEKSKKTPCGTANGPVNTEVKANGPHLYSSPTDSTDPRRLPGANTPLPGLSHRQGWPRPLTPPAAGGLQNHTVGIIVKTENATGPSSCPQRSLVPVPSLPPSIPSSCASIENTSTLQRKTVQSQIGPPLTDSRPLGSPPNATRVLTPPQAAGDGILATTANQRFSSPAPSSDGKVSPGTLSIGSALTVPSFPANSTAMVDLTNSLRAFMDVNGEIEINMLDEKLIKFLALQRIHQLFPSRVQPSPGSVGTHQLASGGHHIEVQRKEVQARAVFYPLLGLGGAVNMCYRTLYIGTGADMDVCLTNYGHCNYVSGKHACIFYDENTKHYELLNYSEHGTTVDNVLYSCDFSEKTPPTPPSSIVAKVQSVIRRRRHQKQDEEPSEEAAMMSSQAQGPQRRPCNCKASSSSLIGGSGAGWEGTALLHHGSYIKLGCLQFVFSITEFATKQPKGDASLLQDGVLAEKLSLKPHQGPVLRSNSVP

SEQ ID NO: 21349 - protein, 572 aa, Artificial Sequence
  Synthetic polypeptide
TRSCRVAPLIQCDYCPLLFHMDCLEPPLTAMPLGRWMCPNHIEHVVLNQKNMTLSNRCQVFDRFQDTVSQHVVKVDFLNRIHKKHPPNRRVLQSVKRRSLKVPDAIKSQYQFPPPLIAPAAIRDGELICNGIPEESQMHLLNSEHLATQAEQQEWLCSVVALQCSILKHLSAKQMPSHWDSEQTEKADIKPVIVTDSSVTTSLQTADKTPTPSHYPLSCPSGISTQNSLSCSPPHQSPALEDIGCSSCAEKSKKTPCGTANGPVNTEVKANGPHLYSSPTDSTDPRRLPGANTPLPGLSHRQGWPRPLTPPAAGGLQNHTVGIIVKTENATGPSSCPQRSLVPVPSLPPSIPSSCASIENTSTLQRKTVQSQIGPPLTDSRPLGSPPNATRVLTPPQAAGDGILATTANQRFSSPAPSSDGKVSPGTLSIGSALTVPSFPANSTAMVDLTNSLRAFMDVNGEIEINMLDEKLIKFLALQRIHQLFPSRVQPSPGSVGTHQLASGGHHIEGAHVHTCHHIIRSPLYVCEWSPCLHGESELPVSQTSLCAFHGLNKAPWFFSEESRNKMATTAF

SEQ ID NO: 21350 - protein, 428 aa, Artificial Sequence
  Synthetic polypeptide
TRSCRVAPLIQCDYCPLLFHMDCLEPPLTAMPLGRWMCPNHIEHVVLNQKNMTLSNRCQVFDRFQDTVSQHVVKVDFLNRIHKKHPPNRRVLQSVKRRSLKVPDAIKSQYQFPPPLIAPAAIRDGELICNGIPEESQMHLLNSEHLATQAEQQEWLCSVVALQCSILKHLSAKQMPSHWDSEQTEKADIKPVIVTDSSVTTSLQTADKTPTPSHYPLSCPSGISTQNSLSCSPPHQSPALEDIGCSSCAEKSKKTPCGTANGPVNTEVKANGPHLYSSPTDSTDPRRLPGANTPLPGLSHRQGWPRPLTPPAAGGLQNHTVGIIVKTENATGPSSCPQRSLVPVPSLPPSIPSSCASIENTSTLQRKTVQSQIGPPLTDSRPLGSPPNATRVLTPPQAAGDGILATTANQRFSSPAPSSALGVPEPMG

SEQ ID NO: 21351 - protein, 427 aa, Artificial Sequence
  Synthetic polypeptide
TRSCRVAPLIQCDYCPLLFHMDCLEPPLTAMPLGRWMCPNHIEHVVLNQKNMTLSNRCQVFDRFQDTVSQHVVKVDFLNRIHKKHPPNRRVLQSVKRRSLKVPDAIKSQYQFPPPLIAPAAIRDGELICNGIPEESQMHLLNSEHLATQAEQQEWLCSVVALQCSILKHLSAKQMPSHWDSEQTEKADIKPVIVTDSSVTTSLQTADKTPTPSHYPLSCPSGISTQNSLSCSPPHQSPALEDIGCSSCAEKSKKTPCGTANGPVNTEVKANGPHLYSSPTDSTDPRRLPGANTPLPGLSHRQGWPRPLTPPAAGGLQNHTVGIIVKTENATGPSSCPQRSLVPVPSLPPSIPSSCASIENTSTLQRKTVQSQIGPPLTDSRPLGSPPNATRVLTPPQAAGDGILATTANQRFSSPAPSSGECCSALG

SEQ ID NO: 21352 - protein, 928 aa, Artificial Sequence
  Synthetic polypeptide
TPAWVIRNPPLSEEMLPPGEWMCHRCTVRRKKREQKKELGHVNGLVDKSGKRTTSPSSDTDLLDRSASKTELKAIAHARILERRASRPGTPTSSASTETPTSEQNDVDEDIIDVDEEPVAAEPDYVQPQLRRPFELLIAAAMERNPTQFQLPNELTCTTALPGSSKRRRKEETTGKNVKKTQHELDHNGLVPLPVKVCFTCNRSCRVAPLIQCDYCPLLFHMDCLEPPLTAMPLGRWMCPNHIEHVVLNQKNMTLSNRCQVFDRFQDTVSQHVVKVDFLNRIHKKHPPNRRVLQSVKRRSLKVPDAIKSQYQFPPPLIAPAAIRDGELICNGIPEESQMHLLNSEHLATQAEQQEWLCSVVALQCSILKHLSAKQMPSHWDSEQTEKADIKPVIVTDSSVTTSLQTADKTPTPSHYPLSCPSGISTQNSLSCSPPHQSPALEDIGCSSCAEKSKKTPCGTANGPVNTEVKANGPHLYSSPTDSTDPRRLPGANTPLPGLSHRQGWPRPLTPPAAGGLQNHTVGIIVKTENATGPSSCPQRSLVPVPSLPPSIPSSCASIENTSTLQRKTVQSQIGPPLTDSRPLGSPPNATRVLTPPQAAGDGILATTANQRFSSPAPSSDGKVSPGTLSIGSALTVPSFPANSTAMVDLTNSLRAFMDVNGEIEINMLDEKLIKFLALQRIHQLFPSRVQPSPGSVGTHQLASGGHHIEVQRKEVQARAVFYPLLGLGGAVNMCYRTLYIGTGADMDVCLTNYGHCNYVSGKHACIFYDENTKHYELLNYSEHGTTVDNVLYSCDFSEKTPPTPPSSIVAKVQSVIRRRRHQKQDEEPSEEAAMMSSQAQGPQRRPCNCKASSSSLIGGSGAGWEGTALLHHGSYIKLGCLQFVFSITEFATKQPKGDASLLQDGVLAEKLSLKPHQGPVLRSNSVP

SEQ ID NO: 21353 - protein, 5 aa, Artificial Sequence
  Synthetic polypeptide
YVTLH

SEQ ID NO: 21354 - protein, 773 aa, Artificial Sequence
  Synthetic polypeptide
TPAWVIRNPPLSEEMLPPGEWMCHRCTVRRKKREQKKELGHVNGLVDKSGKRTTSPSSDTDLLDRSASKTELKAIAHARILERRASRPGTPTSSASTETPTSEQNDVDEDIIDVDEEPVAAEPDYVQPQLRRPFELLIAAAMERNPTQFQLPNELTCTTALPGSSKRRRKEETTGKNVKKTQHELDHNGLVPLPVKVCFTCNRSCRVAPLIQCDYCPLLFHMDCLEPPLTAMPLGRWMCPNHIEHVVLNQKNMTLSNRCQVFDRFQDTVSQHVVKVDFLNRIHKKHPPNRRVLQSVKRRSLKVPDAIKSQYQFPPPLIAPAAIRDGELICNGIPEESQMHLLNSEHLATQAEQQEWLCSVVALQCSILKHLSAKQMPSHWDSEQTEKADIKPVIVTDSSVTTSLQTADKTPTPSHYPLSCPSGISTQNSLSCSPPHQSPALEDIGCSSCAEKSKKTPCGTANGPVNTEVKANGPHLYSSPTDSTDPRRLPGANTPLPGLSHRQGWPRPLTPPAAGGLQNHTVGIIVKTENATGPSSCPQRSLVPVPSLPPSIPSSCASIENTSTLQRKTVQSQIGPPLTDSRPLGSPPNATRVLTPPQAAGDGILATTANQRFSSPAPSSDGKVSPGTLSIGSALTVPSFPANSTAMVDLTNSLRAFMDVNGEIEINMLDEKLIKFLALQRIHQLFPSRVQPSPGSVGTHQLASGGHHIEGAHVHTCHHIIRSPLYVCEWSPCLHGESELPVSQTSLCAFHGLNKAPWFFSEESRNKMATTAF

SEQ ID NO: 21355 - protein, 629 aa, Artificial Sequence
  Synthetic polypeptide
TPAWVIRNPPLSEEMLPPGEWMCHRCTVRRKKREQKKELGHVNGLVDKSGKRTTSPSSDTDLLDRSASKTELKAIAHARILERRASRPGTPTSSASTETPTSEQNDVDEDIIDVDEEPVAAEPDYVQPQLRRPFELLIAAAMERNPTQFQLPNELTCTTALPGSSKRRRKEETTGKNVKKTQHELDHNGLVPLPVKVCFTCNRSCRVAPLIQCDYCPLLFHMDCLEPPLTAMPLGRWMCPNHIEHVVLNQKNMTLSNRCQVFDRFQDTVSQHVVKVDFLNRIHKKHPPNRRVLQSVKRRSLKVPDAIKSQYQFPPPLIAPAAIRDGELICNGIPEESQMHLLNSEHLATQAEQQEWLCSVVALQCSILKHLSAKQMPSHWDSEQTEKADIKPVIVTDSSVTTSLQTADKTPTPSHYPLSCPSGISTQNSLSCSPPHQSPALEDIGCSSCAEKSKKTPCGTANGPVNTEVKANGPHLYSSPTDSTDPRRLPGANTPLPGLSHRQGWPRPLTPPAAGGLQNHTVGIIVKTENATGPSSCPQRSLVPVPSLPPSIPSSCASIENTSTLQRKTVQSQIGPPLTDSRPLGSPPNATRVLTPPQAAGDGILATTANQRFSSPAPSSALGVPEPMG

SEQ ID NO: 21356 - protein, 628 aa, Artificial Sequence
  Synthetic polypeptide
TPAWVIRNPPLSEEMLPPGEWMCHRCTVRRKKREQKKELGHVNGLVDKSGKRTTSPSSDTDLLDRSASKTELKAIAHARILERRASRPGTPTSSASTETPTSEQNDVDEDIIDVDEEPVAAEPDYVQPQLRRPFELLIAAAMERNPTQFQLPNELTCTTALPGSSKRRRKEETTGKNVKKTQHELDHNGLVPLPVKVCFTCNRSCRVAPLIQCDYCPLLFHMDCLEPPLTAMPLGRWMCPNHIEHVVLNQKNMTLSNRCQVFDRFQDTVSQHVVKVDFLNRIHKKHPPNRRVLQSVKRRSLKVPDAIKSQYQFPPPLIAPAAIRDGELICNGIPEESQMHLLNSEHLATQAEQQEWLCSVVALQCSILKHLSAKQMPSHWDSEQTEKADIKPVIVTDSSVTTSLQTADKTPTPSHYPLSCPSGISTQNSLSCSPPHQSPALEDIGCSSCAEKSKKTPCGTANGPVNTEVKANGPHLYSSPTDSTDPRRLPGANTPLPGLSHRQGWPRPLTPPAAGGLQNHTVGIIVKTENATGPSSCPQRSLVPVPSLPPSIPSSCASIENTSTLQRKTVQSQIGPPLTDSRPLGSPPNATRVLTPPQAAGDGILATTANQRFSSPAPSSGECCSALG

SEQ ID NO: 21357 - protein, 53 aa, Artificial Sequence
  Synthetic polypeptide
TPAWVIRNPPLSEEMLPPGEWMCHRCTVRRKVLARGEERRKPQGKMLRRHSMN

SEQ ID NO: 21358 - protein, 115 aa, Artificial Sequence
  Synthetic polypeptide
TPAWVIRNPPLSEEMLPPGEWMCHRCTVRRKKREQKKELGHVNGLVDKSGKRTTSPSSDTDLLDRSASKTELKAIAHARILERRASRPGTPTSSASTETPTSEQNDVDEDIIDVD

SEQ ID NO: 21359 - protein, 23 aa, Artificial Sequence
  Synthetic polypeptide
TPAWVIRNPPLSEEMLPPGEWMC

SEQ ID NO: 21360 - protein, 1734 aa, Artificial Sequence
  Synthetic polypeptide
SAWKSAMAHSEYCAKTEEQIAAEEAWNETEKVWLVHRDGFSLASQLKSEELNLPEGKVRVKLDHDGAILDVDEDDVEKANAPSCDRLEDLASLVYLNESSVLHTLRQRYGASLLHTYAGPSLLVLGPRGAPAVYSEKVMHMFKGCRREDMAPHIYAVAQTAYRAMLMSRQDQSIILLGSSGSGKTTSCQHLVQYLATIAGISGNKVFSVEKWQALYTLLEAFGNSPTIINGNATRFSQILSLDFDQAGQVASASIQTMLLEKLRVARRPASEATFNVFYYLLACGDGTLRTELHLNHLAENNVFGIVPLAKPEEKQKAAQQFSKLQAAMKVLGISPDEQKACWFILAAIYHLGAAGATKVHSTAGRKQFARHEWAQKAAYLLGCSLEELSSAIFKHQHKGGTLQRSTSFRQGPEESGLGDGTGPKLSALECLEGMAAGLYSELFTLLVSLVNRALKSSQHSLCSMMIVDTPGFQNPEQGGSARGASFEELCHNYTQDRLQRLFHERTFVQELERYKEENIELAFDDLEPPTDDSVAAVDQASHQSLVRSLARTDEARGLLWLLEEEALVPGASEDTLLERLFSYYGPQEGDKKGQSPLLHSSKPHHFLLGHSHGTNWVEYNVTGWLNYTKQNPATQNAPRLLQDSQKKIISNLFLGRAGSATVLSGSIAGLEGGSQLALRRATSMRKTFTTGMAAVKKKSLCIQMKLQVDALIDTIKKSKLHFVHCFLPVAEGWAGEPRSASSRRVSSSSELDLPSGDHCEAGLLQLDVPLLRTQLRGSRLLDAMRMYRQGYPDHMVFSEFRRRFDVLAPHLTKKHGRNYIVVDERRAVEELLECLDLEKSSCCMGLSRVFFRAGTLARLEEQRDEQTSRNLTLFQAACRGYLARQHFKKRKIQDLAIRCVQKNIKKNKGVKDWPWWKLFTTVRPLIEVQLSEEQIRNKDEEIQQLRSKLEKAEKERNELRLNSDRLESRISELTSELTDERNTGESASQLLDAETAERLRAEKEMKELQTQYDALKKQMEVMEMEVMEARLIRAAEINGEVDDDDAGGEWRLKYERAVREVDFTKKRLQQEFEDKLEVEQQNKRQLERRLGDLQADSEESQRALQQLKKKCQRLTAELQDTKLHLEGQQVRNHELEKKQRRFDSELSQAHEEAQREKLQREKLQREKDMLLAEAFSLKQQLEEKDMDIAGFTQKVVSLEAELQDISSQESKDEASLAKVKKQLRDLEAKVKDQEEELDEQAGTIQMLEQAKLRLEMEMERMRQTHSKEMESRDEEVEEARQSCQKKLKQMEVQLEEEYEDKQKVLREKRELEGKLATLSDQVNRRDFESEKRLRKDLKRTKALLADAQLMLDHLKNSAPSKREIAQLKNQLEESEFTCAAAVKARKAMEVEIEDLHLQIDDIAKAKTALEEQLSRLQREKNEIQNRLEEDQEDMNELMKKHKAAVAQASRDLAQINDLQAQLEEANKEKQELQEKLQALQSQVEFLEQSMVDKSLVSRQEAKIRELETRLEFERTQVKRLESLASRLKENMEKLTEERDQRIAAENREKEQNKRLQRQLRDTKEEMGELARKEAEASRKKHELEMDLESLEAANQSLQADLKLAFKRIGDLQAAIEDEMESDENEDLINSLQDMVTKYQKRKNKLEGDSDVDSELEDRVDGVKSWLSKNKGPSKAASDDGSLKSSSPTSYWKSLAPDRSDDEHDPLDNTSRPRYSHSYLSDSDTEAKLTETNA

SEQ ID NO: 21361 - protein, 62 aa, Artificial Sequence
  Synthetic polypeptide
TCKVLGRVPWPIVSTVRKQKNRLQQKRPGMRRRRCGWSIGTASHWPVNSNLRSSTCLRGRCV

SEQ ID NO: 21362 - protein, 16 aa, Artificial Sequence
  Synthetic polypeptide
VLCENRRTDCSRRGLE

SEQ ID NO: 21363 - protein, 1682 aa, Artificial Sequence
  Synthetic polypeptide
SAWKSAMAHSEYCAKTEEQIAAEEAWNETEKVWLVHRDGFSLASQLKSEELNLPEGKVRVKLDHDGAILDVDEDDVEKANAPSCDRLEDLASLVYLNESSVLHTLRQRYGASLLHTYAGPSLLVLGPRGAPAVYSEKVMHMFKGCRREDMAPHIYAVAQTAYRAMLMSRQDQSIILLGSSGSGKTTSCQHLVQYLATIAGISGNKVFSVEKWQALYTLLEAFGNSPTIINGNATRFSQILSLDFDQAGQVASASIQTMLLEKLRVARRPASEATFNVFYYLLACGDGTLRTELHLNHLAENNVFGIVPLAKPEEKQKAAQQFSKLQAAMKVLGISPDEQKACWFILAAIYHLGAAGATKEAAEAGRKQFARHEWAQKAAYLLGCSLEELSSAIFKHQHKGGTLQRSTSFRQGPEESGLGDGTGPKLSALECLEGMAAGLYSELFTLLVSLVNRALKSSQHSLCSMMIVDTPGFQNPEQGGSARGASFEELCHNYTQDRLQRLFHERTFVQELERYKEENIELAFDDLEPPTDDSVAAVDQASHQSLVRSLARTDEARGLLWLLEEEALVPGASEDTLLERLFSYYGPQEGDKKGQSPLLHSSKPHHFLLGHSHGTNWVEYNVTGWLNYTKQNPATQNAPRLLQDSQKKIISNLFLGRAGSATVLSGSIAGLEGGSQLALRRATSMRKTFTTGMAAVKKKSLCIQMKLQVDALIDTIKKSKLHFVHCFLPVAEGWAGEPRSASSRRVSSSSELDLPSGDHCEAGLLQLDVPLLRTQLRGSRLLDAMRMYRQGYPDHMVFSEFRRRFDVLAPHLTKKHGRNYIVVDERRAVEELLECLDLEKSSCCMGLSRVFFRAGTLARLEEQRDEQTSRNLTLFQAACRGYLARQHFKKRKIQDLAIRCVQKNIKKNKGVKDWPWWKLFTTVRPLIEVQLSEEQIRNKDEEIQQLRSKLEKAEKERNELRLNSDRLESRISELTSELTDERNTGESASQLLDAETAERLRAEKEMKELQTQYDALKKQMEVMEMEVMEARLIRAAEINGEVDDDDAGGEWRLKYERAVREVDFTKKRLQQEFEDKLEVEQQNKRQLERRLGDLQADSEESQRALQQLKKKCQRLTAELQDTKLHLEGQQVRNHELEKKQRRFDSELSQAHEEAQREKLQREKLQREKDMLLAEAFSLKQQLEEKDMDIAGFTQKVVSLEAELQDISSQESKDEASLAKVKKQLRDLEAKVKDQEEELDEQAGTIQMLEQLKQMEVQLEEEYEDKQKVLREKRELEGKLATLSDQVNRRDFESEKRLRKDLKRTKALLADAQLMLDHLKNSAPSKREIAQLKNQLEESEFTCAAAVKARKAMEVEIEDLHLQIDDIAKAKTALEEQLSRLQREKNEIQNRLEEDQEDMNELMKKHKAAVAQASRDLAQINDLQAQLEEANKEKQELQEKLQALQSQVEFLEQSMVDKSLVSRQEAKIRELETRLEFERTQVKRLESLASRLKENMEKLTEERDQRIAAENREKEQNKRLQRQLRDTKEEMGELARKEAEASRKKHELEMDLESLEAANQSLQADLKLAFKRIGDLQAAIEDEMESDENEDLINSEGDSDVDSELEDRVDGVKSWLSKNKGPSKAASDDGSLKSSSPTSYWKSLAPDRSDDEHDPLDNTSRPRYSHSYLSDSDTEAKLTETNA

SEQ ID NO: 21364 - protein, 1719 aa, Artificial Sequence
  Synthetic polypeptide
SAWKSAMAHSEYCAKTEEQIAAEEAWNETEKVWLVHRDGFSLASQLKSEELNLPEGKVRVKLDHDGAILDVDEDDVEKANAPSCDRLEDLASLVYLNESSVLHTLRQRYGASLLHTYAGPSLLVLGPRGAPAVYSEKVMHMFKGCRREDMAPHIYAVAQTAYRAMLMSRQDQSIILLGSSGSGKTTSCQHLVQYLATIAGISGNKVFSVEKWQALYTLLEAFGNSPTIINGNATRFSQILSLDFDQAGQVASASIQTMLLEKLRVARRPASEATFNVFYYLLACGDGTLRTELHLNHLAENNVFGIVPLAKPEEKQKAAQQFSKLQAAMKVLGISPDEQKACWFILAAIYHLGAAGATKEAAEAGRKQFARHEWAQKAAYLLGCSLEELSSAIFKHQHKGGTLQRSTSFRQGPEESGLGDGTGPKLSALECLEGMAAGLYSELFTLLVSLVNRALKSSQHSLCSMMIVDTPGFQNPEQGGSARGASFEELCHNYTQDRLQRLFHERTFVQELERYKEENIELAFDDLEPPTDDSVAAVDQASHQSLVRSLARTDEARGLLWLLEEEALVPGASEDTLLERLFSYYGPQEGDKKGQSPLLHSSKPHHFLLGHSHGTNWVEYNVTGWLNYTKQNPATQNAPRLLQDSQKKIISNLFLGRAGSATVLSGSIAGLEGGSQLALRRATSMRKTFTTGMAAVKKKSLCIQMKLQVDALIDTIKKSKLHFVHCFLPVAEGWAGEPRSASSRRVSSSSELDLPSGDHCEAGLLQLDVPLLRTQLRGSRLLDAMRMYRQGYPDHMVFSEFRRRFDVLAPHLTKKHGRNYIVVDERRAVEELLECLDLEKSSCCMGLSRVFFRAGTLARLEEQRDEQTSRNLTLFQAACRGYLARQHFKKRKIQDLAIRCVQKNIKKNKGVKDWPWWKLFTTVRPLIEVQLSEEQIRNKDEEIQQLRSKLEKAEKERNELRLNSDRLESRISELTSELTDERNTGESASQLLDAETAERLRAEKEMKELQTQYDALKKQMEVMEMEVMEARLIRAAEINGEVDDDDAGGEWRLKYERAVREVDFTKKRLQQEFEDKLEVEQQNKRQLERRLGDLQADSEESQRALQQLKKKCQRLTAELQDTKLHLEGQQVRNHELEKKQRRFDSELSQAHEEAQREKLQREKLQREKDMLLAEAFSLKQQLEEKDMDIAGFTQKVVSLEAELQDISSQESKDEASLAKVKKQLRDLEAKVKDQEEELDEQAGTIQMLEQAKLRLEMEMERMRQTHSKEMESRDEEVEEARQSCQKKLKQMEVQLEEEYEDKQKVLREKRELEGKLATLSDQVNRRDFESEKRLRKDLKRTKALLADAQLMLDHLKNSAPSKREIAQLKNQLEESEFTCAAAVKARKAMEVEIEDLHLQIDDIAKAKTALEEQLSRLQREKNEIQNRLEEDQEDMNELMKKHKAAVAQASRDLAQINDLQAQLEEANKEKQELQEKLQALQSQVEFLEQSMVDKSLVSRQEAKIRELETRLEFERTQVKRLESLASRLKENMEKLTEERDQRIAAENREKEQNKRLQRQLRDTKEEMGELARKEAEASRKKHELEMDLESLEAANQSLQADLKLAFKRIGDLQAAIEDEMESDENEDLINSEGDSDVDSELEDRVDGVKSWLSKNKGPSKAASDDGSLKSSSPTSYWKSLAPDRSDDEHDPLDNTSRPRYSHSYLSDSDTEAKLTETNA

SEQ ID NO: 21365 - protein, 1734 aa, Artificial Sequence
  Synthetic polypeptide
SAWKSAMAHSEYCAKTEEQIAAEEAWNETEKVWLVHRDGFSLASQLKSEELNLPEGKVRVKLDHDGAILDVDEDDVEKANAPSCDRLEDLASLVYLNESSVLHTLRQRYGASLLHTYAGPSLLVLGPRGAPAVYSEKVMHMFKGCRREDMAPHIYAVAQTAYRAMLMSRQDQSIILLGSSGSGKTTSCQHLVQYLATIAGISGNKVFSVEKWQALYTLLEAFGNSPTIINGNATRFSQILSLDFDQAGQVASASIQTMLLEKLRVARRPASEATFNVFYYLLACGDGTLRTELHLNHLAENNVFGIVPLAKPEEKQKAAQQFSKLQAAMKVLGISPDEQKACWFILAAIYHLGAAGATKEAAEAGRKQFARHEWAQKAAYLLGCSLEELSSAIFKHQHKGGTLQRSTSFRQGPEESGLGDGTGPKLSALECLEGMAAGLYSELFTLLVSLVNRALKSSQHSLCSMMIVDTPGFQNPEQGGSARGASFEELCHNYTQDRLQRLFHERTFVQELERYKEENIELAFDDLEPPTDDSVAAVDQASHQSLVRSLARTDEARGLLWLLEEEALVPGASEDTLLERLFSYYGPQEGDKKGQSPLLHSSKPHHFLLGHSHGTNWVEYNVTGWLNYTKQNPATQNAPRLLQDSQKKIISNLFLGRAGSATVLSGSIAGLEGGSQLALRRATSMRKTFTTGMAAVKKKSLCIQMKLQVDALIDTIKKSKLHFVHCFLPVAEGWAGEPRSASSRRVSSSSELDLPSGDHCEAGLLQLDVPLLRTQLRGSRLLDAMRMYRQGYPDHMVFSEFRRRFDVLAPHLTKKHGRNYIVVDERRAVEELLECLDLEKSSCCMGLSRVFFRAGTLARLEEQRDEQTSRNLTLFQAACRGYLARQHFKKRKIQDLAIRCVQKNIKKNKGVKDWPWWKLFTTVRPLIEVQLSEEQIRNKDEEIQQLRSKLEKAEKERNELRLNSDRLESRISELTSELTDERNTGESASQLLDAETAERLRAEKEMKELQTQYDALKKQMEVMEMEVMEARLIRAAEINGEVDDDDAGGEWRLKYERAVREVDFTKKRLQQEFEDKLEVEQQNKRQLERRLGDLQADSEESQRALQQLKKKCQRLTAELQDTKLHLEGQQVRNHELEKKQRRFDSELSQAHEEAQREKLQREKLQREKDMLLAEAFSLKQQLEEKDMDIAGFTQKVVSLEAELQDISSQESKDEASLAKVKKQLRDLEAKVKDQEEELDEQAGTIQMLEQAKLRLEMEMERMRQTHSKEMESRDEEVEEARQSCQKKLKQMEVQLEEEYEDKQKVLREKRELEGKLATLSDQVNRRDFESEKRLRKDLKRTKALLADAQLMLDHLKNSAPSKREIAQLKNQLEESEFTCAAAVKARKAMEVEIEDLHLQIDDIAKAKTALEEQLSRLQREKNEIQNRLEEDQEDMNELMKKHKAAVAQASRDLAQINDLQAQLEEANKEKQELQEKLQALQSQVEFLEQSMVDKSLVSRQEAKIRELETRLEFERTQVKRLESLASRLKENMEKLTEERDQRIAAENREKEQNKRLQRQLRDTKEEMGELARKEAEASRKKHELEMDLESLEAANQSLQADLKLAFKRIGDLQAAIEDEMESDENEDLINSLQDMVTKYQKRKNKLEGDSDVDSELEDRVDGVKSWLSKNKGPSKAASDDGSLKSSSPTSYWKSLAPDRSDDEHDPLDNTSRPRYSHSYLSDSDTEAKLTETNA

SEQ ID NO: 21366 - protein, 171 aa, Artificial Sequence
  Synthetic polypeptide
SAWKSAMAHSEYCAKTEEQIAAEEAWNETEKVWLVHRDGFSLASQLKSEELNLPEGKVRVKLDHDGAILDVDEDDVEKANAPSCDRLEDLASLVYLNESSVLHTLRQRYGASLLHTYAGPSLLVLGPRGAPAVYSEKVMHMFKGCRREDMAPHIYAVAQTAYRAMLMSRQD

SEQ ID NO: 21367 - protein, 31 aa, Artificial Sequence
  Synthetic polypeptide
GFNEETCMKCLPLCLAHSENRRTDCSRRGLE

SEQ ID NO: 21368 - protein, 1730 aa, Artificial Sequence
  Synthetic polypeptide
SAFPCAWLIAKTEEQIAAEEAWNETEKVWLVHRDGFSLASQLKSEELNLPEGKVRVKLDHDGAILDVDEDDVEKANAPSCDRLEDLASLVYLNESSVLHTLRQRYGASLLHTYAGPSLLVLGPRGAPAVYSEKVMHMFKGCRREDMAPHIYAVAQTAYRAMLMSRQDQSIILLGSSGSGKTTSCQHLVQYLATIAGISGNKVFSVEKWQALYTLLEAFGNSPTIINGNATRFSQILSLDFDQAGQVASASIQTMLLEKLRVARRPASEATFNVFYYLLACGDGTLRTELHLNHLAENNVFGIVPLAKPEEKQKAAQQFSKLQAAMKVLGISPDEQKACWFILAAIYHLGAAGATKVHSTAGRKQFARHEWAQKAAYLLGCSLEELSSAIFKHQHKGGTLQRSTSFRQGPEESGLGDGTGPKLSALECLEGMAAGLYSELFTLLVSLVNRALKSSQHSLCSMMIVDTPGFQNPEQGGSARGASFEELCHNYTQDRLQRLFHERTFVQELERYKEENIELAFDDLEPPTDDSVAAVDQASHQSLVRSLARTDEARGLLWLLEEEALVPGASEDTLLERLFSYYGPQEGDKKGQSPLLHSSKPHHFLLGHSHGTNWVEYNVTGWLNYTKQNPATQNAPRLLQDSQKKIISNLFLGRAGSATVLSGSIAGLEGGSQLALRRATSMRKTFTTGMAAVKKKSLCIQMKLQVDALIDTIKKSKLHFVHCFLPVAEGWAGEPRSASSRRVSSSSELDLPSGDHCEAGLLQLDVPLLRTQLRGSRLLDAMRMYRQGYPDHMVFSEFRRRFDVLAPHLTKKHGRNYIVVDERRAVEELLECLDLEKSSCCMGLSRVFFRAGTLARLEEQRDEQTSRNLTLFQAACRGYLARQHFKKRKIQDLAIRCVQKNIKKNKGVKDWPWWKLFTTVRPLIEVQLSEEQIRNKDEEIQQLRSKLEKAEKERNELRLNSDRLESRISELTSELTDERNTGESASQLLDAETAERLRAEKEMKELQTQYDALKKQMEVMEMEVMEARLIRAAEINGEVDDDDAGGEWRLKYERAVREVDFTKKRLQQEFEDKLEVEQQNKRQLERRLGDLQADSEESQRALQQLKKKCQRLTAELQDTKLHLEGQQVRNHELEKKQRRFDSELSQAHEEAQREKLQREKLQREKDMLLAEAFSLKQQLEEKDMDIAGFTQKVVSLEAELQDISSQESKDEASLAKVKKQLRDLEAKVKDQEEELDEQAGTIQMLEQAKLRLEMEMERMRQTHSKEMESRDEEVEEARQSCQKKLKQMEVQLEEEYEDKQKVLREKRELEGKLATLSDQVNRRDFESEKRLRKDLKRTKALLADAQLMLDHLKNSAPSKREIAQLKNQLEESEFTCAAAVKARKAMEVEIEDLHLQIDDIAKAKTALEEQLSRLQREKNEIQNRLEEDQEDMNELMKKHKAAVAQASRDLAQINDLQAQLEEANKEKQELQEKLQALQSQVEFLEQSMVDKSLVSRQEAKIRELETRLEFERTQVKRLESLASRLKENMEKLTEERDQRIAAENREKEQNKRLQRQLRDTKEEMGELARKEAEASRKKHELEMDLESLEAANQSLQADLKLAFKRIGDLQAAIEDEMESDENEDLINSLQDMVTKYQKRKNKLEGDSDVDSELEDRVDGVKSWLSKNKGPSKAASDDGSLKSSSPTSYWKSLAPDRSDDEHDPLDNTSRPRYSHSYLSDSDTEAKLTETNA

SEQ ID NO: 21369 - protein, 1678 aa, Artificial Sequence
  Synthetic polypeptide
SAFPCAWLIAKTEEQIAAEEAWNETEKVWLVHRDGFSLASQLKSEELNLPEGKVRVKLDHDGAILDVDEDDVEKANAPSCDRLEDLASLVYLNESSVLHTLRQRYGASLLHTYAGPSLLVLGPRGAPAVYSEKVMHMFKGCRREDMAPHIYAVAQTAYRAMLMSRQDQSIILLGSSGSGKTTSCQHLVQYLATIAGISGNKVFSVEKWQALYTLLEAFGNSPTIINGNATRFSQILSLDFDQAGQVASASIQTMLLEKLRVARRPASEATFNVFYYLLACGDGTLRTELHLNHLAENNVFGIVPLAKPEEKQKAAQQFSKLQAAMKVLGISPDEQKACWFILAAIYHLGAAGATKEAAEAGRKQFARHEWAQKAAYLLGCSLEELSSAIFKHQHKGGTLQRSTSFRQGPEESGLGDGTGPKLSALECLEGMAAGLYSELFTLLVSLVNRALKSSQHSLCSMMIVDTPGFQNPEQGGSARGASFEELCHNYTQDRLQRLFHERTFVQELERYKEENIELAFDDLEPPTDDSVAAVDQASHQSLVRSLARTDEARGLLWLLEEEALVPGASEDTLLERLFSYYGPQEGDKKGQSPLLHSSKPHHFLLGHSHGTNWVEYNVTGWLNYTKQNPATQNAPRLLQDSQKKIISNLFLGRAGSATVLSGSIAGLEGGSQLALRRATSMRKTFTTGMAAVKKKSLCIQMKLQVDALIDTIKKSKLHFVHCFLPVAEGWAGEPRSASSRRVSSSSELDLPSGDHCEAGLLQLDVPLLRTQLRGSRLLDAMRMYRQGYPDHMVFSEFRRRFDVLAPHLTKKHGRNYIVVDERRAVEELLECLDLEKSSCCMGLSRVFFRAGTLARLEEQRDEQTSRNLTLFQAACRGYLARQHFKKRKIQDLAIRCVQKNIKKNKGVKDWPWWKLFTTVRPLIEVQLSEEQIRNKDEEIQQLRSKLEKAEKERNELRLNSDRLESRISELTSELTDERNTGESASQLLDAETAERLRAEKEMKELQTQYDALKKQMEVMEMEVMEARLIRAAEINGEVDDDDAGGEWRLKYERAVREVDFTKKRLQQEFEDKLEVEQQNKRQLERRLGDLQADSEESQRALQQLKKKCQRLTAELQDTKLHLEGQQVRNHELEKKQRRFDSELSQAHEEAQREKLQREKLQREKDMLLAEAFSLKQQLEEKDMDIAGFTQKVVSLEAELQDISSQESKDEASLAKVKKQLRDLEAKVKDQEEELDEQAGTIQMLEQLKQMEVQLEEEYEDKQKVLREKRELEGKLATLSDQVNRRDFESEKRLRKDLKRTKALLADAQLMLDHLKNSAPSKREIAQLKNQLEESEFTCAAAVKARKAMEVEIEDLHLQIDDIAKAKTALEEQLSRLQREKNEIQNRLEEDQEDMNELMKKHKAAVAQASRDLAQINDLQAQLEEANKEKQELQEKLQALQSQVEFLEQSMVDKSLVSRQEAKIRELETRLEFERTQVKRLESLASRLKENMEKLTEERDQRIAAENREKEQNKRLQRQLRDTKEEMGELARKEAEASRKKHELEMDLESLEAANQSLQADLKLAFKRIGDLQAAIEDEMESDENEDLINSEGDSDVDSELEDRVDGVKSWLSKNKGPSKAASDDGSLKSSSPTSYWKSLAPDRSDDEHDPLDNTSRPRYSHSYLSDSDTEAKLTETNA

SEQ ID NO: 21370 - protein, 1715 aa, Artificial Sequence
  Synthetic polypeptide
SAFPCAWLIAKTEEQIAAEEAWNETEKVWLVHRDGFSLASQLKSEELNLPEGKVRVKLDHDGAILDVDEDDVEKANAPSCDRLEDLASLVYLNESSVLHTLRQRYGASLLHTYAGPSLLVLGPRGAPAVYSEKVMHMFKGCRREDMAPHIYAVAQTAYRAMLMSRQDQSIILLGSSGSGKTTSCQHLVQYLATIAGISGNKVFSVEKWQALYTLLEAFGNSPTIINGNATRFSQILSLDFDQAGQVASASIQTMLLEKLRVARRPASEATFNVFYYLLACGDGTLRTELHLNHLAENNVFGIVPLAKPEEKQKAAQQFSKLQAAMKVLGISPDEQKACWFILAAIYHLGAAGATKEAAEAGRKQFARHEWAQKAAYLLGCSLEELSSAIFKHQHKGGTLQRSTSFRQGPEESGLGDGTGPKLSALECLEGMAAGLYSELFTLLVSLVNRALKSSQHSLCSMMIVDTPGFQNPEQGGSARGASFEELCHNYTQDRLQRLFHERTFVQELERYKEENIELAFDDLEPPTDDSVAAVDQASHQSLVRSLARTDEARGLLWLLEEEALVPGASEDTLLERLFSYYGPQEGDKKGQSPLLHSSKPHHFLLGHSHGTNWVEYNVTGWLNYTKQNPATQNAPRLLQDSQKKIISNLFLGRAGSATVLSGSIAGLEGGSQLALRRATSMRKTFTTGMAAVKKKSLCIQMKLQVDALIDTIKKSKLHFVHCFLPVAEGWAGEPRSASSRRVSSSSELDLPSGDHCEAGLLQLDVPLLRTQLRGSRLLDAMRMYRQGYPDHMVFSEFRRRFDVLAPHLTKKHGRNYIVVDERRAVEELLECLDLEKSSCCMGLSRVFFRAGTLARLEEQRDEQTSRNLTLFQAACRGYLARQHFKKRKIQDLAIRCVQKNIKKNKGVKDWPWWKLFTTVRPLIEVQLSEEQIRNKDEEIQQLRSKLEKAEKERNELRLNSDRLESRISELTSELTDERNTGESASQLLDAETAERLRAEKEMKELQTQYDALKKQMEVMEMEVMEARLIRAAEINGEVDDDDAGGEWRLKYERAVREVDFTKKRLQQEFEDKLEVEQQNKRQLERRLGDLQADSEESQRALQQLKKKCQRLTAELQDTKLHLEGQQVRNHELEKKQRRFDSELSQAHEEAQREKLQREKLQREKDMLLAEAFSLKQQLEEKDMDIAGFTQKVVSLEAELQDISSQESKDEASLAKVKKQLRDLEAKVKDQEEELDEQAGTIQMLEQAKLRLEMEMERMRQTHSKEMESRDEEVEEARQSCQKKLKQMEVQLEEEYEDKQKVLREKRELEGKLATLSDQVNRRDFESEKRLRKDLKRTKALLADAQLMLDHLKNSAPSKREIAQLKNQLEESEFTCAAAVKARKAMEVEIEDLHLQIDDIAKAKTALEEQLSRLQREKNEIQNRLEEDQEDMNELMKKHKAAVAQASRDLAQINDLQAQLEEANKEKQELQEKLQALQSQVEFLEQSMVDKSLVSRQEAKIRELETRLEFERTQVKRLESLASRLKENMEKLTEERDQRIAAENREKEQNKRLQRQLRDTKEEMGELARKEAEASRKKHELEMDLESLEAANQSLQADLKLAFKRIGDLQAAIEDEMESDENEDLINSEGDSDVDSELEDRVDGVKSWLSKNKGPSKAASDDGSLKSSSPTSYWKSLAPDRSDDEHDPLDNTSRPRYSHSYLSDSDTEAKLTETNA

SEQ ID NO: 21371 - protein, 1730 aa, Artificial Sequence
  Synthetic polypeptide
SAFPCAWLIAKTEEQIAAEEAWNETEKVWLVHRDGFSLASQLKSEELNLPEGKVRVKLDHDGAILDVDEDDVEKANAPSCDRLEDLASLVYLNESSVLHTLRQRYGASLLHTYAGPSLLVLGPRGAPAVYSEKVMHMFKGCRREDMAPHIYAVAQTAYRAMLMSRQDQSIILLGSSGSGKTTSCQHLVQYLATIAGISGNKVFSVEKWQALYTLLEAFGNSPTIINGNATRFSQILSLDFDQAGQVASASIQTMLLEKLRVARRPASEATFNVFYYLLACGDGTLRTELHLNHLAENNVFGIVPLAKPEEKQKAAQQFSKLQAAMKVLGISPDEQKACWFILAAIYHLGAAGATKEAAEAGRKQFARHEWAQKAAYLLGCSLEELSSAIFKHQHKGGTLQRSTSFRQGPEESGLGDGTGPKLSALECLEGMAAGLYSELFTLLVSLVNRALKSSQHSLCSMMIVDTPGFQNPEQGGSARGASFEELCHNYTQDRLQRLFHERTFVQELERYKEENIELAFDDLEPPTDDSVAAVDQASHQSLVRSLARTDEARGLLWLLEEEALVPGASEDTLLERLFSYYGPQEGDKKGQSPLLHSSKPHHFLLGHSHGTNWVEYNVTGWLNYTKQNPATQNAPRLLQDSQKKIISNLFLGRAGSATVLSGSIAGLEGGSQLALRRATSMRKTFTTGMAAVKKKSLCIQMKLQVDALIDTIKKSKLHFVHCFLPVAEGWAGEPRSASSRRVSSSSELDLPSGDHCEAGLLQLDVPLLRTQLRGSRLLDAMRMYRQGYPDHMVFSEFRRRFDVLAPHLTKKHGRNYIVVDERRAVEELLECLDLEKSSCCMGLSRVFFRAGTLARLEEQRDEQTSRNLTLFQAACRGYLARQHFKKRKIQDLAIRCVQKNIKKNKGVKDWPWWKLFTTVRPLIEVQLSEEQIRNKDEEIQQLRSKLEKAEKERNELRLNSDRLESRISELTSELTDERNTGESASQLLDAETAERLRAEKEMKELQTQYDALKKQMEVMEMEVMEARLIRAAEINGEVDDDDAGGEWRLKYERAVREVDFTKKRLQQEFEDKLEVEQQNKRQLERRLGDLQADSEESQRALQQLKKKCQRLTAELQDTKLHLEGQQVRNHELEKKQRRFDSELSQAHEEAQREKLQREKLQREKDMLLAEAFSLKQQLEEKDMDIAGFTQKVVSLEAELQDISSQESKDEASLAKVKKQLRDLEAKVKDQEEELDEQAGTIQMLEQAKLRLEMEMERMRQTHSKEMESRDEEVEEARQSCQKKLKQMEVQLEEEYEDKQKVLREKRELEGKLATLSDQVNRRDFESEKRLRKDLKRTKALLADAQLMLDHLKNSAPSKREIAQLKNQLEESEFTCAAAVKARKAMEVEIEDLHLQIDDIAKAKTALEEQLSRLQREKNEIQNRLEEDQEDMNELMKKHKAAVAQASRDLAQINDLQAQLEEANKEKQELQEKLQALQSQVEFLEQSMVDKSLVSRQEAKIRELETRLEFERTQVKRLESLASRLKENMEKLTEERDQRIAAENREKEQNKRLQRQLRDTKEEMGELARKEAEASRKKHELEMDLESLEAANQSLQADLKLAFKRIGDLQAAIEDEMESDENEDLINSLQDMVTKYQKRKNKLEGDSDVDSELEDRVDGVKSWLSKNKGPSKAASDDGSLKSSSPTSYWKSLAPDRSDDEHDPLDNTSRPRYSHSYLSDSDTEAKLTETNA

SEQ ID NO: 21372 - protein, 167 aa, Artificial Sequence
  Synthetic polypeptide
SAFPCAWLIAKTEEQIAAEEAWNETEKVWLVHRDGFSLASQLKSEELNLPEGKVRVKLDHDGAILDVDEDDVEKANAPSCDRLEDLASLVYLNESSVLHTLRQRYGASLLHTYAGPSLLVLGPRGAPAVYSEKVMHMFKGCRREDMAPHIYAVAQTAYRAMLMSRQD

SEQ ID NO: 21373 - protein, 161 aa, Artificial Sequence
  Synthetic polypeptide
SQRLGRFKIEEEMLALQNERTERIRSLLERQAREIEAFDSESMRLGFSNMVLSNLSPEAFSHSYPGASGWSHNPTGGPGPHWGHPMGGPPQAWGHPMQGGPQPWGHPSGPMQGVPRGSSMGVRNSPQALRRTASGGRTEQGMSRSTSVTSQISNGSHMSYT

SEQ ID NO: 21374 - protein, 38 aa, Artificial Sequence
  Synthetic polypeptide
GGLRLKKRCWLCRMSAQNEYEACWNVKPERLKLLTLKA

SEQ ID NO: 21375 - protein, 84 aa, Artificial Sequence
  Synthetic polypeptide
PIVGPCDHHQRELSNCQRCCPFSTTGKWLIHTKNQPQTEQACRRSPTASPSNVHFTPPRRQHQAGCKTGKYLPESNTLYGSGFN

SEQ ID NO: 21376 - protein, 1443 aa, Artificial Sequence
  Synthetic polypeptide
KGQTGLAPSLHLSPMLDASCPQTLDCKFFTSSLLGLGLALLAPQLADSLLWDLVIIISESFLTVKGAALFLPRGNGSSTPRISHRRNKHAGDLQQHLQAMFILLRPEDNIRLAVRLESTYQNRTRYMVVVSTNGRQDTEESIVLGMDFSSNDSSTCTMGLVLPLWSDTLIHLDGDGGFSVSTDNRVHIFKPVSVQAMWSALQSLHKACEVARAHNYYPGSLFLTWVSYYESHINSDQSSVNEWNAMQDVQSHRPDSPALFTDIPTERERTERLIKTKLREIMMQKDLENITSKEIRTELEMQMVCNLREFKEFIDNEMIVILGQMDSPTQIFEHVFLGSEWNASNLEDLQNRGVRYILNVTREIDNFFPGVFEYHNIRVYDEEATDLLAYWNDTYKFISKAKKHGSKCLVHCKMGVSRSASTVIAYAMKEYGWNLDRAYDYVKERRTVTKPNPSFMRQLEEYQGILLASKQRHNKLWRSHSDSDLSDHHEPICKPGLELNKKDITTSADQIAEVKTMESHPPIPPVFVEHMVPQDANQKGLCTKERMICLEFTSREFHAGQIEDELNLNDINGCSSGCCLNESKFPLDNCHASKALIQPGHVPEMANKFPDLTVEDLETDALKADMNVHLLPMEELTSPLKDPPMSPDPESPSPQPSCQTEISDFSTDRIDFFSALEKFVELSQETRSRSFSHSRMEELGGGRNESCRLSVVEVAPSKVTADDQRSSSLSNTPHASEESSMDEEQSKAISELVSPDIFMQSHSENAISVKEIVTEIESISQGVGQIQLKGDILPNPCHTPKKNSIHELLLERAQTPENKPGHMEQDEDSCTAQPELAKDSGMCNPEGCLTTHSSIADLEEGEPAEGEQELQGSGMHPGAKWYPGSVRRATLEFEERLRQEQEHHGAAPTCTSLSTRKNSKNDSSVADLAPKGKSDEAPPEHSFVLKEPEMSKGKGKYSGSEAGSLSHSEQNATVPAPRVLEFDHLPDPQEGPGSDTGTQQEGVLKDLRTVIPYQESETQAVPLPLPKRVEIIEYTHIVTSPNHTGPGSEIATSEKSGEQGLRKVNMEKSVTVLCTLDENLNRTLDPNQVSLHPQVLPLPHSSSPEHNRPTDHPTSILSSPEDRGSSLSTALETAAPFVSHTTHLLSASLDYLHPQTMVHLEGFTEQSSTTDEPSAEQVSWEESQESPLSSGSEVPYKDSQLSSADLSLISKLGDNTGELQEKMDPLPVACRLPHSSSSENIKSLSHSPGVVKERAKEIESRVVFQAGLTKPSQMRRSASLAKLGYLDLCKDCLPEREPASCESPHLKLLQPFLRTDSGMHAMEDQESLENPGAPHNPEPTKSFVEQLTTTECIVQSKPVERPLVQYAKEFGSSQQYLLPRAGLELTSSEGGLPVLQTQGLQCACPAPGLAVAPRQQHGRTHPLRRLKKANDKKRTTNPFYNTM

SEQ ID NO: 21377 - protein, 7 aa, Artificial Sequence
  Synthetic polypeptide
SSSARAF

SEQ ID NO: 21378 - protein, 132 aa, Artificial Sequence
  Synthetic polypeptide
KGQTGLAPSLHLSPMLDASCPQTLDCKFFTSSLLGLGLALLAPQLADSLLWDLVIIISESFLTVKGAALFLPRGNGSSTPRISHRRNKHAGDLQQHLQAMFILLRPEDNIRLAVRLESTYQNRTRYMVVVST

SEQ ID NO: 21379 - protein, 160 aa, Artificial Sequence
  Synthetic polypeptide
KGQTGLAPSLHLSPMLDASCPQTLDCKFFTSSLLGLGLALLAPQLADSLLWDLVIIISESFLTVKGAALFLPRGNGSSTPRISHRRNKHAGDLQQHLQAMFILLRPEDNIRLAVRLESTYQNRTRYMVVVSTNGRQDTEESIVLGMDFSSNDSSTCTMGL

SEQ ID NO: 21380 - protein, 23 aa, Artificial Sequence
  Synthetic polypeptide
MSLLLGSFPDSTPSDHELSFGRQ

SEQ ID NO: 21381 - protein, 1476 aa, Artificial Sequence
  Synthetic polypeptide
AFAHAVSFTWNTFPSSLYLTISYSSFRSQLKCHFFWEASLTPPPQIMSSHLEDSESAALLCCECEESEIFTDSNEADSGEEECRSQPRSISESFLTVKGAALFLPRGNGSSTPRISHRRNKHAGDLQQHLQAMFILLRPEDNIRLAVRLESTYQNRTRYMVVVSTNGRQDTEESIVLGMDFSSNDSSTCTMGLVLPLWSDTLIHLDGDGGFSVSTDNRVHIFKPVSVQAMWSALQSLHKACEVARAHNYYPGSLFLTWVSYYESHINSDQSSVNEWNAMQDVQSHRPDSPALFTDIPTERERTERLIKTKLREIMMQKDLENITSKEIRTELEMQMVCNLREFKEFIDNEMIVILGQMDSPTQIFEHVFLGSEWNASNLEDLQNRGVRYILNVTREIDNFFPGVFEYHNIRVYDEEATDLLAYWNDTYKFISKAKKHGSKCLVHCKMGVSRSASTVIAYAMKEYGWNLDRAYDYVKERRTVTKPNPSFMRQLEEYQGILLASKQRHNKLWRSHSDSDLSDHHEPICKPGLELNKKDITTSADQIAEVKTMESHPPIPPVFVEHMVPQDANQKGLCTKERMICLEFTSREFHAGQIEDELNLNDINGCSSGCCLNESKFPLDNCHASKALIQPGHVPEMANKFPDLTVEDLETDALKADMNVHLLPMEELTSPLKDPPMSPDPESPSPQPSCQTEISDFSTDRIDFFSALEKFVELSQETRSRSFSHSRMEELGGGRNESCRLSVVEVAPSKVTADDQRSSSLSNTPHASEESSMDEEQSKAISELVSPDIFMQSHSENAISVKEIVTEIESISQGVGQIQLKGDILPNPCHTPKKNSIHELLLERAQTPENKPGHMEQDEDSCTAQPELAKDSGMCNPEGCLTTHSSIADLEEGEPAEGEQELQGSGMHPGAKWYPGSVRRATLEFEERLRQEQEHHGAAPTCTSLSTRKNSKNDSSVADLAPKGKSDEAPPEHSFVLKEPEMSKGKGKYSGSEAGSLSHSEQNATVPAPRVLEFDHLPDPQEGPGSDTGTQQEGVLKDLRTVIPYQESETQAVPLPLPKRVEIIEYTHIVTSPNHTGPGSEIATSEKSGEQGLRKVNMEKSVTVLCTLDENLNRTLDPNQVSLHPQVLPLPHSSSPEHNRPTDHPTSILSSPEDRGSSLSTALETAAPFVSHTTHLLSASLDYLHPQTMVHLEGFTEQSSTTDEPSAEQVSWEESQESPLSSGSEVPYKDSQLSSADLSLISKLGDNTGELQEKMDPLPVACRLPHSSSSENIKSLSHSPGVVKERAKEIESRVVFQAGLTKPSQMRRSASLAKLGYLDLCKDCLPEREPASCESPHLKLLQPFLRTDSGMHAMEDQESLENPGAPHNPEPTKSFVEQLTTTECIVQSKPVERPLVQYAKEFGSSQQYLLPRAGLELTSSEGGLPVLQTQGLQCACPAPGLAVAPRQQHGRTHPLRRLKKANDKKRTTNPFYNTM

SEQ ID NO: 21382 - protein, 23 aa, Artificial Sequence
  Synthetic polypeptide
EYLNWNLALPFTSCLSLNSLRPL

SEQ ID NO: 21383 - protein, 7 aa, Artificial Sequence
  Synthetic polypeptide
ILSDLCE

SEQ ID NO: 21384 - protein, 554 aa, Artificial Sequence
  Synthetic polypeptide
VLVFKGKLLKFGIRVPELESCFAIHQLFVLKFSQTSVSESLQREAAKKQAMKQTKLEIQKALAEDATVYEYDSIYDEMQKKKEENNPKLLLGKDRKPKYIHNLLKAVEIRKKEQEKRMEKKIQREREMEKGEFDDKEAFVTSAYKKKLQERAEEEEREKRAAALEACLDVTKQKDLSGFYRHLLNQAVGEEEVPKCSFREARSGIKEEKSRGFSNEVSSKNRIPQEKCILQTDVKVEENPDADSDFDAKSSADDEIEETRVNCRREKVIETPENDFKHHRSQNHSRSPSEERGHSTRHHTKGSRTSRGHEKREDQHQQKQSRDQENHYTDRDYRKERDSHRHREASHRDSHWKRHEQEDKPRARDQRERSDRVWKREKDREKYSQREQERDRQQNDQNRPSEKGEKEEKSKAKEEHMKVRKERYENNDKYRDREKREVGVQSSERNQDRKESSPNSRAKDKFLDQERSNKMRNMAKDKERNQEKPSNSESSLGAKHRLTEEGQEKGKEQERPPEAVSKFAKRNNEETVMSARDRYLARQMARVNAKTYIEKEDD

SEQ ID NO: 21385 - protein, 6 aa, Artificial Sequence
  Synthetic polypeptide
ILSDLC

SEQ ID NO: 21386 - protein, 37 aa, Artificial Sequence
  Synthetic polypeptide
VLVFKGKLLKFGIRVPELESCFAIHQLFVLKFSQTSV

SEQ ID NO: 21387 - protein, 205 aa, Artificial Sequence
  Synthetic polypeptide
GRVRWLMPVIPAHWEAVICLVNDPRPQHKYNKLYTVEYLSNMVGGRKTLYNNQPIDFLKKMVAASIKDGEAVWFGCDVGKHFNSKLGLSDMNLYDHELVFGVSLKNMNKAERLTFGESLMTHAMTFTAVSEKDDQDGAFTKWRVENSWGEDHGHKGYLCMTDEWFSEYVYEVVVDRKHVPEEVLAVLEQEPIILPAWDPMGALAE

SEQ ID NO: 21388 - protein, 21 aa, Artificial Sequence
  Synthetic polypeptide
PGAVAHACNPSTLGGCDLFSE

SEQ ID NO: 21389 - protein, 157 aa, Artificial Sequence
  Synthetic polypeptide
GRVRWLMPVIPAHWEAVICLVNDPRPQHKYNKLYTVEYLSNMVGGRKTLYNNQPIDFLKKMVAASIKDGEAVWFGCDVGKHFNSKLGLSDMNLYDHELVFGVSLKNMNKAERLTFGESLMTHAMTFTAVSEKDDQDGAFTKWRVENSWGEDHGHKGE

SEQ ID NO: 21390 - protein, 130 aa, Artificial Sequence
  Synthetic polypeptide
QAYQILCFALLHFTDTIFYKLKVGGNPVSRKSCSAVFLTAYAHFVSLCYISLRSSDRRDNKHCYGNKRKYDFTERNVEVNSQQNEHFGQSFSCCKQPDPEDQPEEAAGLAHPRGCYWDLYHPVAAVCVPL

SEQ ID NO: 21391 - protein, 91 aa, Artificial Sequence
  Synthetic polypeptide
QHMLTSCLCVTFRSDRLIEETISIAMATKENMTSQRGMLKSIHSKMNTLANRFPAVNSLIQRINLRKRRDSLILGGVIGICTILLLLYAFH

SEQ ID NO: 21392 - protein, 54 aa, Artificial Sequence
  Synthetic polypeptide
GLPNFVFCFIALYRYYFLQTEGWWQPCVEEVLQCRFSNSICSLRVSVLHFAQIV

SEQ ID NO: 21393 - protein, 42 aa, Artificial Sequence
  Synthetic polypeptide
GPAWWLTPMILTLWEAEAGGLLEARNSSQPEQHTLLWQQKKI

SEQ ID NO: 21394 - protein, 91 aa, Artificial Sequence
  Synthetic polypeptide
HFGRLRREDCLRPETRVSQSNIHCYGNKRKYDFTERNVEVNSQQNEHFGQSFSCCKQPDPEDQPEEAAGLAHPRGCYWDLYHPVAAVCVPL

SEQ ID NO: 21395 - protein, 79 aa, Artificial Sequence
  Synthetic polypeptide
GQKLESARATYIAMATKENMTSQRGMLKSIHSKMNTLANRFPAVNSLIQRINLRKRRDSLILGGVIGICTILLLLYAFH

SEQ ID NO: 21396 - protein, 54 aa, Artificial Sequence
  Synthetic polypeptide
SGFPRRPGRDPRTDRGGISVHNIPGQGDHVSRFHKAAIYRRRRPAAPEKETHWK

SEQ ID NO: 21397 - protein, 427 aa, Artificial Sequence
  Synthetic polypeptide
MGFRGGLDVTHGQTGVESVYTTFRDREIMFHVSTKLPFTDGDAQQLQRKRHIGNDIVAIIFQEENTPFVPDMIASNFLHAYIVVQVETPGTETPSYKVSVTAREDVPTFGPPLPSPPVFQKGPEFREFLLTKLTNAENACCKSDKFAKLEDRTRAALLDNLHDELHAHTQAMLGLGPEEDKFENGGHGGFLESFKRAIRVRSHSMETMVGGQKKSHSGGIPGSLSGGISHNSMEVTKTTFSPPVVAATVKNQSRSPIKRRSGLFPRLHTGSEGQGDSRARCDSTSSTPKTPDGGHSSQEIKSETSSNPSSPEICPNKEKPFMKLKENGRAISRSSSSTSSVSSTAGEGEAMEEGDSGGSQPSTTSPFKQEVFVYSPSPSSESPSLGAAATPIIMSRSPTDAKSRNSPRSNLKFRFDKLSHASSGAGH

SEQ ID NO: 21398 - protein, 8 aa, Artificial Sequence
  Synthetic polypeptide
WVSEEAWT

SEQ ID NO: 21399 - protein, 74 aa, Artificial Sequence
  Synthetic polypeptide
HADFGLKILFFYKESGLLEEITTSEQRNEVLLCCPNWSQTPGLKVFAPWTPKVLGLQSLAVTRLDCSGTISTHC

SEQ ID NO: 21400 - protein, 47 aa, Artificial Sequence
  Synthetic polypeptide
KYYSSIRNQDSLKKSQLQSRGTRSCYVVQTGLKLLGSKSSHLGLPKC

SEQ ID NO: 21401 - protein, 55 aa, Artificial Sequence
  Synthetic polypeptide
RNHNFRAEERGLAMLSKLVSNSWAQSLRTLDSQSVRVTESRCHQAGLQWHDLNSL

SEQ ID NO: 21402 - protein, 113 aa, Artificial Sequence
  Synthetic polypeptide
TTGTWHIVHLLGQVRLREALHRRRAAAPGPGGGLLQPDGHLCPQWHVAQLQGRGALRATPQAHPLPQYHHRVPQVPQGRLHHHPGLQLPQDAEEVSVQRGARSRGAPGQRRPL

SEQ ID NO: 21403 - protein, 96 aa, Artificial Sequence
  Synthetic polypeptide
VKYLDDGYLAHSTPPWSSTTPRGTSSTTCSCPWAWRWPPAARRSPVSPMARGATTRPRCASSHATGPPASSVPPSCTPSTPRPSTPPPWITTAARR

SEQ ID NO: 21404 - protein, 88 aa, Artificial Sequence
  Synthetic polypeptide
IGSRTPPWSSTTPRGTSSTTCSCPWAWRWPPAARRSPVSPMARGATTRPRCASSHATGPPASSVPPSCTPSTPRPSTPPPWITTAARR

SEQ ID NO: 21405 - protein, 146 aa, Artificial Sequence
  Synthetic polypeptide
LWKPAPLYLNPSSSTQWRCDLHLCTSVSSLRVVGEIKLDPVHLLGQVRLREALHRRRAAAPGPGGGLLQPDGHLCPQWHVAQLQGRGALRATPQAHPLPQYHHRVPQVPQGRLHHHPGLQLPQDAEEVSVQRGARSRGAPGQRRPL

SEQ ID NO: 21406 - protein, 140 aa, Artificial Sequence
  Synthetic polypeptide
IPAPVLSGAVTFTSAPRFLLSGSLGRLNWIPYTSLVKYDSERHFIDDVQLPLGLAVASCSQTVTCVPNGTWRNYKAEVRFEPRHRPTRFLSTTIVYPKYPKAVYTTTLDYNCRKTLRRFLSSVELEAAELPGSDDLSDEC

SEQ ID NO: 21407 - protein, 2811 aa, Artificial Sequence
  Synthetic polypeptide
SEHFGRPRRADHKLPIKTGQQNTHTKVSTEHNKECLINISKYKFSLVISGLTTILKNVNNMRIFGEAAEKNLYLSQLIILDTLEKCLAGQPKDTMRLDETMLVKQLLPEICHFLHTCREGNQHAAELRNSASGVLFSLSCNNFNAVFSRISTRLQELTVCSEDNVDVHDIELLQYINVDCAKLKRLLKETAFKFKALKKVAQLAVINSLEKAFWNWVENYPDEFTKLYQIPQTDMAECAEKLFDLVDGFAESTKRKAAVWPLQIILLILCPEIIQDISKDVVDENNMNKKLFLDSLRKALAGHGGSRQLTESAAIACVKLCKASTYINWEDNSVIFLLVQSMVVDLKNLLFNPSKPFSRGSQPADVDLMIDCLVSCFRISPHNNQHFKICLAQNSPSTFHYVLVNSLHRIITNSALDWWPKIDAVYCHSVELRNMFGETLHKAVQGCGAHPAIRMAPSLTFKEKVTSLKFKEKPTDLETRSYKYLLLSMVKLIHADPKLLLCNPRKQGPETQGSTAELITGLVQLVPQSHMPEIAQEAMEALLVLHQLDSIDLWNPDAPVETFWEISSQMLFYICKKLTSHQMLSSTEILKWLREILICRNKFLLKNKQADRSSCHFLLFYGVGCDIPSSGNTSQMSMDHEELLRTPGASLRKGKGNSSMDSAAGCSGTPPICRQAQTKLEVALYMFLWNPDTEAVLVAMSCFRHLCEEADIRCGVDEVSVHNLLPNYNTFMEFASVSNMMSTGRAALQKRVMALLRRIEHPTAGNTEAWEDTHAKWEQATKLILNYPKAKMEDGQAAESLHKTIVKRRMSHVSGGGSIDLSDTDSLQEWINMTGFLCALGGVCLQQRSNSGLATYSPPMGPVSERKGSMISVMSSEGNADTPVSKFMDRLLSLMVCNHEKVGLQIRTNVKDLVGLELSPALYPMLFNKLKNTISKFFDSQGQVLLTDTNTQFVEQTIAIMKNLLDNHTEGSSEHLGQASIETMMLNLVRYVRVLGNMVHAIQIKTKLCQLVEVMMARRDDLSFCQEMKFRNKMVEYLTDWVMGTSNQAADDDVKCLTRDLDQASMEAVVSLLAGLPLQPEEGDGVELMEAKSQLFLKYFTLFMNLLNDCSEVEDESAQTGGRKRGMSRRLASLRHCTVLAMSNLLNANVDSGLMHSIGLGYHKDLQTRATFMEVLTKILQQGTEFDTLAETVLADRFERLVELVTMMGDQGELPIAMALANVVPCSQWDELARVLVTLFDSRHLLYQLLWNMFSKEVELADSMQTLFRGNSLASKIMTFCFKVYGATYLQKLLDPLLRIVITSSDWQHVSFEVDPTRLEPSESLEENQRNLLQMTEKFFHAIISSSSEFPPQLRSVCHCLYQVVSQRFPQNSIGAVGSAMFLRFINPAIVSPYEAGILDKKPPPRIERGLKLMSKILQSIANHVLFTKEEHMRPFNDFVKSNFDAARRFFLDIASDCPTSDAVNHSLSFISDGNVLALHRLLWNNQEKIGQYLSSNRDHKAVGRRPFDKMATLLAYLGPPEHKPVADTHWSSLNLTSSKFEEFMTRHQVHEKEEFKALKTLSIFYQAGTSKAGNPIFYYVARRFKTGQINGDLLIYHVLLTLKPYYAKPYEIVVDLTHTGPSNRFKTDFLSKWFVVFPGFAYDNVSAVYIYNCNSWVREYTKYHERLLTGLKGSKRLVFIDCPGKLAEHIEHEQQKLPAATLALEEDLKVFHNALKLAHKDTKVSIKVGSTAVQVTSAERTKVLGQSVFLNDIYYASEIEEICLVDENQFTLTIANQGTPLTFMHQECEAIVQSIIHIRTRWELSQPDSIPQHTKIRPKDVPGTLLNIALLNLGSSDPSLRSAAYNLLCALTCTFNLKIEGQLLETSGLCIPANNTLFIVSISKTLAANEPHLTLEFLEECISGFSKSSIELKHLCLEYMTPWLSNLVRFCKHNDDAKRQRVTAILDKLITMTINEKQMYPSIQAKIWGSLGQITDLLDVVLDSFIKTSATGGLGSIKAEVMADTAVALASGNVKLVSSKVIGRMCKIIDKTCLSPTPTLEQHLMWDDIAILARYMLMLSFNNSLDVAAHLPYLFHVVTFLVATGPLSLRASTHGLVINIIHSLCTCSQLHFSEETKQVLRLSLTEFSLPKFYLLFGISKVKSAAVIAFRSSYRDRSFSPGSYERETFALTSLETVTEALLEIMEACMRDIPTCKWLDQWTELAQRFAFQYNPSLQPRALVVFGCISKRVSHGQIKQIIRILSKALESCLKGPDTYNSQVLIEATVIALTKLQPLLNKDSPLHKALFWVAVAVLQLDEVNLYSAGTALLEQNLHTLDSLRIFNDKSPEEVFMAIRNPLEWHCKQMDHFVGLNFNSNFNFALVGHLLKGYRHPSPAIVARTVRILHTLLTLVNKHRNCDKFEVNTQSVAYLAALLTVSEEVRSRCSLKHRKSLLLTDISMENVPMDTYPIHHGDPSYRTLKETQPWSSPKGSEGYLAATYPTVGQTSPRARKSMSLDMGQPSQANTKKLLGTRKSFDHLISDTKAPKRQEMESGITTPPKMRRVAETDYEMETQRISSSQQHPHLRKVSVSESNVLLDEEVLTDPKIQALLLTVLATLVKYTTDEFDQRILYEYLAEASVVFPKVFPVVHNLLDSKINTLLSLCQDPNLLNPIHGIVQSVVYHEESPPQYQTSYLQSFGFNGLWRFAGPFSKQTQIPDYAELIVKFLDALIDTYLPGIDEETSEESLLTPTSPYPPALQSQLSITANLNLSNSMTSLATSQHSPGIDKENVELSPTTGHCNSGRTRHGSASQVQKQRSAGSFKRNSIKKIV

SEQ ID NO: 21408 - protein, 24 aa, Artificial Sequence
  Synthetic polypeptide
ASAVAHACNPNTLGGRGGRITSFQ

SEQ ID NO: 21409 - protein, 37 aa, Artificial Sequence
  Synthetic polypeptide
PARWLTPVIRTLWEAEAGGSQASNKNRTAEHTYQSQY

SEQ ID NO: 21410 - protein, 2832 aa, Artificial Sequence
  Synthetic polypeptide
SEHFGRPRRADHKLPIKTGQQNTHTKVSTEHNKECLINISKYKFSLVISGLTTILKNVNNMRIFGEAAEKNLYLSQLIILDTLEKCLAGQPKDTMRLDETMLVKQLLPEICHFLHTCREGNQHAAELRNSASGVLFSLSCNNFNAVFSRISTRLQELTVCSEDNVDVHDIELLQYINVDCAKLKRLLKETAFKFKALKKVAQLAVINSLEKAFWNWVENYPDEFTKLYQIPQTDMAECAEKLFDLVDGFAESTKRKAAVWPLQIILLILCPEIIQDISKDVVDENNMNKKLFLDSLRKALAGHGGSRQLTESAAIACVKLCKASTYINWEDNSVIFLLVQSMVVDLKNLLFNPSKPFSRGSQPADVDLMIDCLVSCFRISPHNNQHFKICLAQNSPSTFHYVLVNSLHRIITNSALDWWPKIDAVYCHSVELRNMFGETLHKAVQGCGAHPAIRMAPSLTFKEKVTSLKFKEKPTDLETRSYKYLLLSMVKLIHADPKLLLCNPRKQGPETQGSTAELITGLVQLVPQSHMPEIAQEAMEALLVLHQLDSIDLWNPDAPVETFWEISSQMLFYICKKLTSHQMLSSTEILKWLREILICRNKFLLKNKQADRSSCHFLLFYGVGCDIPSSGNTSQMSMDHEELLRTPGASLRKGKGNSSMDSAAGCSGTPPICRQAQTKLEVALYMFLWNPDTEAVLVAMSCFRHLCEEADIRCGVDEVSVHNLLPNYNTFMEFASVSNMMSTGRAALQKRVMALLRRIEHPTAGNTEAWEDTHAKWEQATKLILNYPKAKMEDGQAAESLHKTIVKRRMSHVSGGGSIDLSDTDSLQEWINMTGFLCALGGVCLQQRSNSGLATYSPPMGPVSERKGSMISVMSSEGNADTPVSKFMDRLLSLMVCNHEKVGLQIRTNVKDLVGLELSPALYPMLFNKLKNTISKFFDSQGQVLLTDTNTQFVEQTIAIMKNLLDNHTEGSSEHLGQASIETMMLNLVRYVRVLGNMVHAIQIKTKLCQLVEVMMARRDDLSFCQEMKFRNKMVEYLTDWVMGTSNQAADDDVKCLTRDLDQASMEAVVSLLAGLPLQPEEGDGVELMEAKSQLFLKYFTLFMNLLNDCSEVEDESAQTGGRKRGMSRRLASLRHCTVLAMSNLLNANVDSGLMHSIGLGYHKDLQTRATFMEVLTKILQQGTEFDTLAETVLADRFERLVELVTMMGDQGELPIAMALANVVPCSQWDELARVLVTLFDSRHLLYQLLWNMFSKEVELADSMQTLFRGNSLASKIMTFCFKVYGATYLQKLLDPLLRIVITSSDWQHVSFEVDPTRLEPSESLEENQRNLLQMTEKFFHAIISSSSEFPPQLRSVCHCLYQATCHSLLNKATVKEKKENKKSVVSQRFPQNSIGAVGSAMFLRFINPAIVSPYEAGILDKKPPPRIERGLKLMSKILQSIANHVLFTKEEHMRPFNDFVKSNFDAARRFFLDIASDCPTSDAVNHSLSFISDGNVLALHRLLWNNQEKIGQYLSSNRDHKAVGRRPFDKMATLLAYLGPPEHKPVADTHWSSLNLTSSKFEEFMTRHQVHEKEEFKALKTLSIFYQAGTSKAGNPIFYYVARRFKTGQINGDLLIYHVLLTLKPYYAKPYEIVVDLTHTGPSNRFKTDFLSKWFVVFPGFAYDNVSAVYIYNCNSWVREYTKYHERLLTGLKGSKRLVFIDCPGKLAEHIEHEQQKLPAATLALEEDLKVFHNALKLAHKDTKVSIKVGSTAVQVTSAERTKVLGQSVFLNDIYYASEIEEICLVDENQFTLTIANQGTPLTFMHQECEAIVQSIIHIRTRWELSQPDSIPQHTKIRPKDVPGTLLNIALLNLGSSDPSLRSAAYNLLCALTCTFNLKIEGQLLETSGLCIPANNTLFIVSISKTLAANEPHLTLEFLEECISGFSKSSIELKHLCLEYMTPWLSNLVRFCKHNDDAKRQRVTAILDKLITMTINEKQMYPSIQAKIWGSLGQITDLLDVVLDSFIKTSATGGLGSIKAEVMADTAVALASGNVKLVSSKVIGRMCKIIDKTCLSPTPTLEQHLMWDDIAILARYMLMLSFNNSLDVAAHLPYLFHVVTFLVATGPLSLRASTHGLVINIIHSLCTCSQLHFSEETKQVLRLSLTEFSLPKFYLLFGISKVKSAAVIAFRSSYRDRSFSPGSYERETFALTSLETVTEALLEIMEACMRDIPTCKWLDQWTELAQRFAFQYNPSLQPRALVVFGCISKRVSHGQIKQIIRILSKALESCLKGPDTYNSQVLIEATVIALTKLQPLLNKDSPLHKALFWVAVAVLQLDEVNLYSAGTALLEQNLHTLDSLRIFNDKSPEEVFMAIRNPLEWHCKQMDHFVGLNFNSNFNFALVGHLLKGYRHPSPAIVARTVRILHTLLTLVNKHRNCDKFEVNTQSVAYLAALLTVSEEVRSRCSLKHRKSLLLTDISMENVPMDTYPIHHGDPSYRTLKETQPWSSPKGSEGYLAATYPTVGQTSPRARKSMSLDMGQPSQANTKKLLGTRKSFDHLISDTKAPKRQEMESGITTPPKMRRVAETDYEMETQRISSSQQHPHLRKVSVSESNVLLDEEVLTDPKIQALLLTVLATLVKYTTDEFDQRILYEYLAEASVVFPKVFPVVHNLLDSKINTLLSLCQDPNLLNPIHGIVQSVVYHEESPPQYQTSYLQSFGFNGLWRFAGPFSKQTQIPDYAELIVKFLDALIDTYLPGIDEETSEESLLTPTSPYPPALQSQLSITANLNLSNSMTSLATSQHSPGIDKENVELSPTTGHCNSGRTRHGSASQVQKQRSAGSFKRNSIKKIV

SEQ ID NO: 21411 - protein, 586 aa, Artificial Sequence
  Synthetic polypeptide
SEHFGRPRRADHKLPIKTGQQNTHTKVSTEHNKECLINISKYKFSLVISGLTTILKNVNNMRIFGEAAEKNLYLSQLIILDTLEKCLAGQPKDTMRLDETMLVKQLLPEICHFLHTCREGNQHAAELRNSASGVLFSLSCNNFNAVFSRISTRLQELTVCSEDNVDVHDIELLQYINVDCAKLKRLLKETAFKFKALKKVAQLAVINSLEKAFWNWVENYPDEFTKLYQIPQTDMAECAEKLFDLVDGFAESTKRKAAVWPLQIILLILCPEIIQDISKDVVDENNMNKKLFLDSLRKALAGHGGSRQLTESAAIACVKLCKASTYINWEDNSVIFLLVQSMVVDLKNLLFNPSKPFSRGSQPADVDLMIDCLVSCFRISPHNNQHFKICLAQNSPSTFHYVLVNSLHRIITNSALDWWPKIDAVYCHSVELRNMFGETLHKAVQGCGAHPAIRMAPSLTFKEKVTSLKFKEKPTDLETRSYKYLLLSMVKLIHADPKLLLCNPRKQGPETQGSTAELITGLVQLVPQSHMPEIAQEAMEALLVLHQLDSIDLWNPDAPVETFWEIRYMYFYFLNSTFKFYFVFLS

SEQ ID NO: 21412 - protein, 1615 aa, Artificial Sequence
  Synthetic polypeptide
SEHFGRPRRADHKLPIKTGQQNTHTKVSTEHNKECLINISKYKFSLVISGLTTILKNVNNMRIFGEAAEKNLYLSQLIILDTLEKCLAGQPKDTMRLDETMLVKQLLPEICHFLHTCREGNQHAAELRNSASGVLFSLSCNNFNAVFSRISTRLQELTVCSEDNVDVHDIELLQYINVDCAKLKRLLKETAFKFKALKKVAQLAVINSLEKAFWNWVENYPDEFTKLYQIPQTDMAECAEKLFDLVDGFAESTKRKAAVWPLQIILLILCPEIIQDISKDVVDENNMNKKLFLDSLRKALAGHGGSRQLTESAAIACVKLCKASTYINWEDNSVIFLLVQSMVVDLKNLLFNPSKPFSRGSQPADVDLMIDCLVSCFRISPHNNQHFKICLAQNSPSTFHYVLVNSLHRIITNSALDWWPKIDAVYCHSVELRNMFGETLHKAVQGCGAHPAIRMAPSLTFKEKVTSLKFKEKPTDLETRSYKYLLLSMVKLIHADPKLLLCNPRKQGPETQGSTAELITGLVQLVPQSHMPEIAQEAMEALLVLHQLDSIDLWNPDAPVETFWEISSQMLFYICKKLTSHQMLSSTEILKWLREILICRNKFLLKNKQADRSSCHFLLFYGVGCDIPSSGNTSQMSMDHEELLRTPGASLRKGKGNSSMDSAAGCSGTPPICRQAQTKLEVALYMFLWNPDTEAVLVAMSCFRHLCEEADIRCGVDEVSVHNLLPNYNTFMEFASVSNMMSTGRAALQKRVMALLRRIEHPTAGNTEAWEDTHAKWEQATKLILNYPKAKMEDGQAAESLHKTIVKRRMSHVSGGGSIDLSDTDSLQEWINMTGFLCALGGVCLQQRSNSGLATYSPPMGPVSERKGSMISVMSSEGNADTPVSKFMDRLLSLMVCNHEKVGLQIRTNVKDLVGLELSPALYPMLFNKLKNTISKFFDSQGQVLLTDTNTQFVEQTIAIMKNLLDNHTEGSSEHLGQASIETMMLNLVRYVRVLGNMVHAIQIKTKLCQLVEVMMARRDDLSFCQEMKFRNKMVEYLTDWVMGTSNQAADDDVKCLTRDLDQASMEAVVSLLAGLPLQPEEGDGVELMEAKSQLFLKYFTLFMNLLNDCSEVEDESAQTGGRKRGMSRRLASLRHCTVLAMSNLLNANVDSGLMHSIGLGYHKDLQTRATFMEVLTKILQQGTEFDTLAETVLADRFERLVELVTMMGDQGELPIAMALANVVPCSQWDELARVLVTLFDSRHLLYQLLWNMFSKEVELADSMQTLFRGNSLASKIMTFCFKVYGATYLQKLLDPLLRIVITSSDWQHVSFEVDPTRLEPSESLEENQRNLLQMTEKFFHAIISSSSEFPPQLRSVCHCLYQVVSQRFPQNSIGAVGSAMFLRFINPAIVSPYEAGILDKKPPPRIERGLKLMSKILQSIANHVLFTKEEHMRPFNDFVKSNFDAARRFFLDIASDCPTSDAVNHSLSFISDGNVLALHRLLWNNQEKIGQYLSSNRDHKAVGRRPFDKMATLLAYLGPPEHKPVADTHWSSLNLTSSKFEEFMTRHQVHEKEEFKALKTLSIFYQAGTSKAGNPIFYYVARRIYYPNIVKGITKHLPRNSYPTLISGFSFPLL

SEQ ID NO: 21413 - protein, 615 aa, Artificial Sequence
  Synthetic polypeptide
SRARWLTPIIPATWEAEAGESLELGRRSLSAHLQLTFTGFFHKNDKPSPNSENEQNSVTLEVLLVKVCHKKRKDVSCPIRQVPTGKKQVPLNPDLNQTKPGNFPSLAVSSNEFEPSNSHMVKSYSLLFRVTRPGRREFNGMINGETNENIDVNEELPARRKRNREDGEKTFVAQMTVFDKNRRLQLLDGEYEVAMQEMEECPISKKRATWETILDGKRLPPFETFSQGPTLQFTLRWTGETNDKSTAPIAKPLATRNSESLHQENKPGSVKPTQTIAVKESLTTDLQTRKEKDTPNENRQKLRIFYQFLYNNNTRQQTEARDDLHCPWCTLNCRKLYSLLKHLKLCHSRFIFNYVYHPKGARIDVSINECYDGSYAGNPQDIHRQPGFAFSRNGPVKRTPITHILVCRPKRTKASMSEFLESEDGEVEQQRTYSSGHNRLYFHSDTCLPLRPQEMEVDSEDEKDPEWLREKTITQIEEFSDVNEGEKEVMKLWNLHVMKHGFIADNQMNHACMLFVENYGQKIIKKNLCRNFMLHLVSMHDFNLISIMSIDKAVTKLREMQQKLEKGESASPANEEITEEQNGTANGFSEINSKEKALETDSVSGVSKQSKKQKL

SEQ ID NO: 21414 - protein, 55 aa, Artificial Sequence
  Synthetic polypeptide
SQLLGRLRQENRLNSGGGACQLICSLRLLVSSTKMISHHQTQKMNKILLPWKSCL

SEQ ID NO: 21415 - protein, 21 aa, Artificial Sequence
  Synthetic polypeptide
TREAELVSSFAAYVYWFLPQK

SEQ ID NO: 21416 - protein, 10 aa, Artificial Sequence
  Synthetic polypeptide
NRPGTKEALS

SEQ ID NO: 21417 - protein, 647 aa, Artificial Sequence
  Synthetic polypeptide
ICTFFVLSLGLEKNHHEGRGFVFLLAVSPVARTDLAQKRHSARVGKTSLIMSLVSEEFPEEVPPRAEEITIPADVTPERVPTHIVDYSEAEQSDEQLHQEISQANVICIVYAVNNKHSIDKVTSRWIPLINERTDKDSRLPLILVGNKSDLVEYSSMETILPIMNQYTEIETCVECSAKNLKNISELFYYAQKAVLHPTGPLYCPEEKEMKPACIKALTRIFKISDQDNDGTLNDAELNFFQRICFNTPLAPQALEDVKNVVRKHISDGVADSGLTLKGFLFLHTLFIQRGRHETTWTVLRRFGYDDDLDLTPEYLFPLLKIPPDCTTELNHHAYLFLQSTFDKHDLDRDCALSPDELKDLFKVFPYIPWGPDVNNTVCTNERGWITYQGFLSQWTLTTYLDVQRCLEYLGYLGYSILTEQESQASAVTVTRDKKIDLQKKQTQRNVFRCNVIGVKNCGKSGVLQALLGRNLMRQKKIREDHKSYYAINTVYVYGQEKYLLLHDISESEFLTEAEIICDVVCLVYDVSNPKSFEYCARIFKQHFMDSRIPCLIVAAKSDLHEVKQEYSISPTDFCRKHKMPPPQAFTCNTADAPSKDIFVKLTTMAMYPHVTQADLKSSTFWLRASFGATVFAVLGFAMYKALLKQR

SEQ ID NO: 21418 - protein, 37 aa, Artificial Sequence
  Synthetic polypeptide
KRIIMKAGDLSSFLLYPQWLEQTWHKRGTQLELGRHH

SEQ ID NO: 21419 - protein, 720 aa, Artificial Sequence
  Synthetic polypeptide
ICTFFVLSLGLEKNHHEGRGFVFLLAVSPVARTDLAQKRHSARVGKTSLIMSLVSEEFPEEVPPRAEEITIPADVTPERVPTHIVDYSEAEQSDEQLHQEISQANVICIVYAVNNKHSIDKVTSRWIPLINERTDKDSRLPLILVGNKSDLVEYSSMETILPIMNQYTEIETCVECSAKNLKNISELFYYAQKAVLHPTGPLYCPEEKEMKPACIKALTRIFKISDQDNDGTLNDAELNFFQRICFNTPLAPQALEDVKNVVRKHISDGVADSGLTLKGFLFLHTLFIQRGRHETTWTVLRRFGYDDDLDLTPEYLFPLLKIPPDCTTELNHHAYLFLQSTFDKHDLDRDCALSPDELKDLFKVFPYIPWGPDVNNTVCTNERGWITYQGFLSQWTLTTYLDVQRCLEYLGYLGYSILTEQESQASAVTVTRDKKIDLQKKQTQRNVFRCNVIGVKNCGKSGVLQALLGRNLMRQKKIREDHKSYYAINTVYVYGQEKYLLLHDISESEFLTEAEIICDVVCLVYDVSNPKSFEYCARIFKQHFMDSRIPCLIVAAKSDLHEVKQEYSISPTDFCRKHKMPPPQAFTCNTADAPSKDIFVKLTTMAMYPEDHYRDRLSRDMGHTDRIENLRKIWVFLKTAFHARLRCMCTCNRCTFCICQNFLNSDLLQSVKNKIFTAVLNRHVTQADLKSSTFWLRASFGATVFAVLGFAMYKALLKQR

SEQ ID NO: 21420 - protein, 688 aa, Artificial Sequence
  Synthetic polypeptide
ICTFFVLSLGLEKNHHEGRGFVFLLAVSPVARTDLAQKRHSARVGKTSLIMSLVSEEFPEEVPPRAEEITIPADVTPERVPTHIVDYSEAEQSDEQLHQEISQANVICIVYAVNNKHSIDKVTSRWIPLINERTDKDSRLPLILVGNKSDLVEYSSMETILPIMNQYTEIETCVECSAKNLKNISELFYYAQKAVLHPTGPLYCPEEKEMKPACIKALTRIFKISDQDNDGTLNDAELNFFQRICFNTPLAPQALEDVKNVVRKHISDGVADSGLTLKGFLFLHTLFIQRGRHETTWTVLRRFGYDDDLDLTPEYLFPLLKIPPDCTTELNHHAYLFLQSTFDKHDLDRDCALSPDELKDLFKVFPYIPWGPDVNNTVCTNERGWITYQGFLSQWTLTTYLDVQRCLEYLGYLGYSILTEQESQASAVTVTRDKKIDLQKKQTQRNVFRCNVIGVKNCGKSGVLQALLGRNLMRQKKIREDHKSYYAINTVYVYGQEKYLLLHDISESEFLTEAEIICDVVCLVYDVSNPKSFEYCARIFKQHFMDSRIPCLIVAAKSDLHEVKQEYSISPTDFCRKHKMPPPQAFTCNTADAPSKDIFVKLTTMAMYPHARLRCMCTCNRCTFCICQNFLNSDLLQSVKNKIFTAVLNRHVTQADLKSSTFWLRASFGATVFAVLGFAMYKALLKQR

SEQ ID NO: 21421 - protein, 654 aa, Artificial Sequence
  Synthetic polypeptide
ICTFFVLSLGLEKNHHEGRGFVFLLAVSPVARTDLAQKRHSARVGKTSLIMSLVSEEFPEEVPPRAEEITIPADVTPERVPTHIVDYSEAEQSDEQLHQEISQANVICIVYAVNNKHSIDKVTSRWIPLINERTDKDSRLPLILVGNKSDLVEYSSMETILPIMNQYTEIETCVECSAKNLKNISELFYYAQKAVLHPTGPLYCPEEKEMKPACIKALTRIFKISDQDNDGTLNDAELNFFQRICFNTPLAPQALEDVKNVVRKHISDGVADSGLTLKGFLFLHTLFIQRGRHETTWTVLRRFGYDDDLDLTPEYLFPLLKIPPDCTTELNHHAYLFLQSTFDKHDLDRDCALSPDELKDLFKVFPYIPWGPDVNNTVCTNERGWITYQGFLSQWTLTTYLDVQRCLEYLGYLGYSILTEQESQASAVTVTRDKKIDLQKKQTQRNVFRCNVIGVKNCGKSGVLQALLGRNLMRQKKIREDHKSYYAINTVYVYGQEKYLLLHDISESEFLTEAEIICDVVCLVYDVSNPKSFEYCARIFKQHFMDSRIPCLIVAAKSDLHEVKQEYSISPTDFCRKHKMPPPQAFTCNTADAPSKDIFVKLTTMAMYPHARLRCMCTCNRCTFCICQNFLNSDLLQSVKNKIFTAVLNRIISA

SEQ ID NO: 21422 - protein, 609 aa, Artificial Sequence
  Synthetic polypeptide
ICTFFVLSLGLEKNHHEGRGFVFLLAVSPVARTDLAQKRHSARVGKTSLIMSLVSEEFPEEVPPRAEEITIPADVTPERVPTHIVDYSEAEQSDEQLHQEISQANVICIVYAVNNKHSIDKVTSRWIPLINERTDKDSRLPLILVGNKSDLVEYSSMETILPIMNQYTEIETCVECSAKNLKNISELFYYAQKAVLHPTGPLYCPEEKEMKPACIKALTRIFKISDQDNDGTLNDAELNFFQRICFNTPLAPQALEDVKNVVRKHISDGVADSGLTLKGFLFLHTLFIQRGRHETTWTVLRRFGYDDDLDLTPEYLFPLLKIPPDCTTELNHHAYLFLQSTFDKHDLDRDCALSPDELKDLFKVFPYIPWGPDVNNTVCTNERGWITYQGFLSQWTLTTYLDVQRCLEYLGYLGYSILTEQESQASAVTVTRDKKIDLQKKQTQRNVFRCNVIGVKNCGKSGVLQALLGRNLMRQKKIREDHKSYYAINTVYVYGQEKYLLLHDISESEFLTEAEIICDVVCLVYDVSNPKSFEYCARIFKQHFMDSRIPCLIVAAKSDLHEVKQEYSISPTDFCRKHKMPPPQAFTCNTADAPSKDIFVKLTTMAMYP

SEQ ID NO: 21423 - protein, 80 aa, Artificial Sequence
  Synthetic polypeptide
ICTFFVLSLGLEKNHHEGRGFVFLLAVSPVARTDLAQKRHSARVGKTSLIMSLVSEEFPEEIVVDLNTSSFAEYLQPSTK

SEQ ID NO: 21424 - protein, 679 aa, Artificial Sequence
  Synthetic polypeptide
ICTFFVLSLGLEKNHHEGRGFVFLLAVSPVARTDLAQKRHSARVGKTSLIMSLVSEEFPEEVPPRAEEITIPADVTPERVPTHIVDYSEAEQSDEQLHQEISQANVICIVYAVNNKHSIDKVTSRWIPLINERTDKDSRLPLILVGNKSDLVEYSSMETILPIMNQYTEIETCVECSAKNLKNISELFYYAQKAVLHPTGPLYCPEEKEMKPACIKALTRIFKISDQDNDGTLNDAELNFFQRICFNTPLAPQALEDVKNVVRKHISDGVADSGLTLKGFLFLHTLFIQRGRHETTWTVLRRFGYDDDLDLTPEYLFPLLKIPPDCTTELNHHAYLFLQSTFDKHDLDRDCALSPDELKDLFKVFPYIPWGPDVNNTVCTNERGWITYQGFLSQWTLTTYLDVQRCLEYLGYLGYSILTEQESQASAVTVTRDKKIDLQKKQTQRNVFRCNVIGVKNCGKSGVLQALLGRNLMRQKKIREDHKSYYAINTVYVYGQEKYLLLHDISESEFLTEAEIICDVVCLVYDVSNPKSFEYCARIFKQHFMDSRIPCLIVAAKSDLHEVKQEYSISPTDFCRKHKMPPPQAFTCNTADAPSKDIFVKLTTMAMYPEDHYRDRLSRDMGHTDRIENLRKIWVFLKTALHVTQADLKSSTFWLRASFGATVFAVLGFAMYKALLKQR

SEQ ID NO: 21425 - protein, 617 aa, Artificial Sequence
  Synthetic polypeptide
TLVGTPWLQRGARVGKTSLIMSLVSEEFPEEVPPRAEEITIPADVTPERVPTHIVDYSEAEQSDEQLHQEISQANVICIVYAVNNKHSIDKVTSRWIPLINERTDKDSRLPLILVGNKSDLVEYSSMETILPIMNQYTEIETCVECSAKNLKNISELFYYAQKAVLHPTGPLYCPEEKEMKPACIKALTRIFKISDQDNDGTLNDAELNFFQRICFNTPLAPQALEDVKNVVRKHISDGVADSGLTLKGFLFLHTLFIQRGRHETTWTVLRRFGYDDDLDLTPEYLFPLLKIPPDCTTELNHHAYLFLQSTFDKHDLDRDCALSPDELKDLFKVFPYIPWGPDVNNTVCTNERGWITYQGFLSQWTLTTYLDVQRCLEYLGYLGYSILTEQESQASAVTVTRDKKIDLQKKQTQRNVFRCNVIGVKNCGKSGVLQALLGRNLMRQKKIREDHKSYYAINTVYVYGQEKYLLLHDISESEFLTEAEIICDVVCLVYDVSNPKSFEYCARIFKQHFMDSRIPCLIVAAKSDLHEVKQEYSISPTDFCRKHKMPPPQAFTCNTADAPSKDIFVKLTTMAMYPHVTQADLKSSTFWLRASFGATVFAVLGFAMYKALLKQR

SEQ ID NO: 21426 - protein, 40 aa, Artificial Sequence
  Synthetic polypeptide
ELNILRDSLPSREELSSLLRTEHLLGHPGYREELELGRHH

SEQ ID NO: 21427 - protein, 14 aa, Artificial Sequence
  Synthetic polypeptide
ELNTCWDTLATERS

SEQ ID NO: 21428 - protein, 690 aa, Artificial Sequence
  Synthetic polypeptide
TLVGTPWLQRGARVGKTSLIMSLVSEEFPEEVPPRAEEITIPADVTPERVPTHIVDYSEAEQSDEQLHQEISQANVICIVYAVNNKHSIDKVTSRWIPLINERTDKDSRLPLILVGNKSDLVEYSSMETILPIMNQYTEIETCVECSAKNLKNISELFYYAQKAVLHPTGPLYCPEEKEMKPACIKALTRIFKISDQDNDGTLNDAELNFFQRICFNTPLAPQALEDVKNVVRKHISDGVADSGLTLKGFLFLHTLFIQRGRHETTWTVLRRFGYDDDLDLTPEYLFPLLKIPPDCTTELNHHAYLFLQSTFDKHDLDRDCALSPDELKDLFKVFPYIPWGPDVNNTVCTNERGWITYQGFLSQWTLTTYLDVQRCLEYLGYLGYSILTEQESQASAVTVTRDKKIDLQKKQTQRNVFRCNVIGVKNCGKSGVLQALLGRNLMRQKKIREDHKSYYAINTVYVYGQEKYLLLHDISESEFLTEAEIICDVVCLVYDVSNPKSFEYCARIFKQHFMDSRIPCLIVAAKSDLHEVKQEYSISPTDFCRKHKMPPPQAFTCNTADAPSKDIFVKLTTMAMYPEDHYRDRLSRDMGHTDRIENLRKIWVFLKTAFHARLRCMCTCNRCTFCICQNFLNSDLLQSVKNKIFTAVLNRHVTQADLKSSTFWLRASFGATVFAVLGFAMYKALLKQR

SEQ ID NO: 21429 - protein, 658 aa, Artificial Sequence
  Synthetic polypeptide
TLVGTPWLQRGARVGKTSLIMSLVSEEFPEEVPPRAEEITIPADVTPERVPTHIVDYSEAEQSDEQLHQEISQANVICIVYAVNNKHSIDKVTSRWIPLINERTDKDSRLPLILVGNKSDLVEYSSMETILPIMNQYTEIETCVECSAKNLKNISELFYYAQKAVLHPTGPLYCPEEKEMKPACIKALTRIFKISDQDNDGTLNDAELNFFQRICFNTPLAPQALEDVKNVVRKHISDGVADSGLTLKGFLFLHTLFIQRGRHETTWTVLRRFGYDDDLDLTPEYLFPLLKIPPDCTTELNHHAYLFLQSTFDKHDLDRDCALSPDELKDLFKVFPYIPWGPDVNNTVCTNERGWITYQGFLSQWTLTTYLDVQRCLEYLGYLGYSILTEQESQASAVTVTRDKKIDLQKKQTQRNVFRCNVIGVKNCGKSGVLQALLGRNLMRQKKIREDHKSYYAINTVYVYGQEKYLLLHDISESEFLTEAEIICDVVCLVYDVSNPKSFEYCARIFKQHFMDSRIPCLIVAAKSDLHEVKQEYSISPTDFCRKHKMPPPQAFTCNTADAPSKDIFVKLTTMAMYPHARLRCMCTCNRCTFCICQNFLNSDLLQSVKNKIFTAVLNRHVTQADLKSSTFWLRASFGATVFAVLGFAMYKALLKQR

SEQ ID NO: 21430 - protein, 624 aa, Artificial Sequence
  Synthetic polypeptide
TLVGTPWLQRGARVGKTSLIMSLVSEEFPEEVPPRAEEITIPADVTPERVPTHIVDYSEAEQSDEQLHQEISQANVICIVYAVNNKHSIDKVTSRWIPLINERTDKDSRLPLILVGNKSDLVEYSSMETILPIMNQYTEIETCVECSAKNLKNISELFYYAQKAVLHPTGPLYCPEEKEMKPACIKALTRIFKISDQDNDGTLNDAELNFFQRICFNTPLAPQALEDVKNVVRKHISDGVADSGLTLKGFLFLHTLFIQRGRHETTWTVLRRFGYDDDLDLTPEYLFPLLKIPPDCTTELNHHAYLFLQSTFDKHDLDRDCALSPDELKDLFKVFPYIPWGPDVNNTVCTNERGWITYQGFLSQWTLTTYLDVQRCLEYLGYLGYSILTEQESQASAVTVTRDKKIDLQKKQTQRNVFRCNVIGVKNCGKSGVLQALLGRNLMRQKKIREDHKSYYAINTVYVYGQEKYLLLHDISESEFLTEAEIICDVVCLVYDVSNPKSFEYCARIFKQHFMDSRIPCLIVAAKSDLHEVKQEYSISPTDFCRKHKMPPPQAFTCNTADAPSKDIFVKLTTMAMYPHARLRCMCTCNRCTFCICQNFLNSDLLQSVKNKIFTAVLNRIISA

SEQ ID NO: 21431 - protein, 579 aa, Artificial Sequence
  Synthetic polypeptide
TLVGTPWLQRGARVGKTSLIMSLVSEEFPEEVPPRAEEITIPADVTPERVPTHIVDYSEAEQSDEQLHQEISQANVICIVYAVNNKHSIDKVTSRWIPLINERTDKDSRLPLILVGNKSDLVEYSSMETILPIMNQYTEIETCVECSAKNLKNISELFYYAQKAVLHPTGPLYCPEEKEMKPACIKALTRIFKISDQDNDGTLNDAELNFFQRICFNTPLAPQALEDVKNVVRKHISDGVADSGLTLKGFLFLHTLFIQRGRHETTWTVLRRFGYDDDLDLTPEYLFPLLKIPPDCTTELNHHAYLFLQSTFDKHDLDRDCALSPDELKDLFKVFPYIPWGPDVNNTVCTNERGWITYQGFLSQWTLTTYLDVQRCLEYLGYLGYSILTEQESQASAVTVTRDKKIDLQKKQTQRNVFRCNVIGVKNCGKSGVLQALLGRNLMRQKKIREDHKSYYAINTVYVYGQEKYLLLHDISESEFLTEAEIICDVVCLVYDVSNPKSFEYCARIFKQHFMDSRIPCLIVAAKSDLHEVKQEYSISPTDFCRKHKMPPPQAFTCNTADAPSKDIFVKLTTMAMYP

SEQ ID NO: 21432 - protein, 50 aa, Artificial Sequence
  Synthetic polypeptide
TLVGTPWLQRGARVGKTSLIMSLVSEEFPEEIVVDLNTSSFAEYLQPSTK

SEQ ID NO: 21433 - protein, 649 aa, Artificial Sequence
  Synthetic polypeptide
TLVGTPWLQRGARVGKTSLIMSLVSEEFPEEVPPRAEEITIPADVTPERVPTHIVDYSEAEQSDEQLHQEISQANVICIVYAVNNKHSIDKVTSRWIPLINERTDKDSRLPLILVGNKSDLVEYSSMETILPIMNQYTEIETCVECSAKNLKNISELFYYAQKAVLHPTGPLYCPEEKEMKPACIKALTRIFKISDQDNDGTLNDAELNFFQRICFNTPLAPQALEDVKNVVRKHISDGVADSGLTLKGFLFLHTLFIQRGRHETTWTVLRRFGYDDDLDLTPEYLFPLLKIPPDCTTELNHHAYLFLQSTFDKHDLDRDCALSPDELKDLFKVFPYIPWGPDVNNTVCTNERGWITYQGFLSQWTLTTYLDVQRCLEYLGYLGYSILTEQESQASAVTVTRDKKIDLQKKQTQRNVFRCNVIGVKNCGKSGVLQALLGRNLMRQKKIREDHKSYYAINTVYVYGQEKYLLLHDISESEFLTEAEIICDVVCLVYDVSNPKSFEYCARIFKQHFMDSRIPCLIVAAKSDLHEVKQEYSISPTDFCRKHKMPPPQAFTCNTADAPSKDIFVKLTTMAMYPEDHYRDRLSRDMGHTDRIENLRKIWVFLKTALHVTQADLKSSTFWLRASFGATVFAVLGFAMYKALLKQR

SEQ ID NO: 21434 - protein, 557 aa, Artificial Sequence
  Synthetic polypeptide
GAPLPGRPVWEVRSASARPPIVWEVRSVSARPPRLGSEERLCPAAPSGRLPLILVGNKSDLVEYSSMETILPIMNQYTEIETCVECSAKNLKNISELFYYAQKAVLHPTGPLYCPEEKEMKPACIKALTRIFKISDQDNDGTLNDAELNFFQRICFNTPLAPQALEDVKNVVRKHISDGVADSGLTLKGFLFLHTLFIQRGRHETTWTVLRRFGYDDDLDLTPEYLFPLLKIPPDCTTELNHHAYLFLQSTFDKHDLDRDCALSPDELKDLFKVFPYIPWGPDVNNTVCTNERGWITYQGFLSQWTLTTYLDVQRCLEYLGYLGYSILTEQESQASAVTVTRDKKIDLQKKQTQRNVFRCNVIGVKNCGKSGVLQALLGRNLMRQKKIREDHKSYYAINTVYVYGQEKYLLLHDISESEFLTEAEIICDVVCLVYDVSNPKSFEYCARIFKQHFMDSRIPCLIVAAKSDLHEVKQEYSISPTDFCRKHKMPPPQAFTCNTADAPSKDIFVKLTTMAMYPHVTQADLKSSTFWLRASFGATVFAVLGFAMYKALLKQR

SEQ ID NO: 21435 - protein, 26 aa, Artificial Sequence
  Synthetic polypeptide
GVSLPGHPVWEVRSASARLPRLGGCL

SEQ ID NO: 21436 - protein, 21 aa, Artificial Sequence
  Synthetic polypeptide
GAPLPGCPVWEAAFNIGWEQI

SEQ ID NO: 21437 - protein, 630 aa, Artificial Sequence
  Synthetic polypeptide
GAPLPGRPVWEVRSASARPPIVWEVRSVSARPPRLGSEERLCPAAPSGRLPLILVGNKSDLVEYSSMETILPIMNQYTEIETCVECSAKNLKNISELFYYAQKAVLHPTGPLYCPEEKEMKPACIKALTRIFKISDQDNDGTLNDAELNFFQRICFNTPLAPQALEDVKNVVRKHISDGVADSGLTLKGFLFLHTLFIQRGRHETTWTVLRRFGYDDDLDLTPEYLFPLLKIPPDCTTELNHHAYLFLQSTFDKHDLDRDCALSPDELKDLFKVFPYIPWGPDVNNTVCTNERGWITYQGFLSQWTLTTYLDVQRCLEYLGYLGYSILTEQESQASAVTVTRDKKIDLQKKQTQRNVFRCNVIGVKNCGKSGVLQALLGRNLMRQKKIREDHKSYYAINTVYVYGQEKYLLLHDISESEFLTEAEIICDVVCLVYDVSNPKSFEYCARIFKQHFMDSRIPCLIVAAKSDLHEVKQEYSISPTDFCRKHKMPPPQAFTCNTADAPSKDIFVKLTTMAMYPEDHYRDRLSRDMGHTDRIENLRKIWVFLKTAFHARLRCMCTCNRCTFCICQNFLNSDLLQSVKNKIFTAVLNRHVTQADLKSSTFWLRASFGATVFAVLGFAMYKALLKQR

SEQ ID NO: 21438 - protein, 598 aa, Artificial Sequence
  Synthetic polypeptide
GAPLPGRPVWEVRSASARPPIVWEVRSVSARPPRLGSEERLCPAAPSGRLPLILVGNKSDLVEYSSMETILPIMNQYTEIETCVECSAKNLKNISELFYYAQKAVLHPTGPLYCPEEKEMKPACIKALTRIFKISDQDNDGTLNDAELNFFQRICFNTPLAPQALEDVKNVVRKHISDGVADSGLTLKGFLFLHTLFIQRGRHETTWTVLRRFGYDDDLDLTPEYLFPLLKIPPDCTTELNHHAYLFLQSTFDKHDLDRDCALSPDELKDLFKVFPYIPWGPDVNNTVCTNERGWITYQGFLSQWTLTTYLDVQRCLEYLGYLGYSILTEQESQASAVTVTRDKKIDLQKKQTQRNVFRCNVIGVKNCGKSGVLQALLGRNLMRQKKIREDHKSYYAINTVYVYGQEKYLLLHDISESEFLTEAEIICDVVCLVYDVSNPKSFEYCARIFKQHFMDSRIPCLIVAAKSDLHEVKQEYSISPTDFCRKHKMPPPQAFTCNTADAPSKDIFVKLTTMAMYPHARLRCMCTCNRCTFCICQNFLNSDLLQSVKNKIFTAVLNRHVTQADLKSSTFWLRASFGATVFAVLGFAMYKALLKQR

SEQ ID NO: 21439 - protein, 564 aa, Artificial Sequence
  Synthetic polypeptide
GAPLPGRPVWEVRSASARPPIVWEVRSVSARPPRLGSEERLCPAAPSGRLPLILVGNKSDLVEYSSMETILPIMNQYTEIETCVECSAKNLKNISELFYYAQKAVLHPTGPLYCPEEKEMKPACIKALTRIFKISDQDNDGTLNDAELNFFQRICFNTPLAPQALEDVKNVVRKHISDGVADSGLTLKGFLFLHTLFIQRGRHETTWTVLRRFGYDDDLDLTPEYLFPLLKIPPDCTTELNHHAYLFLQSTFDKHDLDRDCALSPDELKDLFKVFPYIPWGPDVNNTVCTNERGWITYQGFLSQWTLTTYLDVQRCLEYLGYLGYSILTEQESQASAVTVTRDKKIDLQKKQTQRNVFRCNVIGVKNCGKSGVLQALLGRNLMRQKKIREDHKSYYAINTVYVYGQEKYLLLHDISESEFLTEAEIICDVVCLVYDVSNPKSFEYCARIFKQHFMDSRIPCLIVAAKSDLHEVKQEYSISPTDFCRKHKMPPPQAFTCNTADAPSKDIFVKLTTMAMYPHARLRCMCTCNRCTFCICQNFLNSDLLQSVKNKIFTAVLNRIISA

SEQ ID NO: 21440 - protein, 519 aa, Artificial Sequence
  Synthetic polypeptide
GAPLPGRPVWEVRSASARPPIVWEVRSVSARPPRLGSEERLCPAAPSGRLPLILVGNKSDLVEYSSMETILPIMNQYTEIETCVECSAKNLKNISELFYYAQKAVLHPTGPLYCPEEKEMKPACIKALTRIFKISDQDNDGTLNDAELNFFQRICFNTPLAPQALEDVKNVVRKHISDGVADSGLTLKGFLFLHTLFIQRGRHETTWTVLRRFGYDDDLDLTPEYLFPLLKIPPDCTTELNHHAYLFLQSTFDKHDLDRDCALSPDELKDLFKVFPYIPWGPDVNNTVCTNERGWITYQGFLSQWTLTTYLDVQRCLEYLGYLGYSILTEQESQASAVTVTRDKKIDLQKKQTQRNVFRCNVIGVKNCGKSGVLQALLGRNLMRQKKIREDHKSYYAINTVYVYGQEKYLLLHDISESEFLTEAEIICDVVCLVYDVSNPKSFEYCARIFKQHFMDSRIPCLIVAAKSDLHEVKQEYSISPTDFCRKHKMPPPQAFTCNTADAPSKDIFVKLTTMAMYP

SEQ ID NO: 21441 - protein, 589 aa, Artificial Sequence
  Synthetic polypeptide
GAPLPGRPVWEVRSASARPPIVWEVRSVSARPPRLGSEERLCPAAPSGRLPLILVGNKSDLVEYSSMETILPIMNQYTEIETCVECSAKNLKNISELFYYAQKAVLHPTGPLYCPEEKEMKPACIKALTRIFKISDQDNDGTLNDAELNFFQRICFNTPLAPQALEDVKNVVRKHISDGVADSGLTLKGFLFLHTLFIQRGRHETTWTVLRRFGYDDDLDLTPEYLFPLLKIPPDCTTELNHHAYLFLQSTFDKHDLDRDCALSPDELKDLFKVFPYIPWGPDVNNTVCTNERGWITYQGFLSQWTLTTYLDVQRCLEYLGYLGYSILTEQESQASAVTVTRDKKIDLQKKQTQRNVFRCNVIGVKNCGKSGVLQALLGRNLMRQKKIREDHKSYYAINTVYVYGQEKYLLLHDISESEFLTEAEIICDVVCLVYDVSNPKSFEYCARIFKQHFMDSRIPCLIVAAKSDLHEVKQEYSISPTDFCRKHKMPPPQAFTCNTADAPSKDIFVKLTTMAMYPEDHYRDRLSRDMGHTDRIENLRKIWVFLKTALHVTQADLKSSTFWLRASFGATVFAVLGFAMYKALLKQR

SEQ ID NO: 21442 - protein, 109 aa, Artificial Sequence
  Synthetic polypeptide
FTEQHFMDSRIPCLIVAAKSDLHEVKQEYSISPTDFCRKHKMPPPQAFTCNTADAPSKDIFVKLTTMAMYPHVTQADLKSSTFWLRASFGATVFAVLGFAMYKALLKQR

SEQ ID NO: 21443 - protein, 22 aa, Artificial Sequence
  Synthetic polypeptide
SRWLTMDDDLLNNTLWTAEYLA

SEQ ID NO: 21444 - protein, 182 aa, Artificial Sequence
  Synthetic polypeptide
FTEQHFMDSRIPCLIVAAKSDLHEVKQEYSISPTDFCRKHKMPPPQAFTCNTADAPSKDIFVKLTTMAMYPEDHYRDRLSRDMGHTDRIENLRKIWVFLKTAFHARLRCMCTCNRCTFCICQNFLNSDLLQSVKNKIFTAVLNRHVTQADLKSSTFWLRASFGATVFAVLGFAMYKALLKQR

SEQ ID NO: 21445 - protein, 141 aa, Artificial Sequence
  Synthetic polypeptide
FTEQHFMDSRIPCLIVAAKSDLHEVKQEYSISPTDFCRKHKMPPPQAFTCNTADAPSKDIFVKLTTMAMYPEDHYRDRLSRDMGHTDRIENLRKIWVFLKTALHVTQADLKSSTFWLRASFGATVFAVLGFAMYKALLKQR

SEQ ID NO: 21446 - protein, 150 aa, Artificial Sequence
  Synthetic polypeptide
FTEQHFMDSRIPCLIVAAKSDLHEVKQEYSISPTDFCRKHKMPPPQAFTCNTADAPSKDIFVKLTTMAMYPHARLRCMCTCNRCTFCICQNFLNSDLLQSVKNKIFTAVLNRHVTQADLKSSTFWLRASFGATVFAVLGFAMYKALLKQR

SEQ ID NO: 21447 - protein, 116 aa, Artificial Sequence
  Synthetic polypeptide
FTEQHFMDSRIPCLIVAAKSDLHEVKQEYSISPTDFCRKHKMPPPQAFTCNTADAPSKDIFVKLTTMAMYPHARLRCMCTCNRCTFCICQNFLNSDLLQSVKNKIFTAVLNRIISA

SEQ ID NO: 21448 - protein, 71 aa, Artificial Sequence
  Synthetic polypeptide
FTEQHFMDSRIPCLIVAAKSDLHEVKQEYSISPTDFCRKHKMPPPQAFTCNTADAPSKDIFVKLTTMAMYP

SEQ ID NO: 21449 - protein, 97 aa, Artificial Sequence
  Synthetic polypeptide
FTEQHFMDSRIPCLIVAAKSDLHEVKQEYSISPTDFCRKHKMPPPQAFTCNTADAPSKDIFVKLTTMAMYPHARLRCMCTCNRCTFCICQNFLNSDL

SEQ ID NO: 21450 - protein, 84 aa, Artificial Sequence
  Synthetic polypeptide
FTEQHFMDSRIPCLIVAAKSDLHEVKQEYSISPTDFCRKHKMPPPQAFTCNTADAPSKDIFVKLTTMAMYPHENSPGSLPWRLH

SEQ ID NO: 21451 - protein, 124 aa, Artificial Sequence
  Synthetic polypeptide
FTEQHFMDSRIPCLIVAAKSDLHEVKQEYSISPTDFCRKHKMPPPQAFTCNTADAPSKDIFVKLTTMAMYPHARLRCMCTCNRCTFCICQNFLNSDLLQSVKNKIFTAVLNRFLTLFTGYQAFC

SEQ ID NO: 21452 - protein, 33 aa, Artificial Sequence
  Synthetic polypeptide
EQLRSTAPSVSYAEHGCGGAPWPACGTKEPRQL

SEQ ID NO: 21453 - protein, 64 aa, Artificial Sequence
  Synthetic polypeptide
ATQNTGVAGHPGPHAVQKNQGSSDNNQVLPALQSEVVHPRGGQTLPWRQDHARLREAREVAKPS

SEQ ID NO: 21454 - protein, 323 aa, Artificial Sequence
  Synthetic polypeptide
GRSQDGRIGTAPVYSSQRELRRTRVWRGTLARMRYKRTKAALTIIRYYRRYKVKSYIHEVARRFHGVKTMRDYGKHVKWPSPPKVLRRFEEALQTIFNRWRASQLIKSIPASDLPQVRAKVAAVEMLKGQRADLGLQRAWEGNYLASKPDTPQTSGTFVPVANELKRKDKYMNVLFSCHVRKVNRFSKVEDRAIFVTDRHLYKMDPTKQYKVMKTIPLYNLTGLSVSNGKDQLVVFHTKDNKDLIVCLFSKQPTHESRIGELVGVLVNHFKSEKRHLQVNVTNPVQCSLHGKKCTVSVETRLNQPQPDFTKNRSGFILSVPGN

SEQ ID NO: 21455 - protein, 278 aa, Artificial Sequence
  Synthetic polypeptide
GRSQDGRIGTAPVYSSQRELRRTRVWRGTLARMRYKRTKAALTIIRYYRRYKVKSYIHEVARRFHGVKTMRDYGKHVKWPSPPKVLRRFEEALQTIFNRWRASQLIKSIPASDLPQVRAKVAAVEMLKGQRADLGLQRAWEGNYLASKPDTPQTSGTFVPVANELKRKDKYMNVLFSCHVRKVNRFSKVEDRAIFVTDRHLYKMDPTKQYKVMKTIPLYNLTGLSVSNGKDQLVVFHTKDNKDLIVCLFSKQPTHESRIGELVGVLVNHFKRNHLLIL

SEQ ID NO: 21456 - protein, 14 aa, Artificial Sequence
  Synthetic polypeptide
SSRRRSKMPSQCIR

SEQ ID NO: 21457 - protein, 15 aa, Artificial Sequence
  Synthetic polypeptide
TFDQVDEGAKCLHSV

SEQ ID NO: 21458 - protein, 377 aa, Artificial Sequence
  Synthetic polypeptide
TKEQNAFTVYKMISEFTWPNHDLPSDKEAVKKLIERCGFQDDVAYGKTKIFIRTPRTLFTLEELRAQMLIRIVLFLQKVWRGTLARMRYKRTKAALTIIRYYRRYKVKSYIHEVARRFHGVKTMRDYGKHVKWPSPPKVLRRFEEALQTIFNRWRASQLIKSIPASDLPQVRAKVAAVEMLKGQRADLGLQRAWEGNYLASKPDTPQTSGTFVPVANELKRKDKYMNVLFSCHVRKVNRFSKVEDRAIFVTDRHLYKMDPTKQYKVMKTIPLYNLTGLSVSNGKDQLVVFHTKDNKDLIVCLFSKQPTHESRIGELVGVLVNHFKSEKRHLQVNVTNPVQCSLHGKKCTVSVETRLNQPQPDFTKNRSGFILSVPGN

SEQ ID NO: 21459 - protein, 332 aa, Artificial Sequence
  Synthetic polypeptide
TKEQNAFTVYKMISEFTWPNHDLPSDKEAVKKLIERCGFQDDVAYGKTKIFIRTPRTLFTLEELRAQMLIRIVLFLQKVWRGTLARMRYKRTKAALTIIRYYRRYKVKSYIHEVARRFHGVKTMRDYGKHVKWPSPPKVLRRFEEALQTIFNRWRASQLIKSIPASDLPQVRAKVAAVEMLKGQRADLGLQRAWEGNYLASKPDTPQTSGTFVPVANELKRKDKYMNVLFSCHVRKVNRFSKVEDRAIFVTDRHLYKMDPTKQYKVMKTIPLYNLTGLSVSNGKDQLVVFHTKDNKDLIVCLFSKQPTHESRIGELVGVLVNHFKRNHLLIL

SEQ ID NO: 21460 - protein, 42 aa, Artificial Sequence
  Synthetic polypeptide
TKKAILSLVLLTKIKILYFKISSALCITVQILCSRICGLKAN

SEQ ID NO: 21461 - protein, 19 aa, Artificial Sequence
  Synthetic polypeptide
CNPLQEEIKQKKLFCHWFY

SEQ ID NO: 21462 - protein, 505 aa, Artificial Sequence
  Synthetic polypeptide
VIHCRKRLNKKSYSVIGFIDKNKDTLFQDFKRLMYNSSNPVLKNMWPEGKLSITEVTKRPLTAATLFKNSMIALVDNLASKEPYYVRCIKPNDKKSPQIFDDERCRHQVEYLGLLENVRVRRAGFAFRQTYEKFLHRYKMISEFTWPNHDLPSDKEAVKKLIERCGFQDDVAYGKTKIFIRTPRTLFTLEELRAQMLIRIVLFLQKVWRGTLARMRYKRTKAALTIIRYYRRYKVKSYIHEVARRFHGVKTMRDYGKHVKWPSPPKVLRRFEEALQTIFNRWRASQLIKSIPASDLPQVRAKVAAVEMLKGQRADLGLQRAWEGNYLASKPDTPQTSGTFVPVANELKRKDKYMNVLFSCHVRKVNRFSKVEDRAIFVTDRHLYKMDPTKQYKVMKTIPLYNLTGLSVSNGKDQLVVFHTKDNKDLIVCLFSKQPTHESRIGELVGVLVNHFKSEKRHLQVNVTNPVQCSLHGKKCTVSVETRLNQPQPDFTKNRSGFILSVPGN

SEQ ID NO: 21463 - protein, 460 aa, Artificial Sequence
  Synthetic polypeptide
VIHCRKRLNKKSYSVIGFIDKNKDTLFQDFKRLMYNSSNPVLKNMWPEGKLSITEVTKRPLTAATLFKNSMIALVDNLASKEPYYVRCIKPNDKKSPQIFDDERCRHQVEYLGLLENVRVRRAGFAFRQTYEKFLHRYKMISEFTWPNHDLPSDKEAVKKLIERCGFQDDVAYGKTKIFIRTPRTLFTLEELRAQMLIRIVLFLQKVWRGTLARMRYKRTKAALTIIRYYRRYKVKSYIHEVARRFHGVKTMRDYGKHVKWPSPPKVLRRFEEALQTIFNRWRASQLIKSIPASDLPQVRAKVAAVEMLKGQRADLGLQRAWEGNYLASKPDTPQTSGTFVPVANELKRKDKYMNVLFSCHVRKVNRFSKVEDRAIFVTDRHLYKMDPTKQYKVMKTIPLYNLTGLSVSNGKDQLVVFHTKDNKDLIVCLFSKQPTHESRIGELVGVLVNHFKRNHLLIL

SEQ ID NO: 21464 - protein, 12 aa, Artificial Sequence
  Synthetic polypeptide
GQEIETVLANTS

SEQ ID NO: 21465 - protein, 264 aa, Artificial Sequence
  Synthetic polypeptide
SQHFGRLRWADHEVRKSRLSWLTRLDKLLDAGLYTGEVTEIVGGPGSGKTQVCLCMAANVAHGLQQNVLYVDSNGGLTASRLLQLLQAKTQDEEEQAEALRRIQVVHAFDIFQMLDVLQELRGTVAQQVTGSSGTVKVVVVDSVTAVVSPLLGGQQREGLALMMQLARELKTLARDLGMAVVVTNHITRDRDSGRLKPALGRSWSFVPSTRILLDTIEGAGASGGRRMACLAKSSRQPTGFQEMVDIGTWGTSEQSATLQGDQT

SEQ ID NO: 21466 - protein, 15 aa, Artificial Sequence
  Synthetic polypeptide
HVLINCLMLVSILEK

SEQ ID NO: 21467 - protein, 219 aa, Artificial Sequence
  Synthetic polypeptide
SQHFGRLRWADHEVRKSRLSWLTRLDKLLDAGLYTGEVTEIVGGPGSGKTQAEALRRIQVVHAFDIFQMLDVLQELRGTVAQQVTGSSGTVKVVVVDSVTAVVSPLLGGQQREGLALMMQLARELKTLARDLGMAVVVTNHITRDRDSGRLKPALGRSWSFVPSTRILLDTIEGAGASGGRRMACLAKSSRQPTGFQEMVDIGTWGTSEQSATLQGDQT

SEQ ID NO: 21468 - protein, 25 aa, Artificial Sequence
  Synthetic polypeptide
SQHFGRLRWADHEVRKSRLSWLTRL

SEQ ID NO: 21469 - protein, 3 aa, Artificial Sequence
  Synthetic polypeptide
HVL

SEQ ID NO: 21470 - protein, 183 aa, Artificial Sequence
  Synthetic polypeptide
SQHFGRLRWADHEVRKSRLSWLTRLDKLLDAGLYTGEVTEIVGGPGSGKTQVCLCMAANVAHGLQQNVLYVDSNGGLTASRLLQLLQAKTQDEEEQAEALRRIQVVHAFDIFQMLDVLQELRGTVAQQVTGSSGTVKVVVVDSVTAVVSPLLGGQQREGLALMMQLARELKTLARDLGMAVVV

SEQ ID NO: 21471 - protein, 13 aa, Artificial Sequence
  Synthetic polypeptide
YFGKPTRRIFQFI

SEQ ID NO: 21472 - protein, 239 aa, Artificial Sequence
  Synthetic polypeptide
ILASQPGEFSSSYEEVISQINTSLPAPHSWPLLEWQRQRHHCPGLSGRITYTPENLCRKLFLQHEGLKQLICEEMDSVRKGSLIFSRSWSVDLGLQENHKVLCDALLISQDSPPVLYTFHMVQDEEFKGYSTQTALTLKQKLAKIGGYTKKVCVMTKIFYLSPEGMTSCQYDLRSQVIYPESYYFTRRKYLLKALFKALKRLKSLRDQFSFAENLYQIIGIDCFQKNDKKMFKSCRRLT

SEQ ID NO: 21473 - protein, 15 aa, Artificial Sequence
  Synthetic polypeptide
FWQANQENFPVHMKR

SEQ ID NO: 21474 - protein, 153 aa, Artificial Sequence
  Synthetic polypeptide
APAATPALAFASASGEIFELKAELNNEKKEKRKEAVKKVIAAMTVGKDVSSLFPDVVNCMQTDNLELKKLVYLYLMNYAKSQPDMAIMAVNSFVKDCEDPNPLIRALAVRTMGCIRVDKITEYLCEPLRKCLKDEDPYVRKTAAVCVAKLHDI

SEQ ID NO: 21475 - protein, 19 aa, Artificial Sequence
  Synthetic polypeptide
LPPPPPPSPSPPPPEKYLN

SEQ ID NO: 21476 - protein, 17 aa, Artificial Sequence
  Synthetic polypeptide
SRRHPRPRLRLRLRRNI

SEQ ID NO: 21477 - protein, 939 aa, Artificial Sequence
  Synthetic polypeptide
APAATPALAFASASGEIFELKAELNNEKKEKRKEAVKKVIAAMTVGKDVSSLFPDVVNCMQTDNLELKKLVYLYLMNYAKSQPDMAIMAVNSFVKDCEDPNPLIRALAVRTMGCIRVDKITEYLCEPLRKCLKDEDPYVRKTAAVCVAKLHDINAQMVEDQGFLDSLRDLIADSNPMVVANAVAALSEISESHPNSNLLDLNPQNINKLLTALNECTEWGQIFILDCLSNYNPKDDREAQSICERVTPRLSHANSAVVLSAVKVLMKFLELLPKDSDYYNMLLKKLAPPLVTLLSGEPEVQYVALRNINLIVQKRPEILKQEIKVFFVKYNDPIYVKLEKLDIMIRLASQANIAQVLAELKEYATEVDVDFVRKAVRAIGRCAIKVEQSAERCVSTLLDLIQTKVNYVVQEAIVVIRDIFRKYPNKYESIIATLCENLDSLDEPDARAAMIWIVGEYAERIDNADELLESFLEGFHDESTQVQLTLLTAIVKLFLKKPSETQELVQQVLSLATQDSDNPDLRDRGYIYWRLLSTDPVTAKEVVLSEKPLISEETDLIEPTLLDELICHIGSLASVYHKPPNAFVEGSHGIHRKHLPIHHGSTDAGDSPVGTTTATNLEQPQVIPSQGDLLGDLLNLDLGPPVNVPQVSSMQMGAVDLLGGGLDSLVGQSFIPSSVPATFAPSPTPAVVSSGLNDLFELSTGIGMAPGGYVAPKAVWLPAVKAKGLEISGTFTHRQGHIYMEMNFTNKALQHMTDFAIQFNKNSFGVIPSTPLAIHTPLMPNQSIDVSLPLNTLGPVMKMEPLNNLQVAVKNNIDVFYFSCLIPLNVLFVEDGKMERQVFLATWKDIPNENELQFQIKECHLNADTVSSKLQNNNVYTIAKRNVEGQDMLYQSLKLTNGIWILAELRIQPGNPNYTLSLKCRAPEVSQYIYQVYDSILKN

SEQ ID NO: 21478 - protein, 51 aa, Artificial Sequence
  Synthetic polypeptide
APAATPALAFASASGEIFELKAELNNEKKEKRKEAVKKVIAAMTVGKDVST

SEQ ID NO: 21479 - protein, 915 aa, Artificial Sequence
  Synthetic polypeptide
APAATPALAFASASGEIFELKAELNNEKKEKRKEAVKKVIAAMTVGKDVSSLFPDVVNCMQTDNLELKKLVYLYLMNYAKSQPDMAIMAVNSFVKDEDPYVRKTAAVCVAKLHDINAQMVEDQGFLDSLRDLIADSNPMVVANAVAALSEISESHPNSNLLDLNPQNINKLLTALNECTEWGQIFILDCLSNYNPKDDREAQSICERVTPRLSHANSAVVLSAVKVLMKFLELLPKDSDYYNMLLKKLAPPLVTLLSGEPEVQYVALRNINLIVQKRPEILKQEIKVFFVKYNDPIYVKLEKLDIMIRLASQANIAQVLAELKEYATEVDVDFVRKAVRAIGRCAIKVEQSAERCVSTLLDLIQTKVNYVVQEAIVVIRDIFRKYPNKYESIIATLCENLDSLDEPDARAAMIWIVGEYAERIDNADELLESFLEGFHDESTQVQLTLLTAIVKLFLKKPSETQELVQQVLSLATQDSDNPDLRDRGYIYWRLLSTDPVTAKEVVLSEKPLISEETDLIEPTLLDELICHIGSLASVYHKPPNAFVEGSHGIHRKHLPIHHGSTDAGDSPVGTTTATNLEQPQVIPSQGDLLGDLLNLDLGPPVNVPQVSSMQMGAVDLLGGGLDSLLGSDLGGGIGGSPAVGQSFIPSSVPATFAPSPTPAVVSSGLNDLFELSTGIGMAPGGYVAPKAVWLPAVKAKGLEISGTFTHRQGHIYMEMNFTNKALQHMTDFAIQFNKNSFGVIPSTPLAIHTPLMPNQSIDVSLPLNTLGPVMKMEPLNNLQVAVKNNIDVFYFSCLIPLNVLFVEDGKMERQVFLATWKDIPNENELQFQIKECHLNADTVSSKLQNNNVYTIAKRNVEGQDMLYQSLKLTNGIWILAELRIQPGNPNYTLSLKCRAPEVSQYIYQVYDSILKN

SEQ ID NO: 21480 - protein, 65 aa, Artificial Sequence
  Synthetic polypeptide
APAATPALAFASASGEIFELKAELNNEKKEKRKEAVKKVIAAMTVGKDVRCCSSEVNFCYFSFVC

SEQ ID NO: 21481 - protein, 953 aa, Artificial Sequence
  Synthetic polypeptide
APAATPALAFASASGEIFELKAELNNEKKEKRKEAVKKVIAAMTVGKDVSSLFPDVVNCMQTDNLELKKLVYLYLMNYAKSQPDMAIMAVNSFVKDCEDPNPLIRALAVRTMGCIRVDKITEYLCEPLRKCLKDEDPYVRKTAAVCVAKLHDINAQMVEDQGFLDSLRDLIADSNPMVVANAVAALSEISESHPNSNLLDLNPQNINKLLTALNECTEWGQIFILDCLSNYNPKDDREAQSICERVTPRLSHANSAVVLSAVKVLMKFLELLPKDSDYYNMLLKKLAPPLVTLLSGEPEVQYVALRNINLIVQKRPEILKQEIKVFFVKYNDPIYVKLEKLDIMIRLASQANIAQVLAELKEYATEVDVDFVRKAVRAIGRCAIKVEQSAERCVSTLLDLIQTKVNYVVQEAIVVIRDIFRKYPNKYESIIATLCENLDSLDEPDARAAMIWIVGEYAERIDNADELLESFLEGFHDESTQVQLTLLTAIVKLFLKKPSETQELVQQVLSLATQDSDNPDLRDRGYIYWRLLSTDPVTAKEVVLSEKPLISEETDLIEPTLLDELICHIGSLASVYHKPPNAFVEGSHGIHRKHLPIHHGSTDAGDSPVGTTTATNLEQPQVIPSQGDLLGDLLNLDLGPPVNVPQVSSMQMGAVDLLGGGLDSLLGSDLGGGIGGSPAVGQSFIPSSVPATFAPSPTPAVVSSGLNDLFELSTGIGMAPGGYVAPKAVWLPAVKAKGLEISGTFTHRQGHIYMEMNFTNKALQHMTDFAIQFNKNSFGVIPSTPLAIHTPLMPNQSIDVSLPLNTLGPVMKMEPLNNLQVAVKNNIDVFYFSCLIPLNVLFVEDGKMERQVFLATWKDIPNENELQFQIKECHLNADTVSSKLQNNNVYTIAKRNVEGQDMLYQSLKLTNGIWILAELRIQPGNPNYTLSLKCRAPEVSQYIYQVYDSILKN

SEQ ID NO: 21482 - protein, 82 aa, Artificial Sequence
  Synthetic polypeptide
APAATPALAFASASGEIFELKAELNNEKKEKRKEAVKKVIAAMTVGKDVSSLFPDVVNCMQTDNLELKKLVYLYLMNYAKSQ

SEQ ID NO: 21483 - protein, 134 aa, Artificial Sequence
  Synthetic polypeptide
APAATPALAFASASGEIFELKAELNNEKKEKRKEAVKKVIAAMTVGKDVSSLFPDVVNCMQTDNLELKKLVYLYLMNYAKSQPDMAIMAVNSFVKDCEDPNPLIRALAVRTMGCIRVDKITEYLCEPLRKCLKD

SEQ ID NO: 21484 - protein, 41 aa, Artificial Sequence
  Synthetic polypeptide
GPAQWLMPVIPAFWEAELSLKCRAPEVSQYIYQVYDSILKN

SEQ ID NO: 21485 - protein, 10 aa, Artificial Sequence
  Synthetic polypeptide
SQHFGRPSCH

SEQ ID NO: 21486 - protein, 21 aa, Artificial Sequence
  Synthetic polypeptide
SSAVAHACNPSILGGRAVTEV

SEQ ID NO: 21487 - protein, 13 aa, Artificial Sequence
  Synthetic polypeptide
SQEIETILANTWW

SEQ ID NO: 21488 - protein, 414 aa, Artificial Sequence
  Synthetic polypeptide
SQCFGRPRRADHEVRRLRPSWLTRGGDRGGFKNFGGHRDYGPRTDADSESDNSDNNTIFVQGLGEGVSTDQVGEFFKQIGIIKTNKKTGKPMINLYTDKDTGKPKGEATVSFDDPPSAKAAIDWFDGKEFHGNIIKVSFATRRPEFMRGGGSGGGRRGRGGYRGRGGFQGRGGDPKSGDWVCPNPSCGNMNFARRNSCNQCNEPRPEDSRPSGGDFRGRGYGGERGYRGRGGRGGDRGGYGGDRSGGGYGGDRSSGGGYSGDRSGGGYGGDRSGGGYGGDRGGGYGGDRGGGYGGDRGGGYGGDRGGYGGDRGGGYGGDRGGYGGDRGGYGGDRGGYGGDRGGYGGDRSRGGYGGDRGGGSGYGGDRSGGYGGDRSGGGYGGDRGGGYGGDRGGYGGKMGGRNDYRNDQRNRPY

SEQ ID NO: 21489 - protein, 56 aa, Artificial Sequence
  Synthetic polypeptide
HVVVTAVASKILVVTGIMDPEQMLIQNLIIQITTQSLCKDLGRVCLQIKLGSSLNK

SEQ ID NO: 21490 - protein, 64 aa, Artificial Sequence
  Synthetic polypeptide
SQCFGRPRRADHEVRRLRPSWLTRGGDRGGFKNFGGHRDYGPRTDADSESDNSDNNTIFVQGLG

SEQ ID NO: 21491 - protein, 42 aa, Artificial Sequence
  Synthetic polypeptide
HVVVTAVASKILVVTGIMDPEQMLIQNLIIQITTQSLCKDLG

SEQ ID NO: 21492 - protein, 362 aa, Artificial Sequence
  Synthetic polypeptide
SQCFGRPRRADHEVRRLRPSWLTRGGDRGGFKNFGGHRDYGPRTDADSESDNSDNNTIFVQGLGEGVSTDQVGEFFKQIGIIKTNKKTGKPMINLYTDKDTGKPKGEATVSFDDPPSAKAAIDWFDGKEFHGNIIKVSFATRRPEFMRGGGSGGGRRGRGGYRGRGGFQGRGGDPKSGDWVCPNPSCGNMNFARRNSCNQCNEPRPEDSRPSGGDFRGRGYGGERGYRGRGGRGGDRGGYGGDRTGGAMEETVVVAVATVETEVEAMEETGVVAAMEETEVGATEETEVAMEAKWEEETTTEMISATDHTDDCFECSFVSDMIHSEIARVLPAAFLVASSWVVKLSDIWIFIWVGGLGQFFF

SEQ ID NO: 21493 - protein, 83 aa, Artificial Sequence
  Synthetic polypeptide
GRARWLTPVIRTLWEAEFSTSAPRFSWQPPCLQDSSLHRLQTLRPQSPTSHTSTGPTWGWPRHSTGAMCWPRSSTCWFSGWQI

SEQ ID NO: 21494 - protein, 78 aa, Artificial Sequence
  Synthetic polypeptide
SEHFGRPSSQHQHLGSAGSLHAFRIPACTDSRPYGPSRLLPILQQDLPGGGRVTQRGQCAGHVRPHAGSVDGRSRPGG

SEQ ID NO: 21495 - protein, 220 aa, Artificial Sequence
  Synthetic polypeptide
PGTVAHTCNPNTLGGRVLNISTSVQLAASMPSGFQPAQTPDPTAPVAYFPYFNRTYLGVAASLNGGNVLATFVHMLVQWMADLGLEVEESTVYSRMIQAAVQQRDTHLTITPTVLGERHLPDQLASVTRISSSDLSLGHVTRALCRGIVQNLHSMLPIQQLQDWGVERVMGSGSALSRNDVLKQEVQRAFPLPMSFGQDVDAAVGAALVMLRRHLNQKES

SEQ ID NO: 21496 - protein, 94 aa, Artificial Sequence
  Synthetic polypeptide
SQHFGRPRQVDHEVRSSRPAWPTCSQHQHLGSAGSLHAFRIPACTDSRPYGPSRLLPILQQDLPGGGRVTQRGQCAGHVRPHAGSVDGRSRPGG

SEQ ID NO: 21497 - protein, 236 aa, Artificial Sequence
  Synthetic polypeptide
MGTVAGTCNPSTLGGRGRWITRSGVRDQPGQHVLNISTSVQLAASMPSGFQPAQTPDPTAPVAYFPYFNRTYLGVAASLNGGNVLATFVHMLVQWMADLGLEVEESTVYSRMIQAAVQQRDTHLTITPTVLGERHLPDQLASVTRISSSDLSLGHVTRALCRGIVQNLHSMLPIQQLQDWGVERVMGSGSALSRNDVLKQEVQRAFPLPMSFGQDVDAAVGAALVMLRRHLNQKES

SEQ ID NO: 21498 - protein, 98 aa, Artificial Sequence
  Synthetic polypeptide
WAQWRAPVIPALWEAEAGGSRGQEFETSLANMFSTSAPRFSWQPPCLQDSSLHRLQTLRPQSPTSHTSTGPTWGWPRHSTGAMCWPRSSTCWFSGWQI

SEQ ID NO: 21499 - protein, 99 aa, Artificial Sequence
  Synthetic polypeptide
GRAQWLMPVIPALWEAKAGGSRGQEIETILANTFSTSAPRFSWQPPCLQDSSLHRLQTLRPQSPTSHTSTGPTWGWPRHSTGAMCWPRSSTCWFSGWQI

SEQ ID NO: 21500 - protein, 94 aa, Artificial Sequence
  Synthetic polypeptide
SQHFGRPRQVDHEVRRSRPSWLTRSQHQHLGSAGSLHAFRIPACTDSRPYGPSRLLPILQQDLPGGGRVTQRGQCAGHVRPHAGSVDGRSRPGG

SEQ ID NO: 21501 - protein, 205 aa, Artificial Sequence
  Synthetic polypeptide
HVLNISTSVQLAASMPSGFQPAQTPDPTAPVAYFPYFNRTYLGVAASLNGGNVLATFVHMLVQWMADLGLEVEESTVYSRMIQAAVQQRDTHLTITPTVLGERHLPDQLASVTRISSSDLSLGHVTRALCRGIVQNLHSMLPIQQLQDWGVERVMGSGSALSRNDVLKQEVQRAFPLPMSFGQDVDAAVGAALVMLRRHLNQKES

SEQ ID NO: 21502 - protein, 74 aa, Artificial Sequence
  Synthetic polypeptide
SCADENNKASFSTHWMAVNGQREGLPRCSSPELLATWSRGRMADVAANSWPLCPSRSLISVWPRASAVQPSSGF

SEQ ID NO: 21503 - protein, 57 aa, Artificial Sequence
  Synthetic polypeptide
ERTSSSVEKRVKDTNRLLLEEEIPMADKHLERCSALLVIRAVRMKTTKHHFPPIGWL

SEQ ID NO: 21504 - protein, 386 aa, Artificial Sequence
  Synthetic polypeptide
KQQSIIFHPLDGCEWTEGGITPVFEPRAVSHLVTWQDGRCSSEFLASLPQPKSHLSVATGFGCATIFWLLKYRPEFLKSYDAAGTIHDYVVAMLCGLPRPLMSDQNAASWGYFNTQSQSWNVETLRSSGFPVHLLPDIAEPGSVAGRTSHMWFEIPKGTQVGVALGDLQASVYSCMAQRTDAVLNISTSVQLAASMPSGFQPAQTPDPTAPVAYFPYFNRTYLGVAASLNGGNVLATFVHMLVQWMADLGLEVEESTVYSRMIQAAVQQRDTHLTITPTVLGERHLPDQLASVTRISSSDLSLGHVTRALCRGIVQNLHSMLPIQQLQDWGVERVMGSGSALSRNDVLKQEVQRAFPLPMSFGQDVDAAVGAALVMLRRHLNQKES

SEQ ID NO: 21505 - protein, 1967 aa, Artificial Sequence
  Synthetic polypeptide
KPISTKDIKISLTWWHVPVIPATQEAECAVKLAKMVGYVSAGTVEYLYSQDGSFYFLELNPRLQVEHPCTEMVADVNLPAAQLQIAMGIPLYRIKDIRMMYGVSPWGDSPIDFEDSAHVPCPRGHVIAARITSENPDEGFKPSSGTVQELNFRSNKNVWGYFSVAAAGGLHEFADSQFGHCFSWGENREEAISNMVVALKELSIRGDFRTTVEYLIKLLETESFQMNRIDTGWLDRLIAEKVQAERPDTMLGVVCGALHVADVSLRNSVSNFLHSLERGQVLPAHTLLNTVDVELIYEGVKYVLKVTRQSPNSYVVIMNGSCVEVDVHRLSDGGLLLSYDGSSYTTYMKEEVDRYRITIGNKTCVFEKENDPSVMRSPSAGKLIQYIVEDGGHVFAGQCYAEIEVMKMVMTLTAVESGCIHYVKRPGAALDPGCVLAKMQLDNPSKVQQAELHTGSLPRIQSTALRGEKLHRVFHYVLDNLVNVMNGYCLPDPFFSSKVKDWVERLMKTLRDPSLPLLELQDIMTSVSGRIPPNVEKSIKKEMAQYASNITSVLCQFPSQQIANILDSHAATLNRKSEREVFFMNTQSIVQLVQRYRSGIRGHMKAVVMDLLRQYLRVETQFQNGHYDKCVFALREENKSDMNTVLNYIFSHAQVTKKNLLVTMLIDQLCGRDPTLTDELLNILTELTQLSKTTNAKVALRARQVLIASHLPSYELRHNQVESIFLSAIDMYGHQFCIENLQKLILSETSIFDVLPNFFYHSNQVVRMAALEVYVRRAYIAYELNSVQHRQLKDNTCVVEFQFMLPTSHPNRGNIPTLNRMSFSSNLNHYGMTHVASVSDVLLDNSFTPPCQRMGGMVSFRTFEDFVRIFDEVMGCFSDSPPQSPTFPEAGHTSLYDEDKVPRDEPIHILNVAIKTDCDIEDDRLAAMFREFTQQNKATLVDHGIRRLTFLVAQKDFRKQVNYEVDRRFHREFPKFFTFRARDKFEEDRIYRHLEPALAFQLELNRMRNFDLTAIPCANHKMHLYLGAAKVEVGTEVTDYRFFVRAIIRHSDLVTKEASFEYLQNEGERLLLEAMDELEVAFNNTNVRTDCNHIFLNFVPTVIMDPSKIEESVRSMVMRYGSRLWKLRVLQAELKINIRLTPTGKAIPIRLFLTNESGYYLDISLYKEVTDSRTAQIMFQAYGDKQGPLHGMLINTPYVTKDLLQSKRFQAQSLGTTYIYDIPEMFRQSLIKLWESMSTQAFLPSPPLPSDMLTYTELVLDDQGQLVHMNRLPGGNEIGMVAWKMTFKSPEYPEGRDIIVIGNDITYRIGSFGPQEDLLFLRASELARAEGIPRIYVSANSGARIGLAEEIRHMFHVAWVDPEDPYKGYRYLYLTPQDYKRVSALNSVHCEHVEDEGESRYKITDIIGKEEGIGPENLRGSGMIAGESSLAYNEIITISLVTCRAIGIGAYLVRLGQRTIQVENSHLILTGAGALNKVLGREVYTSNNQLGGIQIMHNNGVTHCTVCDDFEGVFTVLHWLSYMPKSVHSSVPLLNSKDPIDRIIEFVPTKTPYDPRWMLAGRPHPTQKGQWLSGFFDYGSFSEIMQPWAQTVVVGRARLGGIPVGVVAVETRTVELSIPADPANLDSEAKIIQQAGQVWFPDSAFKTYQAIKDFNREGLPLMVFANWRGFSGGMKDMYDQVLKFGAYIVDGLRECCQPVLVYIPPQAELRGGSWVVIDSSINPRHMEMYADRESRGSVLEPEGTVEIKFRRKDLVKTMRRVDPVYIHLAERLGTPELSTAERKELENKLKEREEFLIPIYHQVAVQFADLHDTPGRMQEKGVISDILDWKTSRTFFYWRLRRLLLEDLVKKKIHNANPELTDGQIQAMLRRWFVEVEGTVKAYVWDNNKDLAEWLEKQLTEEDGVHSVIEENIKCISRDYVLKQIRSLVQANPEVAMDSIIHMTQHISPTQRAEVIRILSTMDSPST

SEQ ID NO: 21506 - protein, 10 aa, Artificial Sequence
  Synthetic polypeptide
SQLLRRLSVR

SEQ ID NO: 21507 - protein, 59 aa, Artificial Sequence
  Synthetic polypeptide
GWARWLTPIIPALWEAEAGGSRGQEFEASLANMVFLEVDIYSDSKNYKSCKSSFWRNNG

SEQ ID NO: 21508 - protein, 2394 aa, Artificial Sequence
  Synthetic polypeptide
SQHFGRPRQVDHEVRSSRPAWPIWSFWKWISTQTVRIIRAVRAHFGGIMDEPSPLAQPLELNQHSRFIIGSVSEDNSEDEISNLVKLDLLEEKEGSLSPASVGSDTLSDLGISSLQDGLALHIRSSMSGLHLVKQGRDRKKIDSQRDFTVASPAEFVTRFGGNKVIEKVLIANNGIAAVKCMRSIRRWSYEMFRNERAIRFVVMVTPEDLKANAEYIKMADHYVPVPGGPNNNNYANVELILDIAKRIPVQAVWAGWGHASENPKLPELLLKNGIAFMGPPSQAMWALGDKIASSIVAQTAGIPTLPWSGSGLRVDWQENDFSKRILNVPQELYEKGYVKDVDDGLQAAEEVGYPVMIKASEGGGGKGIRKVNNADDFPNLFRQVQAEVPGSPIFVMRLAKQSRHLEVQILADQYGNAISLFGRDCSVQRRHQKIIEEAPATIATPAVFEHMEQCAVKLAKMVGYVSAGTVEYLYSQDGSFYFLELNPRLQVEHPCTEMVADVNLPAAQLQIAMGIPLYRIKDIRMMYGVSPWGDSPIDFEDSAHVPCPRGHVIAARITSENPDEGFKPSSGTVQELNFRSNKNVWGYFSVAAAGGLHEFADSQFGHCFSWGENREEAISNMVVALKELSIRGDFRTTVEYLIKLLETESFQMNRIDTGWLDRLIAEKVQAERPDTMLGVVCGALHVADVSLRNSVSNFLHSLERGQVLPAHTLLNTVDVELIYEGVKYVLKVTRQSPNSYVVIMNGSCVEVDVHRLSDGGLLLSYDGSSYTTYMKEEVDRYRITIGNKTCVFEKENDPSVMRSPSAGKLIQYIVEDGGHVFAGQCYAEIEVMKMVMTLTAVESGCIHYVKRPGAALDPGCVLAKMQLDNPSKVQQAELHTGSLPRIQSTALRGEKLHRVFHYVLDNLVNVMNGYCLPDPFFSSKVKDWVERLMKTLRDPSLPLLELQDIMTSVSGRIPPNVEKSIKKEMAQYASNITSVLCQFPSQQIANILDSHAATLNRKSEREVFFMNTQSIVQLVQRYRSGIRGHMKAVVMDLLRQYLRVETQFQNGHYDKCVFALREENKSDMNTVLNYIFSHAQVTKKNLLVTMLIDQLCGRDPTLTDELLNILTELTQLSKTTNAKVALRARQVLIASHLPSYELRHNQVESIFLSAIDMYGHQFCIENLQKLILSETSIFDVLPNFFYHSNQVVRMAALEVYVRRAYIAYELNSVQHRQLKDNTCVVEFQFMLPTSHPNRGNIPTLNRMSFSSNLNHYGMTHVASVSDVLLDNSFTPPCQRMGGMVSFRTFEDFVRIFDEVMGCFSDSPPQSPTFPEAGHTSLYDEDKVPRDEPIHILNVAIKTDCDIEDDRLAAMFREFTQQNKATLVDHGIRRLTFLVAQKDFRKQVNYEVDRRFHREFPKFFTFRARDKFEEDRIYRHLEPALAFQLELNRMRNFDLTAIPCANHKMHLYLGAAKVEVGTEVTDYRFFVRAIIRHSDLVTKEASFEYLQNEGERLLLEAMDELEVAFNNTNVRTDCNHIFLNFVPTVIMDPSKIEESVRSMVMRYGSRLWKLRVLQAELKINIRLTPTGKAIPIRLFLTNESGYYLDISLYKEVTDSRTAQIMFQAYGDKQGPLHGMLINTPYVTKDLLQSKRFQAQSLGTTYIYDIPEMFRQSLIKLWESMSTQAFLPSPPLPSDMLTYTELVLDDQGQLVHMNRLPGGNEIGMVAWKMTFKSPEYPEGRDIIVIGNDITYRIGSFGPQEDLLFLRASELARAEGIPRIYVSANSGARIGLAEEIRHMFHVAWVDPEDPYKGYRYLYLTPQDYKRVSALNSVHCEHVEDEGESRYKITDIIGKEEGIGPENLRGSGMIAGESSLAYNEIITISLVTCRAIGIGAYLVRLGQRTIQVENSHLILTGAGALNKVLGREVYTSNNQLGGIQIMHNNGVTHCTVCDDFEGVFTVLHWLSYMPKSVHSSVPLLNSKDPIDRIIEFVPTKTPYDPRWMLAGRPHPTQKGQWLSGFFDYGSFSEIMQPWAQTVVVGRARLGGIPVGVVAVETRTVELSIPADPANLDSEAKIIQQAGQVWFPDSAFKTYQAIKDFNREGLPLMVFANWRGFSGGMKDMYDQVLKFGAYIVDGLRECCQPVLVYIPPQAELRGGSWVVIDSSINPRHMEMYADRESRGSVLEPEGTVEIKFRRKDLVKTMRRVDPVYIHLAERLGTPELSTAERKELENKLKEREEFLIPIYHQVAVQFADLHDTPGRMQEKGVISDILDWKTSRTFFYWRLRRLLLEDLVKKKIHNANPELTDGQIQAMLRRWFVEVEGTVKAYVWDNNKDLAEWLEKQLTEEDGVHSVIEENIKCISRDYVLKQIRSLVQANPEVAMDSIIHMTQHISPTQRAEVIRILSTMDSPST

SEQ ID NO: 21509 - protein, 43 aa, Artificial Sequence
  Synthetic polypeptide
MGTVAHTYNPSTLGGRGRWITRSGVRGQPGQYGLSGSGYLLRQ

SEQ ID NO: 21510 - protein, 125 aa, Artificial Sequence
  Synthetic polypeptide
SQHFGRPRQVDHEVRSSRPAWPIWSFWKWISTQTVRIIRAVRAHFGGIMDEPSPLAQPLELNQHSRFIIGSVSEDNSEDEISNLVKLDLLEEKEGSLSPASVGSDTLSDLGISSLQDGLALHIRL

SEQ ID NO: 21511 - protein, 86 aa, Artificial Sequence
  Synthetic polypeptide
CQLLWKAEADGSPEWNLNSEGKSRGSKNTGQQALPIFVVPEPTITSRRHGRKSALNALCSQKFSSISRTVVLASSGSAGKLTLIPA

SEQ ID NO: 21512 - protein, 25 aa, Artificial Sequence
  Synthetic polypeptide
PSAVAHSYNASYFGRPRRMDHLSGI

SEQ ID NO: 21513 - protein, 333 aa, Artificial Sequence
  Synthetic polypeptide
AQEFETSLDSIGRPCFYKNKNILVTTPNRLIYLLKQDPPGIDLASVEWLVVDESDKLFEDGKTGFRDQLASIFLACTSHKVRRAMFSATFAYDVEQWCKLNLDNVISVSIGARNSAVETVEQELLFVGSETGKLLAMRELVKKGFNPPVLVFVQSIERAKELFHELIYEGINVDVIHAERTQQQRDNTVHSFRAGKIWVLICTALLARGIDFKGVNLVINYDFPTSSVEYIHRIGRTGRAGNKGKAITFFTEDDKPLLRSVANVIQQAGCPVPEYIKGFQKLLSKQKKKMIKKPLERESISTTPKCFLEKAKDKQKKVTGQNSKKKVALEDKS

SEQ ID NO: 21514 - protein, 12 aa, Artificial Sequence
  Synthetic polypeptide
GDPVSTKIKIFL

SEQ ID NO: 21515 - protein, 37 aa, Artificial Sequence
  Synthetic polypeptide
MMNCTSITMEYYLVIKRNCFPRRRCYYTVDVICRSKD

SEQ ID NO: 21516 - protein, 505 aa, Artificial Sequence
  Synthetic polypeptide
NEIASQEEGATIQWMSSVEAKIEDKKVQRESKLTSGKLENLRKEKINFLRNKHKIHVQGTDLPDPIATFQQLDQEYKINSRLLQNILDAGFQMPTPIQMQAIPVMLHGRELLASAPTGSGKTLAFSIPILMQLKQPANKGFRALIISPTRELASQIHRELIKISEGTGFRIHMIHKAAVAAKKFGPKSSKKFDILVTTPNRLIYLLKQDPPGIDLASVEWLVVDESDKLFEDGKTGFRDQLASIFLACTSHKVRRAMFSATFAYDVEQWCKLNLDNVISVSIGARNSAVETVEQELLFVGSETGKLLAMRELVKKGFNPPVLVFVQSIERAKELFHELIYEGINVDVIHAERTQQQRDNTVHSFRAGKIWVLICTALLARGIDFKGVNLVINYDFPTSSVEYIHRIGRTGRAGNKGKAITFFTEDDKPLLRSVANVIQQAGCPVPEYIKGFQKLLSKQKKKMIKKPLERESISTTPKCFLEKAKDKQKKVTGQNSKKKVALEDKS

SEQ ID NO: 21517 - protein, 46 aa, Artificial Sequence
  Synthetic polypeptide
PKAGNDPNVPQQVNDELYIHYNGILPSNKTKLLPKKKVLLYSGCHL

SEQ ID NO: 21518 - protein, 21 aa, Artificial Sequence
  Synthetic polypeptide
EAKEPSACGVIPSLRTAVNLL

SEQ ID NO: 21519 - protein, 18 aa, Artificial Sequence
  Synthetic polypeptide
SQHFERPRNLQPVVSSQV

SEQ ID NO: 21520 - protein, 144 aa, Artificial Sequence
  Synthetic polypeptide
PGGVAHACNPSTLRGQGTFSLWCHPKFEDRCQSVVEFIKRAIMHSKNGKFLYFLRSRVPGLPPTPVQLLYPVSRFSNVKSLQHLCRFRIRQLVRIDHIPDLPLPKPLISYIRKFYYYDPQEEVYLSLKEAQLISKQKQEVEPST

SEQ ID NO: 21521 - protein, 11 aa, Artificial Sequence
  Synthetic polypeptide
EAKEPSACGVI

SEQ ID NO: 21522 - protein, 16 aa, Artificial Sequence
  Synthetic polypeptide
SQHFERPRNLQPVVSS

SEQ ID NO: 21523 - protein, 24 aa, Artificial Sequence
  Synthetic polypeptide
PGGVAHACNPSTLRGQGTFSLWCH

SEQ ID NO: 21524 - protein, 34 aa, Artificial Sequence
  Synthetic polypeptide
QAGSSWTSVSFSTNEAIEMAPGHTATGPKRWVLS

SEQ ID NO: 21525 - protein, 1476 aa, Artificial Sequence
  Synthetic polypeptide
KWPRATLPLGPRDGCSPRRPFPWQGPRTLLLYKSPQDGFGFTLRHFIVYPPESAVHCSLKEEENGGRGGGPSPRYRLEPMDTIFVKNVKEDGPAHRAGLRTGDRLVKVNGESVIGKTYSQVIALIQNSDDTLELSIMPKDEDILQLAYSQDAYLKGNEPYSGEARSIPEPPPICYPRKTYAPPARASTRATMVPEPTSALPSDPRSPAAWSDPGLRVPPAARAHLDNSSLGMSQPRPSPGAFPHLSSEPRTPRAFPEPGSRVPPSRLECQQALSHWLSNQVPRRAGERRCPAMAPRARSASQDRLEEVAAPRPWPCSTSQDALSQLGQEGWHRARSDDYLSRATRSAEALGPGALVSPRFERCGWASQRSSARTPACPTRDLPGPQAPPPSGLQGLDDLGYIGYRSYSPSFQRRTGLLHALSFRDSPFGGLPTFNLAQSPASFPPEASEPPRVVRPEPSTRALEPPAEDRGDEVVLRQKPPTGRKVQLTPARQMNLGFGDESPEPEASGRGERLGRKVAPLATTEDSLASIPFIDEPTSPSIDLQAKHVPASAVVSSAMNSAPVLGTSPSSPTFTFTLGRHYSQDCSSIKAGRRSSYLLAITTERSKSCDDGLNTFRDEGRVLRRLPNRIPSLRMLRSFFTDGSLDSWGTSEDADAPSKRHSTSDLSDATFSDIRREGWLYYKQILTKKGKKAGSGLRQWKRVYAALRARSLSLSKERREPGPAAAGAAAAGAGEDEAAPVCIGSCLVDISYSETKRRHVFRLTTADFCEYLFQAEDRDDMLGWIRAIRENSRAEGEDPGCANQALISKKLNDYRKVSHSSGPKADSSPKGSRGLGGLKSEFLKQSAARGLRTQDLPAGSKDDSAAAPKTPWGINIIKKNKKAAPRAFGVRLEECQPATENQRVPLIVAACCRIVEARGLESTGIYRVPGNNAVVSSLQEQLNRGPGDINLQDERWQDLNVISSLLKSFFRKLPEPLFTDDKYNDFIEANRIEDARERMRTLRKLIRDLPGHYYETLKFLVGHLKTIADHSEKNKMEPRNLALVFGPTLVRTSEDNMTDMVTHMPDRYKIVETLIQHSDWFFSDEEDKGERTPVGDKEPQAVPNIEYLLPNIGRTVPPGDPGSDSTTCSSAKSKGSWAPKKEPYAREMLAISFISAVNRKRKKRREARGLGSSTDDDSEQEAHKPGAGATAPGTQERPQGPLPGAVAPEAPGRLSPPAAPEERPAADTRSIVSGYSTLSTMDRSVCSGASGRRAGAGDEADDERSELSHVETDTEGAAGAGPGGRLTRRPSFSSHHLMPCDTLARRRLARGRPDGEGAGRGGPRAPEPPGSASSSSQESLRPPAAALASRPSRMEALRLRLRGTADDMLAVRLRRPLSPETRRRRSSWRRHTVVVQSPLTDLNFNEWKELGGGGPPEPAGARAHSDNKDSGLSSLESTKARAPSSAASQPPAPGDTGSLQSQPPRRSAASRLHQCL

SEQ ID NO: 21526 - protein, 61 aa, Artificial Sequence
  Synthetic polypeptide
GHRNGPGPHCHWAQEMGALLGAPSPGRGRGRCCCTKVPRTALASLCATSSCTHPSRPCTAA

SEQ ID NO: 21527 - protein, 1129 aa, Artificial Sequence
  Synthetic polypeptide
KWPRATLPLGPRDGCSPRRPFPWQGPRTLLLYKSPQDGFGFTLRHFIVYPPESAVHCSLKEEENGGRGGGPSPRYRLEPMDTIFVKNVKEDGPAHRAGLRTGDRLVKVNGESVIGKTYSQVIALIQNSDDTLELSIMPKDEDILQLAYSQDAYLKGNEPYSGEARSIPEPPPICYPRKTYAPPARASTRATMVPEPTSALPSDPRSPAAWSDPGLRVPPAARAHLDNSSLGMSQPRPSPGAFPHLSSEPRTPRAFPEPGSRVPPSRLECQQALSHWLSNQVPRRAGERRCPAMAPRARSASQDRLEEVAAPRPWPCSTSQDALSQLGQEGWHRARSDDYLSRATRSAEALGPGALVSPRFERCGWASQRSSARTPACPTRDLPGPQAPPPSGLQGLDDLGYIGYRSYSPSFQRRTGLLHALSFRDSPFGGLPTFNLAQSPASFPPEASEPPRVVRPEPSTRALEPPAEDRGDEVVLRQKPPTGRKVQLTPARQMNLGFGDESPEPEASGRGERLGRKVAPLATTEDSLASIPFIDEPTSPSIDLQAKHVPASAVVSSAMNSAPVLGTSPSSPTFTFTLGRHYSQDCSSIKAGRRSSYLLAITTERSKSCDDGLNTFRDEGRVLRRLPNRIPSLRMLRSFFTDGSLDSWGTSEDADAPSKRHSTSDLSDATFSDIRREGWLYYKQILTKKGKKAGSGLRQWKRVYAALRARSLSLSKERREPGPAAAGAAAAGAGEDEAAPVCIGSCLVDISYSETKRRHVFRLTTADFCEYLFQAEDRDDMLGWIRAIRENSRAEGEDPGCANQALISKKLNDYRKVSHSSGPKADSSPKGSRGLGGLKSEFLKQSAARGLRTQDLPAGSKDDSAAAPKTPWGINIIKKNKKAAPRAFGVRLEECQPATENQRVPLIVAACCRIVEARGLESTGIYRVPGNNAVVSSLQEQLNRGPGDINLQDERWQDLNVISSLLKSFFRKLPEPLFTDDKYNDFIEANRIEDARERMRTLRKLIRDLPGHYYETLKFLVGHLKTIADHSEKNKMEPRNLALVFGPTLVRTSEDNMTDMVTHMPDRYKIVETLIQHSDWFFSDEEDKGERTPVGDKEPQAVPNIEYLLPNIGRTVPPGDPGSADLLEI

SEQ ID NO: 21528 - protein, 13 aa, Artificial Sequence
  Synthetic polypeptide
CFTATGPKRWVLS

SEQ ID NO: 21529 - protein, 1472 aa, Artificial Sequence
  Synthetic polypeptide
ASLPLGPRDGCSPRRPFPWQGPRTLLLYKSPQDGFGFTLRHFIVYPPESAVHCSLKEEENGGRGGGPSPRYRLEPMDTIFVKNVKEDGPAHRAGLRTGDRLVKVNGESVIGKTYSQVIALIQNSDDTLELSIMPKDEDILQLAYSQDAYLKGNEPYSGEARSIPEPPPICYPRKTYAPPARASTRATMVPEPTSALPSDPRSPAAWSDPGLRVPPAARAHLDNSSLGMSQPRPSPGAFPHLSSEPRTPRAFPEPGSRVPPSRLECQQALSHWLSNQVPRRAGERRCPAMAPRARSASQDRLEEVAAPRPWPCSTSQDALSQLGQEGWHRARSDDYLSRATRSAEALGPGALVSPRFERCGWASQRSSARTPACPTRDLPGPQAPPPSGLQGLDDLGYIGYRSYSPSFQRRTGLLHALSFRDSPFGGLPTFNLAQSPASFPPEASEPPRVVRPEPSTRALEPPAEDRGDEVVLRQKPPTGRKVQLTPARQMNLGFGDESPEPEASGRGERLGRKVAPLATTEDSLASIPFIDEPTSPSIDLQAKHVPASAVVSSAMNSAPVLGTSPSSPTFTFTLGRHYSQDCSSIKAGRRSSYLLAITTERSKSCDDGLNTFRDEGRVLRRLPNRIPSLRMLRSFFTDGSLDSWGTSEDADAPSKRHSTSDLSDATFSDIRREGWLYYKQILTKKGKKAGSGLRQWKRVYAALRARSLSLSKERREPGPAAAGAAAAGAGEDEAAPVCIGSCLVDISYSETKRRHVFRLTTADFCEYLFQAEDRDDMLGWIRAIRENSRAEGEDPGCANQALISKKLNDYRKVSHSSGPKADSSPKGSRGLGGLKSEFLKQSAARGLRTQDLPAGSKDDSAAAPKTPWGINIIKKNKKAAPRAFGVRLEECQPATENQRVPLIVAACCRIVEARGLESTGIYRVPGNNAVVSSLQEQLNRGPGDINLQDERWQDLNVISSLLKSFFRKLPEPLFTDDKYNDFIEANRIEDARERMRTLRKLIRDLPGHYYETLKFLVGHLKTIADHSEKNKMEPRNLALVFGPTLVRTSEDNMTDMVTHMPDRYKIVETLIQHSDWFFSDEEDKGERTPVGDKEPQAVPNIEYLLPNIGRTVPPGDPGSDSTTCSSAKSKGSWAPKKEPYAREMLAISFISAVNRKRKKRREARGLGSSTDDDSEQEAHKPGAGATAPGTQERPQGPLPGAVAPEAPGRLSPPAAPEERPAADTRSIVSGYSTLSTMDRSVCSGASGRRAGAGDEADDERSELSHVETDTEGAAGAGPGGRLTRRPSFSSHHLMPCDTLARRRLARGRPDGEGAGRGGPRAPEPPGSASSSSQESLRPPAAALASRPSRMEALRLRLRGTADDMLAVRLRRPLSPETRRRRSSWRRHTVVVQSPLTDLNFNEWKELGGGGPPEPAGARAHSDNKDSGLSSLESTKARAPSSAASQPPAPGDTGSLQSQPPRRSAASRLHQCL

SEQ ID NO: 21530 - protein, 54 aa, Artificial Sequence
  Synthetic polypeptide
LHCHWAQEMGALLGAPSPGRGRGRCCCTKVPRTALASLCATSSCTHPSRPCTAA

SEQ ID NO: 21531 - protein, 1125 aa, Artificial Sequence
  Synthetic polypeptide
ASLPLGPRDGCSPRRPFPWQGPRTLLLYKSPQDGFGFTLRHFIVYPPESAVHCSLKEEENGGRGGGPSPRYRLEPMDTIFVKNVKEDGPAHRAGLRTGDRLVKVNGESVIGKTYSQVIALIQNSDDTLELSIMPKDEDILQLAYSQDAYLKGNEPYSGEARSIPEPPPICYPRKTYAPPARASTRATMVPEPTSALPSDPRSPAAWSDPGLRVPPAARAHLDNSSLGMSQPRPSPGAFPHLSSEPRTPRAFPEPGSRVPPSRLECQQALSHWLSNQVPRRAGERRCPAMAPRARSASQDRLEEVAAPRPWPCSTSQDALSQLGQEGWHRARSDDYLSRATRSAEALGPGALVSPRFERCGWASQRSSARTPACPTRDLPGPQAPPPSGLQGLDDLGYIGYRSYSPSFQRRTGLLHALSFRDSPFGGLPTFNLAQSPASFPPEASEPPRVVRPEPSTRALEPPAEDRGDEVVLRQKPPTGRKVQLTPARQMNLGFGDESPEPEASGRGERLGRKVAPLATTEDSLASIPFIDEPTSPSIDLQAKHVPASAVVSSAMNSAPVLGTSPSSPTFTFTLGRHYSQDCSSIKAGRRSSYLLAITTERSKSCDDGLNTFRDEGRVLRRLPNRIPSLRMLRSFFTDGSLDSWGTSEDADAPSKRHSTSDLSDATFSDIRREGWLYYKQILTKKGKKAGSGLRQWKRVYAALRARSLSLSKERREPGPAAAGAAAAGAGEDEAAPVCIGSCLVDISYSETKRRHVFRLTTADFCEYLFQAEDRDDMLGWIRAIRENSRAEGEDPGCANQALISKKLNDYRKVSHSSGPKADSSPKGSRGLGGLKSEFLKQSAARGLRTQDLPAGSKDDSAAAPKTPWGINIIKKNKKAAPRAFGVRLEECQPATENQRVPLIVAACCRIVEARGLESTGIYRVPGNNAVVSSLQEQLNRGPGDINLQDERWQDLNVISSLLKSFFRKLPEPLFTDDKYNDFIEANRIEDARERMRTLRKLIRDLPGHYYETLKFLVGHLKTIADHSEKNKMEPRNLALVFGPTLVRTSEDNMTDMVTHMPDRYKIVETLIQHSDWFFSDEEDKGERTPVGDKEPQAVPNIEYLLPNIGRTVPPGDPGSADLLEI

SEQ ID NO: 21532 - protein, 26 aa, Artificial Sequence
  Synthetic polypeptide
EKRMPGYKEGLFIVEIICLPIVFEDQ

SEQ ID NO: 21533 - protein, 366 aa, Artificial Sequence
  Synthetic polypeptide
FLKINELSNVPVPVMLMPDDFKAYSKIKVDNHLFNKENLPSRFKFKEYCPMVFRNLRERFGIDDQDYQNSVTRSAPINSDSQGRCGTRFLTTYDRRFVIKTVSSEDVAEMHNILKKYHQFIVECHGNTLLPQFLGMYRLTVDGVETYMVVTRNVFSHRLTVHRKYDLKGSTVAREASDKEKAKDLPTFKDNDFLNEGQKLHVGEESKKNFLEKLKRDVEFLAQLKIMDYSLLVGIHDVDRAEQEEMEVEERAEDEECENDGVGGNLLCSYGTPPDSPGNLLSFPRFFGPGEFDPSVDVYAMKSHESSPKKEVYFMAIIDILTPYDTKKKAAHAAKTVKHGAGAEISTVNPEQYSKRFNEFMSNILT

SEQ ID NO: 21534 - protein, 17 aa, Artificial Sequence
  Synthetic polypeptide
DQPEQHGRRRRRKNERY

SEQ ID NO: 21535 - protein, 23 aa, Artificial Sequence
  Synthetic polypeptide
AQEIETSLSNMEEGGGEKTRGIK

SEQ ID NO: 21536 - protein, 285 aa, Artificial Sequence
  Synthetic polypeptide
ATWKKEEEKKREVLNNPVKMKKIKELLQMSLEKKEKKKKKEKKKKHKKHKHRSSSSDRSSSEDEHSAGRSQKKMANSSPVLSKVPGYGLQVRNSDRNQGLQGPLTAEQKRGHGMKNHSRSRSSSHSPPRHASKKSTREAGSRDRRSRSLGRRSRSPRPSKLHNSKVNRRETGQTRSPSPKKEVYQRRHAPGYTRKLSAEELERKRQEMMENAKWREEERLNILKRHAKDEEREQRLEKLDSRDGKFIHRMKLESASTSSLEDRVKRNIYSLQRTSVALEKNFMKR

SEQ ID NO: 21537 - protein, 69 aa, Artificial Sequence
  Synthetic polypeptide
ATWKKEEEKKREVLNNPVKMKKIKELLQMSLEKKEKKKKKEKKKKHKKHKHRSSSSDRSSSEDEHSAGR

SEQ ID NO: 21538 - protein, 28 aa, Artificial Sequence
  Synthetic polypeptide
ELNKTWWVLWCEIPDFLGSSGRSCNQLC

SEQ ID NO: 21539 - protein, 141 aa, Artificial Sequence
  Synthetic polypeptide
SRSSIRRGGSSGAKFRISLGLPVGAVINCADNTGAKNLYIISVKGIKGRLNRLPAAGVGDMVMATVKKGKPELRKKVHPAVVIRQRKSYRRKDGVFLYFEDNAGVIVNNKGEMKGSAITGPVAKECADLWPRIASNAGSIA

SEQ ID NO: 21540 - protein, 115 aa, Artificial Sequence
  Synthetic polypeptide
SRSSIRRGGSSGAKFRISLGLPVGAVINCADNTGAKNLYIISVKGIKGRLNRLPAAGVGDMVMATVKKGKPELRKKVLLCHTGWSAVTPLKLTVTLNCWTWNPPAVAFKGLQLQV

SEQ ID NO: 21541 - protein, 123 aa, Artificial Sequence
  Synthetic polypeptide
SRSSIRRGGSSGAKFRISLGLPVGAVINCADNTGAKNLYIISVKGIKGRLNRLPAAGVGDMVMATVKKGKPELRKKVHPAVVIRQRKSYRRKDGVFLYFEDNAGVIVNNKGEMKGRKSVQLVP

SEQ ID NO: 21542 - protein, 88 aa, Artificial Sequence
  Synthetic polypeptide
SRSSIRRGGSSGAKFRISLGLPVGAVINCADNTGAKNLYIISVKGIKGRLNRLPAAGVGDMVMATVKKGKPELRKKVHPAVVIRQRKS

SEQ ID NO: 21543 - protein, 56 aa, Artificial Sequence
  Synthetic polypeptide
YISPSNILHTAITYYIFCLVSNILLHLHPSRMTWWVLWCEIPDFLGSSGRSCNQLC

SEQ ID NO: 21544 - protein, 27 aa, Artificial Sequence
  Synthetic polypeptide
YPPPPAPQQNDVVGPLVRNSGFPWVFR

SEQ ID NO: 21545 - protein, 337 aa, Artificial Sequence
  Synthetic polypeptide
PPLGVCVPGDSDFFATLCVPANDHGSIARIHFGVTNKFGKFANTKSVNNKGLVNVPEEPIEEEEEEEEEEEEEEEEDQDMDADDRVVVEYHEELPALKQPRERSASRRSSASSSDSDEMDYDLELKMISTPSPKKSMKMTMYADEVESQLKNIRNSMRADSVSSSNIKNRIGNKLPPEKFADVRHLLDEKRQHSRPRPPVSSTKSDIRQRLGKRPHSPEKAFSSNPVVRREPSSDVHSRLGVPRQDSKGLYADTREKKSGNLWTRLGSAPKTKEKNTKKVDHRAPGAEEDDSELQRAWGALIKEKEQSRQKKSRLDNLPSLQIEVSRESSSGSEAES

SEQ ID NO: 21546 - protein, 4 aa, Artificial Sequence
  Synthetic polypeptide
IIKG

SEQ ID NO: 21547 - protein, 313 aa, Artificial Sequence
  Synthetic polypeptide
WDPISTKNKSTCTSLSKFCSKLRHLDLASCTSITNMSLKALSEGCPLLEQLNISWCDQVTKDGIQALVRGCGGLKALFLKGCTQLEDEALKYIGAHCPELVTLNLQTCLQITDEGLITICRGCHKLQSLCASGCSNITDAILNALGQNCPRLRILEVARCSQLTDVGFTTLARNCHELEKMDLEECVQITDSTLIQLSIHCPRLQVLSLSHCELITDDGIRHLGNGACAHDQLEVIELDNCPLITDASLEHLKSCHSLERIELYDCQQITRAGIKRLRTHLPNIKVHAYFAPVTPPPSVGGSRQRFCRCCIIL

SEQ ID NO: 21548 - protein, 39 aa, Artificial Sequence
  Synthetic polypeptide
DQLGQRSGTPSLQKIKVHVLALASSVPNSGTLTWLPVHQ

SEQ ID NO: 21549 - protein, 4 aa, Artificial Sequence
  Synthetic polypeptide
KYMY

SEQ ID NO: 21550 - protein, 24 aa, Artificial Sequence
  Synthetic polypeptide
SCLLIATALKPGQPIKTTFQKYMY

SEQ ID NO: 21551 - protein, 319 aa, Artificial Sequence
  Synthetic polypeptide
PLHSSLGNLSRPHFKNTCTSLSKFCSKLRHLDLASCTSITNMSLKALSEGCPLLEQLNISWCDQVTKDGIQALVRGCGGLKALFLKGCTQLEDEALKYIGAHCPELVTLNLQTCLQITDEGLITICRGCHKLQSLCASGCSNITDAILNALGQNCPRLRILEVARCSQLTDVGFTTLARNCHELEKMDLEECVQITDSTLIQLSIHCPRLQVLSLSHCELITDDGIRHLGNGACAHDQLEVIELDNCPLITDASLEHLKSCHSLERIELYDCQQITRAGIKRLRTHLPNIKVHAYFAPVTPPPSVGGSRQRFCRCCIIL

SEQ ID NO: 21552 - protein, 50 aa, Artificial Sequence
  Synthetic polypeptide
RLQCTVIMPVNSHCTQAWATYQDHISKIHVLALASSVPNSGTLTWLPVHQ

SEQ ID NO: 21553 - protein, 41 aa, Artificial Sequence
  Synthetic polypeptide
TEIMPLHSSLDSRDIFFSRCCYPVPLCSGLQGLECSGSGWQ

SEQ ID NO: 21554 - protein, 422 aa, Artificial Sequence
  Synthetic polypeptide
AEARQPLEPRSCHCTPAWTAGIFSFLDVVTLCRCAQVSRAWNVLALDGSNWQRIDLFDFQRDIEGRVVENISKRCGGFLRKLSLRGCLGVGDNALRTFAQNCRNIEVLNLNGCTKTTDATCTSLSKFCSKLRHLDLASCTSITNMSLKALSEGCPLLEQLNISWCDQVTKDGIQALVRGCGGLKALFLKGCTQLEDEALKYIGAHCPELVTLNLQTCLQITDEGLITICRGCHKLQSLCASGCSNITDAILNALGQNCPRLRILEVARCSQLTDVGFTTLARNCHELEKMDLEECVQITDSTLIQLSIHCPRLQVLSLSHCELITDDGIRHLGNGACAHDQLEVIELDNCPLITDASLEHLKSCHSLERIELYDCQQITRAGIKRLRTHLPNIKVHAYFAPVTPPPSVGGSRQRFCRCCIIL

SEQ ID NO: 21555 - protein, 31 aa, Artificial Sequence
  Synthetic polypeptide
SQLVGRLRHDNHLNRDHATALQPGQPGYFLF

SEQ ID NO: 21556 - protein, 390 aa, Artificial Sequence
  Synthetic polypeptide
AEARQPLEPRSCHCTPAWTAGIFSFLDVVTLCRCAQVSRAWNVLALDGSNWQRIDLFDFQRDIEGRVVENISKRCGGFLRKLSLRGCLGVGDNALRTFAQNCRNIEVLNLNGCTKTTDAEGCPLLEQLNISWCDQVTKDGIQALVRGCGGLKALFLKGCTQLEDEALKYIGAHCPELVTLNLQTCLQITDEGLITICRGCHKLQSLCASGCSNITDAILNALGQNCPRLRILEVARCSQLTDVGFTTLARNCHELEKMDLEECVQITDSTLIQLSIHCPRLQVLSLSHCELITDDGIRHLGNGACAHDQLEVIELDNCPLITDASLEHLKSCHSLERIELYDCQQITRAGIKRLRTHLPNIKVHAYFAPVTPPPSVGGSRQRFCRCCIIL

SEQ ID NO: 21557 - protein, 1138 aa, Artificial Sequence
  Synthetic polypeptide
RWNDLSRKSMKSRSRSPAYSRHSSSHSKKKRSSSRSRHSSISPVRLPLNSSLGAELSRKKKERAAAAAAAKMDGKESKGSPVFLPRKENSSVEAKDSGLESKKLPRSVKLEKSAPDTELVNVTHLNTEVKNSSDTGKVKLDENSEKHLVKDLKAQGTRDSKPIALKEEIVTPKETETSEKETPPPLPTIASPPPPLPTTTPPPQTPPLPPLPPIPALPQQPPLPPSQPAFSQVPASSTSTLPPSTHSKTSAVSSQANSQPPVQVSVKTQVSVTAAIPHLKTSTLPPLPLPPLLPGDDDMDSPKETLPSKPVKKEKEQRTRHLLTDLPLPPELPGGDLSPPDSPEPKAITPPQQPYKKRPKICCPRYGERRQTESDWGKRCVDKFDIIGIIGEGTYGQVYKAKDKDTGELVALKKVRLDNEKEGFPITAIREIKILRQLIHRSVVNMKEIVTDKQDALDFKKDKGAFYLVFEYMDHDLMGLLESGLVHFSEDHIKSFMKQLMEGLEYCHKKNFLHRDIKCSNILLNNSGQIKLADFGLARLYNSEESRPYTNKVITLWYRPPELLLGEERYTPAIDVWSCGCILGELFTKKPIFQANLELAQLELISRLCGSPCPAVWPDVIKLPYFNTMKPKKQYRRRLREEFSFIPSAALDLLDHMLTLDPSKRCTAEQTLQSDFLKDVELSKMAPPDLPHWQDCHELWSKKRRRQRQSGVVVEEPPPSKTSRKETTSGTSTEPVKNSSPAPPQPAPGKVESGAGDAIGLADITQQLNQSELAVLLNLLQSQTDLSIPQMAQLLNIHSNPEMQQQLEALNQSISALTEATSQQQDSETMAPEESLKEAPSAPVILPSAEQTTLEASSTPADMQNILAVLLSQLMKTQEPAGSLEENNSDKNSGPQGPRRTPTMPQEEAAEKRPPEPPGPPPPPPPPPLVEGDLSSAPQELNPAVTAALLQLLSQPEAEPPGHLPHEHQALRPMEYSTRPRPNRTYGNTDGPETGFSAIDTDERNSGPALTESLVQTLVKNRTFSGSLSHLGESSSYQGTGSVQFPGDQDLRFARVPLALHPVVGQPFLKAEGSSNSVVHAETKLQNYGELGPGTTGASSSGAGLHWGGPTQSSAYGKLYRGPTRVPPRGGRGRGVPY

SEQ ID NO: 21558 - protein, 1147 aa, Artificial Sequence
  Synthetic polypeptide
RWNDLSRKSMKSRSRSPAYSRHSSSHSKKKRSSSRSRHSSISPVRLPLNSSLGAELSRKKKERAAAAAAAKMDGKESKGSPVFLPRKENSSVEAKDSGLESKKLPRSVKLEKSAPDTELVNVTHLNTEVKNSSDTGKVKLDENSEKHLVKDLKAQGTRDSKPIALKEEIVTPKETETSEKETPPPLPTIASPPPPLPTTTPPPQTPPLPPLPPIPALPQQPPLPPSQPAFSQVPASSTSTLPPSTHSKTSAVSSQANSQPPVQVSVKTQVSVTAAIPHLKTSTLPPLPLPPLLPGDDDMDSPKETLPSKPVKKEKEQRTRHLLTDLPLPPELPGGDLSPPDSPEPKAITPPQQPYKKRPKICCPRYGERRQTESDWGKRCVDKFDIIGIIGEGTYGQVYKAKDKDTGELVALKKVRLDNEKEGFPITAIREIKILRQLIHRSVVNMKEIVTDKQDALDFKKDKGAFYLVFEYMDHDLMGLLESGLVHFSEDHIKSFMKQLMEGLEYCHKKNFLHRDIKCSNILLNNSGQIKLADFGLARLYNSEESRPYTNKVITLWYRPPELLLGEERYTPAIDVWSCGCILGELFTKKPIFQANLELAQLELISRLCGSPCPAVWPDVIKLPYFNTMKPKKQYRRRLREEFSFIPSAALDLLDHMLTLDPSKRCTAEQTLQSDFLKDVELSKMAPPDLPHWQDCHELWSKKRRRQRQSGVVVEEPPPSKTSRKETTSGTSTEPVKNSSPAPPQPAPGKVESGAGDAIGLADITQQLNQSELAVLLNLLQSQTDLSIPQMAQLLNIHSNPEMQQQLEALNQSISALTEATSQQQDSETMAPEESLKEAPSAPVILPSAEQTTLEASSTPADMQNILAVLLSQLMKTQEPAGSLEENNSDKNSGPQGPRRTPTMPQEEAAACPPHILPPEKRPPEPPGPPPPPPPPPLVEGDLSSAPQELNPAVTAALLQLLSQPEAEPPGHLPHEHQALRPMEYSTRPRPNRTYGNTDGPETGFSAIDTDERNSGPALTESLVQTLVKNRTFSGSLSHLGESSSYQGTGSVQFPGDQDLRFARVPLALHPVVGQPFLKAEGSSNSVVHAETKLQNYGELGPGTTGASSSGAGLHWGGPTQSSAYGKLYRGPTRVPPRGGRGRGVPY

SEQ ID NO: 21559 - protein, 76 aa, Artificial Sequence
  Synthetic polypeptide
GRVRWLTPVIPALWEAEARNQRGAQGPDPEDVRQESRDENWGARHQVAPLGDQERGGAPSFGGGALQRGGGDRGGG

SEQ ID NO: 21560 - protein, 138 aa, Artificial Sequence
  Synthetic polypeptide
SQHFGRLRPEISEELKDLILKMLDKNPETRIGVPDIKLHPWVTKNGEEPLPSEEEHCSVVEVTEEEVKNSVRLIPSWTTVILVKSMLRKRSFGNPFEPQARREERSMSAPGNLLVKEGFGEGGKSPELPGVQEDEAAS

SEQ ID NO: 21561 - protein, 115 aa, Artificial Sequence
  Synthetic polypeptide
SQHFGRLRPEISEELKDLILKMLDKNPETRIGVPDIKLHPWVTKNGEEPLPSEEEHCSVVEVTEEEVKNSVRLIPSWTTVILVKSMLRKRSFGNPFEPQARREERSMSAPGNLLV

SEQ ID NO: 21562 - protein, 96 aa, Artificial Sequence
  Synthetic polypeptide
YLVRVFPKEIQNPWRVEALFWPPLCPQHSARGPASGKYRGVFVEPWMYGPLASRCTALSMGSAHSSTISSWPSTGRSRMSPWCFLRSQKSARSSRT

SEQ ID NO: 21563 - protein, 78 aa, Artificial Sequence
  Synthetic polypeptide
TWLESFPRKSRTPGGWRPCSGRPCVLSTQHGAQHRASTAECLSSLGCMGHWRHVVLLCLWEVPIHRRFHPGPPQEDQE

SEQ ID NO: 21564 - protein, 213 aa, Artificial Sequence
  Synthetic polypeptide
SLSQGNPEPLEGGGLVLAAPVSSALSTGPSIGQVPRSVCRALDVWATGVTLYCFVYGKCPFIDDFILALHRKIKNEPVVFPEEPEISEELKDLILKMLDKNPETRIGVPDIKLHPWVTKNGEEPLPSEEEHCSVVEVTEEEVKNSVRLIPSWTTVILVKSMLRKRSFGNPFEPQARREERSMSAPGNLLVKEGFGEGGKSPELPGVQEDEAAS

SEQ ID NO: 21565 - protein, 190 aa, Artificial Sequence
  Synthetic polypeptide
SLSQGNPEPLEGGGLVLAAPVSSALSTGPSIGQVPRSVCRALDVWATGVTLYCFVYGKCPFIDDFILALHRKIKNEPVVFPEEPEISEELKDLILKMLDKNPETRIGVPDIKLHPWVTKNGEEPLPSEEEHCSVVEVTEEEVKNSVRLIPSWTTVILVKSMLRKRSFGNPFEPQARREERSMSAPGNLLV

SEQ ID NO: 21566 - protein, 14 aa, Artificial Sequence
  Synthetic polypeptide
RIAFSIRLDLSGRL

SEQ ID NO: 21567 - protein, 94 aa, Artificial Sequence
  Synthetic polypeptide
GLLFPSGWTCRDDCKYECMWVTVGLYLQEGHKVPQFHGKWPFSRFLFFQEPASAVASFLNGLASLVMLCRYRTFVPASSPMYHTCVAFAWLSGR

SEQ ID NO: 21568 - protein, 65 aa, Artificial Sequence
  Synthetic polypeptide
DCFFHQAGPVGTTVSMSVCGSPLGSTSRKVTKCLSSMASGPSPGSCSFKSRHRPWPRFSMAWPAW

SEQ ID NO: 21569 - protein, 266 aa, Artificial Sequence
  Synthetic polypeptide
GLLFPSGWTCRDDCKYECMWVTVGLYLQEGHKVPQFHGKWPFSRFLFFQEPASAVASFLNGLASLVMLCRYRTFVPASSPMYHTCVAFAWVSLNAWFWSTVFHTRDTDLTEKMDYFCASTVILHSIYLCCVRTVGLQHPAVVSAFRALLLLMLTVHVSYLSLIRFDYGYNLVANVAIGLVNVVWWLAWCLWNQRRLPHVRKCVVVVLLLQGLSLLELLDFPPLFWVLDAHAIWHISTIPVHVLFFSFLEDDSLYLLKESEDKFKLD

SEQ ID NO: 21570 - protein, 215 aa, Artificial Sequence
  Synthetic polypeptide
GLLFPSGWTCRDDCKYECMWVTVGLYLQEGHKVPQFHGKVSLNAWFWSTVFHTRDTDLTEKMDYFCASTVILHSIYLCCVRTVGLQHPAVVSAFRALLLLMLTVHVSYLSLIRFDYGYNLVANVAIGLVNVVWWLAWCLWNQRRLPHVRKCVVVVLLLQGLSLLELLDFPPLFWVLDAHAIWHISTIPVHVLFFSFLEDDSLYLLKESEDKFKLD

SEQ ID NO: 21571 - protein, 101 aa, Artificial Sequence
  Synthetic polypeptide
DCFFHQAGPVGTTVSMSVCGSPLGSTSRKVTKCLSSMARCPSMHGSGPQFSTPGTLTSQRKWTTSVPPLSSYTQSTCAASGPWGCSTQLWSVPSGLSCCSC

SEQ ID NO: 21572 - protein, 245 aa, Artificial Sequence
  Synthetic polypeptide
GLLFPSGWTCRDDCKYECMWVTVGLYLQEGHKVPQFHGKWPFSRFLFFQEPASAVASFLNGLASLVMLCRYRTFVPASSPMYHTCVAFAWKMDYFCASTVILHSIYLCCVRTVGLQHPAVVSAFRALLLLMLTVHVSYLSLIRFDYGYNLVANVAIGLVNVVWWLAWCLWNQRRLPHVRKCVVVVLLLQGLSLLELLDFPPLFWVLDAHAIWHISTIPVHVLFFSFLEDDSLYLLKESEDKFKLD

SEQ ID NO: 21573 - protein, 100 aa, Artificial Sequence
  Synthetic polypeptide
GLLFPSGWTCRDDCKYECMWVTVGLYLQEGHKVPQFHGKWPFSRFLFFQEPASAVASFLNGLASLVMLCRYRTFVPASSPMYHTCVAFAWMRKLRHSKAK

SEQ ID NO: 21574 - protein, 1280 aa, Artificial Sequence
  Synthetic polypeptide
VPVLPVAHKLYEARANPCQPQLSSLQDGGCSPSLWSMLCRSTESACQAHMCTGTDMKLRLPASPETHLDMLRHLYQGCQVVQGNLELTYLPTNASLSFLQDIQEVQGYVLIAHNQVRQVPLQRLRIVRGTQLFEDNYALAVLDNGDPLNNTTPVTGASPGGLRELQLRSLTEILKGGVLIQRNPQLCYQDTILWKDIFHKNNQLALTLIDTNRSRACHPCSPMCKGSRCWGESSEDCQSLTRTVCAGGCARCKGPLPTDCCHEQCAAGCTGPKHSDCLACLHFNHSGICELHCPALVTYNTDTFESMPNPEGRYTFGASCVTACPYNYLSTDVGSCTLVCPLHNQEVTAEDGTQRCEKCSKPCARVCYGLGMEHLREVRAVTSANIQEFAGCKKIFGSLAFLPESFDGDPASNTAPLQPEQLQVFETLEEITGYLYISAWPDSLPDLSVFQNLQVIRGRILHNGAYSLTLQGLGISWLGLRSLRELGSGLALIHHNTHLCFVHTVPWDQLFRNPHQALLHTANRPEDECVGEGLACHQLCARGHCWGPGPTQCVNCSQFLRGQECVEECRVLQGLPREYVNARHCLPCHPECQPQNGSVTCFGPEADQCVACAHYKDPPFCVARCPSGVKPDLSYMPIWKFPDEEGACQPCPINCTHSCVDLDDKGCPAEQRASPLTSIISAVVGILLVVVLGVVFGILIKRRQQKIRKYTMRRLLQETELVEPLTPSGAMPNQAQMRILKETELRKVKVLGSGAFGTVYKGIWIPDGENVKIPVAIKVLRENTSPKANKEILDEAYVMAGVGSPYVSRLLGICLTSTVQLVTQLMPYGCLLDHVRENRGRLGSQDLLNWCMQIAKGMSYLEDVRLVHRDLAARNVLVKSPNHVKITDFGLARLLDIDETEYHADGGKVPIKWMALESILRRRFTHQSDVWSYGVTVWELMTFGAKPYDGIPAREIPDLLEKGERLPQPPICTIDVYMIMVKCWMIDSECRPRFRELVSEFSRMARDPQRFVVIQNEDLGPASPLDSTFYRSLLEDDDMGDLVDAEEYLVPQQGFFCPDPAPGAGGMVHHRHRSSSTRSGGGDLTLGLEPSEEEAPRSPLAPSEGAGSDVFDGDLGMGAAKGLQSLPTHDPSPLQRYSEDPTVPLPSETDGYVAPLTCSPQPEYVNQPDVRPQPPSPREGPLPAARPAGATLERPKTLSPGKNGVVKDVFAFGGAVENPEYLTPQGGAAPQPHPPPAFSPAFDNLYYWDQDPPERGAPPSTFKGTPTAENPEYLGLDVPV

SEQ ID NO: 21575 - protein, 72 aa, Artificial Sequence
  Synthetic polypeptide
QLGLVEGMWDLKAGQPEFQSCLLLTSFMRRELTPASLSCLLCKMEVAAPVSGACYADPPRVPARHTCAPAQT

SEQ ID NO: 21576 - protein, 117 aa, Artificial Sequence
  Synthetic polypeptide
PLPASVVFFARWRLQPQSLEHVMQIHRECLPGTHVHRHRHEAAAPCQSRDPPGHAPPPLPGLPGGAGKPGTHLPAHQCQPVLPAGYPGGAGLRAHRSQPSEAGPTAEAADCARHPAL

SEQ ID NO: 21577 - protein, 1080 aa, Artificial Sequence
  Synthetic polypeptide
VPVLPVAHKLYEARANPCQPQLSSLQDGGCSPSLWSMLCRSTESACQAHMCTGTDMKLRLPASPETHLDMLRHLYQGCQVVQGNLELTYLPTNASLSFLQDIQEVQGYVLIAHNQVRQVPLQRLRIVRGTQLFEDNYALAVLDNGDPLNNTTPVTGASPGGLRELQLRSLTEILKGGVLIQRNPQLCYQDTILWKDIFHKNNQLALTLIDTNRSRACHPCSPMCKGSRCWGESSEDCQSLTRTVCAGGCARCKGPLPTDCCHEQCAAGCTGPKHSDCLACLHFNHSGICELHCPALVTYNTDTFESMPNPEGRYTFGASCVTACPYNYLSTDVGSCTLVCPLHNQEVTAEDGTQRCEKCSKPCARVCYGLGMEHLREVRAVTSANIQEFAGCKKIFGSLAFLPESFDGDPASNTAPLQPEQLQVFETLEEITGYLYISAWPDSLPDLSVFQNLQVIRGRILHNGAYSLTLQGLGISWLGLRSLRELGSGLALIHHNTHLCFVHTVPWDQLFRNPHQALLHTANRPEDECVGEGLACHQLCARGHCWGPGPTQCVNCSQFLRGQECVEECRVLQGLPREYVNARHCLPCHPECQPQNGSVTCFGPEADQCVACAHYKDPPFCVARCPSGVKPDLSYMPIWKFPDEEGACQPCPINCTHSCVDLDDKGCPAEQRASPLTSIISAVVGILLVVVLGVVFGILIKRRQQKIRKYTMRRLLQETELVEPLTPSGAMPNQAQMRILKETELRKVKVLGSGAFGTVYKGIWIPDGENVKIPVAIKVLRENTSPKANKEILDEAYVMAGVGSPYVSRLLGICLTSTVQLVTQLMPYGCLLDHVRENRGRLGSQDLLNWCMQIAKGMSYLEDVRLVHRDLAARNVLVKSPNHVKITDFGLARLLDIDETEYHADGGKVPIKWMALESILRRRFTHQSDVWSYGVTVWELMTFGAKPYDGIPAREIPDLLEKGERLPQPPICTIDVYMIMVKCWMIDSECRPRFRELVSEFSRMARDPQRFVVIQNEDLGPASPLDSTFYRSLLEDDDMGDLVDAEEYLVPQQGFFCPDPAPGAGGMVHHRHRSSSTRNM

SEQ ID NO: 21578 - protein, 121 aa, Artificial Sequence
  Synthetic polypeptide
VPVLPVAHKLYEARANPCQPQLSSLQDGGCSPSLWSMLCRSTESACQAHMCTGTDMKLRLPASPETHLDMLRHLYQGCQVVQGNLELTYLPTNASLSFLQTTTFLRTWDPAPSSAPCTTKR

SEQ ID NO: 21579 - protein, 106 aa, Artificial Sequence
  Synthetic polypeptide
PLPASVVFFARWRLQPQSLEHVMQIHRECLPGTHVHRHRHEAAAPCQSRDPPGHAPPPLPGLPGGAGKPGTHLPAHQCQPVLPADNYLSTDVGSCTLVCPLHNQEV

SEQ ID NO: 21580 - protein, 115 aa, Artificial Sequence
  Synthetic polypeptide
VPVLPVAHKLYEARANPCQPQLSSLQDGGCSPSLWSMLCRSTESACQAHMCTGTDMKLRLPASPETHLDMLRHLYQGCQVVQGNLELTYLPTNASLSFLQVRPVGNPARPCLQLG

SEQ ID NO: 21581 - protein, 100 aa, Artificial Sequence
  Synthetic polypeptide
PLPASVVFFARWRLQPQSLEHVMQIHRECLPGTHVHRHRHEAAAPCQSRDPPGHAPPPLPGLPGGAGKPGTHLPAHQCQPVLPAGEARGQPSQALPPAGL

SEQ ID NO: 21582 - protein, 134 aa, Artificial Sequence
  Synthetic polypeptide
VPVLPVAHKLYEARANPCQPQLSSLQDGGCSPSLWSMLCRSTESACQAHSSVHRHRHEAAAPCQSRDPPGHAPPPLPGLPGGAGKPGTHLPAHQCQPVLPAGYPGGAGLRAHRSQPSEAGPTAEAADCARHPAL

SEQ ID NO: 21583 - protein, 1298 aa, Artificial Sequence
  Synthetic polypeptide
QLGLVEGMWDLKAGQPEFQSCLLLTSFMRRELTPASLSCLLCKMEVAAPVSGACYADPPRVPARHTVVCTGTDMKLRLPASPETHLDMLRHLYQGCQVVQGNLELTYLPTNASLSFLQDIQEVQGYVLIAHNQVRQVPLQRLRIVRGTQLFEDNYALAVLDNGDPLNNTTPVTGASPGGLRELQLRSLTEILKGGVLIQRNPQLCYQDTILWKDIFHKNNQLALTLIDTNRSRACHPCSPMCKGSRCWGESSEDCQSLTRTVCAGGCARCKGPLPTDCCHEQCAAGCTGPKHSDCLACLHFNHSGICELHCPALVTYNTDTFESMPNPEGRYTFGASCVTACPYNYLSTDVGSCTLVCPLHNQEVTAEDGTQRCEKCSKPCARVCYGLGMEHLREVRAVTSANIQEFAGCKKIFGSLAFLPESFDGDPASNTAPLQPEQLQVFETLEEITGYLYISAWPDSLPDLSVFQNLQVIRGRILHNGAYSLTLQGLGISWLGLRSLRELGSGLALIHHNTHLCFVHTVPWDQLFRNPHQALLHTANRPEDECVGEGLACHQLCARGHCWGPGPTQCVNCSQFLRGQECVEECRVLQGLPREYVNARHCLPCHPECQPQNGSVTCFGPEADQCVACAHYKDPPFCVARCPSGVKPDLSYMPIWKFPDEEGACQPCPINCTHSCVDLDDKGCPAEQRASPLTSIISAVVGILLVVVLGVVFGILIKRRQQKIRKYTMRRLLQETELVEPLTPSGAMPNQAQMRILKETELRKVKVLGSGAFGTVYKGIWIPDGENVKIPVAIKVLRENTSPKANKEILDEAYVMAGVGSPYVSRLLGICLTSTVQLVTQLMPYGCLLDHVRENRGRLGSQDLLNWCMQIAKGMSYLEDVRLVHRDLAARNVLVKSPNHVKITDFGLARLLDIDETEYHADGGKVPIKWMALESILRRRFTHQSDVWSYGVTVWELMTFGAKPYDGIPAREIPDLLEKGERLPQPPICTIDVYMIMVKCWMIDSECRPRFRELVSEFSRMARDPQRFVVIQNEDLGPASPLDSTFYRSLLEDDDMGDLVDAEEYLVPQQGFFCPDPAPGAGGMVHHRHRSSSTRSGGGDLTLGLEPSEEEAPRSPLAPSEGAGSDVFDGDLGMGAAKGLQSLPTHDPSPLQRYSEDPTVPLPSETDGYVAPLTCSPQPEYVNQPDVRPQPPSPREGPLPAARPAGATLERPKTLSPGKNGVVKDVFAFGGAVENPEYLTPQGGAAPQPHPPPAFSPAFDNLYYWDQDPPERGAPPSTFKGTPTAENPEYLGLDVPV

SEQ ID NO: 21584 - protein, 1098 aa, Artificial Sequence
  Synthetic polypeptide
QLGLVEGMWDLKAGQPEFQSCLLLTSFMRRELTPASLSCLLCKMEVAAPVSGACYADPPRVPARHTVVCTGTDMKLRLPASPETHLDMLRHLYQGCQVVQGNLELTYLPTNASLSFLQDIQEVQGYVLIAHNQVRQVPLQRLRIVRGTQLFEDNYALAVLDNGDPLNNTTPVTGASPGGLRELQLRSLTEILKGGVLIQRNPQLCYQDTILWKDIFHKNNQLALTLIDTNRSRACHPCSPMCKGSRCWGESSEDCQSLTRTVCAGGCARCKGPLPTDCCHEQCAAGCTGPKHSDCLACLHFNHSGICELHCPALVTYNTDTFESMPNPEGRYTFGASCVTACPYNYLSTDVGSCTLVCPLHNQEVTAEDGTQRCEKCSKPCARVCYGLGMEHLREVRAVTSANIQEFAGCKKIFGSLAFLPESFDGDPASNTAPLQPEQLQVFETLEEITGYLYISAWPDSLPDLSVFQNLQVIRGRILHNGAYSLTLQGLGISWLGLRSLRELGSGLALIHHNTHLCFVHTVPWDQLFRNPHQALLHTANRPEDECVGEGLACHQLCARGHCWGPGPTQCVNCSQFLRGQECVEECRVLQGLPREYVNARHCLPCHPECQPQNGSVTCFGPEADQCVACAHYKDPPFCVARCPSGVKPDLSYMPIWKFPDEEGACQPCPINCTHSCVDLDDKGCPAEQRASPLTSIISAVVGILLVVVLGVVFGILIKRRQQKIRKYTMRRLLQETELVEPLTPSGAMPNQAQMRILKETELRKVKVLGSGAFGTVYKGIWIPDGENVKIPVAIKVLRENTSPKANKEILDEAYVMAGVGSPYVSRLLGICLTSTVQLVTQLMPYGCLLDHVRENRGRLGSQDLLNWCMQIAKGMSYLEDVRLVHRDLAARNVLVKSPNHVKITDFGLARLLDIDETEYHADGGKVPIKWMALESILRRRFTHQSDVWSYGVTVWELMTFGAKPYDGIPAREIPDLLEKGERLPQPPICTIDVYMIMVKCWMIDSECRPRFRELVSEFSRMARDPQRFVVIQNEDLGPASPLDSTFYRSLLEDDDMGDLVDAEEYLVPQQGFFCPDPAPGAGGMVHHRHRSSSTRNM

SEQ ID NO: 21585 - protein, 123 aa, Artificial Sequence
  Synthetic polypeptide
VPVLPVAHKLYEARANPCQPQLSSLQDGGCSPSLWSMLCRSTESACQAHSSVHRHRHEAAAPCQSRDPPGHAPPPLPGLPGGAGKPGTHLPAHQCQPVLPADNYLSTDVGSCTLVCPLHNQEV

SEQ ID NO: 21586 - protein, 139 aa, Artificial Sequence
  Synthetic polypeptide
QLGLVEGMWDLKAGQPEFQSCLLLTSFMRRELTPASLSCLLCKMEVAAPVSGACYADPPRVPARHTVVCTGTDMKLRLPASPETHLDMLRHLYQGCQVVQGNLELTYLPTNASLSFLQTTTFLRTWDPAPSSAPCTTKR

SEQ ID NO: 21587 - protein, 117 aa, Artificial Sequence
  Synthetic polypeptide
VPVLPVAHKLYEARANPCQPQLSSLQDGGCSPSLWSMLCRSTESACQAHSSVHRHRHEAAAPCQSRDPPGHAPPPLPGLPGGAGKPGTHLPAHQCQPVLPAGEARGQPSQALPPAGL

SEQ ID NO: 21588 - protein, 133 aa, Artificial Sequence
  Synthetic polypeptide
QLGLVEGMWDLKAGQPEFQSCLLLTSFMRRELTPASLSCLLCKMEVAAPVSGACYADPPRVPARHTVVCTGTDMKLRLPASPETHLDMLRHLYQGCQVVQGNLELTYLPTNASLSFLQVRPVGNPARPCLQLG

SEQ ID NO: 21589 - protein, 58 aa, Artificial Sequence
  Synthetic polypeptide
MNLRNITLSKRSQRQDSILSDPLYSLTLSAGWSAVVRSWLTATSASWIQAILLPQSPE

SEQ ID NO: 21590 - protein, 57 aa, Artificial Sequence
  Synthetic polypeptide
AKEARDKIPYCLIPFIVSLCQQAGVQWYDLGSLQPLPPGFKQFSCLSLLSSWDYRDP

SEQ ID NO: 21591 - protein, 41 aa, Artificial Sequence
  Synthetic polypeptide
MNLRNITLSKRSQRQDSILSDPLYGPSLQHCPAPARAAPSV

SEQ ID NO: 21592 - protein, 888 aa, Artificial Sequence
  Synthetic polypeptide
AKEARDKIPYCLIPFMDPASNTAPLQPEQLQVFETLEEITGYLYISAWPDSLPDLSVFQNLQVIRGRILHNGAYSLTLQGLGISWLGLRSLRELGSGLALIHHNTHLCFVHTVPWDQLFRNPHQALLHTANRPEDECVGEGLACHQLCARGHCWGPGPTQCVNCSQFLRGQECVEECRVLQGLPREYVNARHCLPCHPECQPQNGSVTCFGPEADQCVACAHYKDPPFCVARCPSGVKPDLSYMPIWKFPDEEGACQPCPINCTHSCVDLDDKGCPAEQRASPLTSIISAVVGILLVVVLGVVFGILIKRRQQKIRKYTMRRLLQETELVEPLTPSGAMPNQAQMRILKETELRKVKVLGSGAFGTVYKGIWIPDGENVKIPVAIKVLRENTSPKANKEILDEAYVMAGVGSPYVSRLLGICLTSTVQLVTQLMPYGCLLDHVRENRGRLGSQDLLNWCMQIAKGMSYLEDVRLVHRDLAARNVLVKSPNHVKITDFGLARLLDIDETEYHADGGKVPIKWMALESILRRRFTHQSDVWSYGVTVWELMTFGAKPYDGIPAREIPDLLEKGERLPQPPICTIDVYMIMVKCWMIDSECRPRFRELVSEFSRMARDPQRFVVIQNEDLGPASPLDSTFYRSLLEDDDMGDLVDAEEYLVPQQGFFCPDPAPGAGGMVHHRHRSSSTRSGGGDLTLGLEPSEEEAPRSPLAPSEGAGSDVFDGDLGMGAAKGLQSLPTHDPSPLQRYSEDPTVPLPSETDGYVAPLTCSPQPEYVNQPDVRPQPPSPREGPLPAARPAGATLERPKTLSPGKNGVVKDVFAFGGAVENPEYLTPQGGAAPQPHPPPAFSPAFDNLYYWDQDPPERGAPPSTFKGTPTAENPEYLGLDVPV

SEQ ID NO: 21593 - protein, 50 aa, Artificial Sequence
  Synthetic polypeptide
SPLWTQPPTLPRSSQSSSKCLRLWKRSQVTYTSQHGRTACLTSASSRTCK

SEQ ID NO: 21594 - protein, 266 aa, Artificial Sequence
  Synthetic polypeptide
AKEARDKIPYCLIPFMDPASNTAPLQPEQLQVFETLEEITGYLYISAWPDSLPDLSVFQNLQVIRGRILHNGAYSLTLQGLGISWLGLRSLRELGSGLALIHHNTHLCFVHTVPWDQLFRNPHQALLHTANRPEDECVGEGLACHQLCARGHCWGPGPTQCVNCSQFLRGQECVEECRVLQGLPREYVNARHCLPCHPECQPQNGSVTCFGPEADQCVACAHYKDPPFCVARCPSGVKPDLSYMPIWKFPDEEGACQPCPINCTHS

SEQ ID NO: 21595 - protein, 688 aa, Artificial Sequence
  Synthetic polypeptide
AKEARDKIPYCLIPFMDPASNTAPLQPEQLQVFETLEEITGYLYISAWPDSLPDLSVFQNLQVIRGRILHNGAYSLTLQGLGISWLGLRSLRELGSGLALIHHNTHLCFVHTVPWDQLFRNPHQALLHTANRPEDECVGEGLACHQLCARGHCWGPGPTQCVNCSQFLRGQECVEECRVLQGLPREYVNARHCLPCHPECQPQNGSVTCFGPEADQCVACAHYKDPPFCVARCPSGVKPDLSYMPIWKFPDEEGACQPCPINCTHSCVDLDDKGCPAEQRASPLTSIISAVVGILLVVVLGVVFGILIKRRQQKIRKYTMRRLLQETELVEPLTPSGAMPNQAQMRILKETELRKVKVLGSGAFGTVYKGIWIPDGENVKIPVAIKVLRENTSPKANKEILDEAYVMAGVGSPYVSRLLGICLTSTVQLVTQLMPYGCLLDHVRENRGRLGSQDLLNWCMQIAKGMSYLEDVRLVHRDLAARNVLVKSPNHVKITDFGLARLLDIDETEYHADGGKVPIKWMALESILRRRFTHQSDVWSYGVTVWELMTFGAKPYDGIPAREIPDLLEKGERLPQPPICTIDVYMIMVKCWMIDSECRPRFRELVSEFSRMARDPQRFVVIQNEDLGPASPLDSTFYRSLLEDDDMGDLVDAEEYLVPQQGFFCPDPAPGAGGMVHHRHRSSSTRNM

SEQ ID NO: 21596 - protein, 26 aa, Artificial Sequence
  Synthetic polypeptide
MNLRNITLSKRSQRQDSILSDPLYGP

SEQ ID NO: 21597 - protein, 18 aa, Artificial Sequence
  Synthetic polypeptide
AKEARDKIPYCLIPFMDP

SEQ ID NO: 21598 - protein, 5 aa, Artificial Sequence
  Synthetic polypeptide
SPLWT

SEQ ID NO: 21599 - protein, 71 aa, Artificial Sequence
  Synthetic polypeptide
SQHFGRLKQEDCLSPGIQEQRGQHRTQPPTLPRSSQSSSKCLRLWKRSQVTYTSQHGRTACLTSASSRTCK

SEQ ID NO: 21600 - protein, 28 aa, Artificial Sequence
  Synthetic polypeptide
AQEFKNSVGNIGPSLQHCPAPARAAPSV

SEQ ID NO: 21601 - protein, 26 aa, Artificial Sequence
  Synthetic polypeptide
SQHFGRLKQEDCLSPGIQEQRGQHRT

SEQ ID NO: 21602 - protein, 13 aa, Artificial Sequence
  Synthetic polypeptide
AQEFKNSVGNIGP

SEQ ID NO: 21603 - protein, 26 aa, Artificial Sequence
  Synthetic polypeptide
SQHFRRPRWEDPLRPEARDQPGQHTL

SEQ ID NO: 21604 - protein, 64 aa, Artificial Sequence
  Synthetic polypeptide
GQKLETSLGNIPSDVHHLCGGWHSAGRGLGGGLWDPHQATAAEDPEVHDAETAAGNGAGGAADT

SEQ ID NO: 21605 - protein, 626 aa, Artificial Sequence
  Synthetic polypeptide
EAKVGGSFEARSSRPAWATYPLTSIISAVVGILLVVVLGVVFGILIKRRQQKIRKYTMRRLLQETELVEPLTPSGAMPNQAQMRILKETELRKVKVLGSGAFGTVYKGIWIPDGENVKIPVAIKVLRENTSPKANKEILDEAYVMAGVGSPYVSRLLGICLTSTVQLVTQLMPYGCLLDHVRENRGRLGSQDLLNWCMQIAKGMSYLEDVRLVHRDLAARNVLVKSPNHVKITDFGLARLLDIDETEYHADGGKVPIKWMALESILRRRFTHQSDVWSYGVTVWELMTFGAKPYDGIPAREIPDLLEKGERLPQPPICTIDVYMIMVKCWMIDSECRPRFRELVSEFSRMARDPQRFVVIQNEDLGPASPLDSTFYRSLLEDDDMGDLVDAEEYLVPQQGFFCPDPAPGAGGMVHHRHRSSSTRSGGGDLTLGLEPSEEEAPRSPLAPSEGAGSDVFDGDLGMGAAKGLQSLPTHDPSPLQRYSEDPTVPLPSETDGYVAPLTCSPQPEYVNQPDVRPQPPSPREGPLPAARPAGATLERPKTLSPGKNGVVKDVFAFGGAVENPEYLTPQGGAAPQPHPPPAFSPAFDNLYYWDQDPPERGAPPSTFKGTPTAENPEYLGLDVPV

SEQ ID NO: 21606 - protein, 426 aa, Artificial Sequence
  Synthetic polypeptide
EAKVGGSFEARSSRPAWATYPLTSIISAVVGILLVVVLGVVFGILIKRRQQKIRKYTMRRLLQETELVEPLTPSGAMPNQAQMRILKETELRKVKVLGSGAFGTVYKGIWIPDGENVKIPVAIKVLRENTSPKANKEILDEAYVMAGVGSPYVSRLLGICLTSTVQLVTQLMPYGCLLDHVRENRGRLGSQDLLNWCMQIAKGMSYLEDVRLVHRDLAARNVLVKSPNHVKITDFGLARLLDIDETEYHADGGKVPIKWMALESILRRRFTHQSDVWSYGVTVWELMTFGAKPYDGIPAREIPDLLEKGERLPQPPICTIDVYMIMVKCWMIDSECRPRFRELVSEFSRMARDPQRFVVIQNEDLGPASPLDSTFYRSLLEDDDMGDLVDAEEYLVPQQGFFCPDPAPGAGGMVHHRHRSSSTRNM

SEQ ID NO: 21607 - protein, 108 aa, Artificial Sequence
  Synthetic polypeptide
EAKVGGSFEARSSRPAWATYPLTSIISAVVGILLVVVLGVVFGILIKRRQQKIRKYTMRRLLQETELVEPLTPSGAMPNQAQMRILKETELRKVKGIWIPDGENVKIP

SEQ ID NO: 21608 - protein, 253 aa, Artificial Sequence
  Synthetic polypeptide
EAKVGGSFEARSSRPAWATYPLTSIISAVVGILLVVVLGVVFGILIKRRQQKIRKYTMRRLLQETELVEPLTPSGAMPNQAQMRILKETELRKVKVLGSGAFGTVYKGIWIPDGENVKIPVAIKVLRENTSPKANKEILDEAYVMAGVGSPYVSRLLGICLTSTVQLVTQLMPYGCLLDHVRENRGRLGSQDLLNWCMQIAKGMSYLEDVRLVHRDLAARNVLVKSPNHVKITDFGLARLLDIDETEYHADGG

SEQ ID NO: 21609 - protein, 322 aa, Artificial Sequence
  Synthetic polypeptide
SQYFWRLRWEDPLKPGVQDQPGQHSWMIDSECRPRFRELVSEFSRMARDPQRFVVIQNEDLGPASPLDSTFYRSLLEDDDMGDLVDAEEYLVPQQGFFCPDPAPGAGGMVHHRHRSSSTRSGGGDLTLGLEPSEEEAPRSPLAPSEGAGSDVFDGDLGMGAAKGLQSLPTHDPSPLQRYSEDPTVPLPSETDGYVAPLTCSPQPEYVNQPDVRPQPPSPREGPLPAARPAGATLERPKTLSPGKNGVVKDVFAFGGAVENPEYLTPQGGAAPQPHPPPAFSPAFDNLYYWDQDPPERGAPPSTFKGTPTAENPEYLGLDVPV

SEQ ID NO: 21610 - protein, 13 aa, Artificial Sequence
  Synthetic polypeptide
SQEFKTSLGNIVG

SEQ ID NO: 21611 - protein, 122 aa, Artificial Sequence
  Synthetic polypeptide
SQYFWRLRWEDPLKPGVQDQPGQHSWMIDSECRPRFRELVSEFSRMARDPQRFVVIQNEDLGPASPLDSTFYRSLLEDDDMGDLVDAEEYLVPQQGFFCPDPAPGAGGMVHHRHRSSSTRNM

SEQ ID NO: 21612 - protein, 25 aa, Artificial Sequence
  Synthetic polypeptide
SQYFWRLRWEDPLKPGVQDQPGQHK

SEQ ID NO: 21613 - protein, 276 aa, Artificial Sequence
  Synthetic polypeptide
SQEFKTSLGNINEDLGPASPLDSTFYRSLLEDDDMGDLVDAEEYLVPQQGFFCPDPAPGAGGMVHHRHRSSSTRSGGGDLTLGLEPSEEEAPRSPLAPSEGAGSDVFDGDLGMGAAKGLQSLPTHDPSPLQRYSEDPTVPLPSETDGYVAPLTCSPQPEYVNQPDVRPQPPSPREGPLPAARPAGATLERPKTLSPGKNGVVKDVFAFGGAVENPEYLTPQGGAAPQPHPPPAFSPAFDNLYYWDQDPPERGAPPSTFKGTPTAENPEYLGLDVPV

SEQ ID NO: 21614 - protein, 76 aa, Artificial Sequence
  Synthetic polypeptide
SQEFKTSLGNINEDLGPASPLDSTFYRSLLEDDDMGDLVDAEEYLVPQQGFFCPDPAPGAGGMVHHRHRSSSTRNM

SEQ ID NO: 21615 - protein, 18 aa, Artificial Sequence
  Synthetic polypeptide
EVPRSAPGPVCSPHQTDP

SEQ ID NO: 21616 - protein, 143 aa, Artificial Sequence
  Synthetic polypeptide
ASPRLGLLICKWGVVRSKQLRKYQDRPLALCAHHIRPIHEQLPLSLSAPHGQHAGPSEPSPGQPVPAHLLHPGVSHRWPPHPVRAVVHGGVCGLPGAGWPWQRPAVHALHHRVGTGEGVSHVQPQGGSGHHGPQPAPGPPGGC

SEQ ID NO: 21617 - protein, 134 aa, Artificial Sequence
  Synthetic polypeptide
GVSSLGSTKIGPWPCVLTTSDRSMSSSLSASQLHTVNMRDPLNRVLANLFLLISSILGSRTAGPHTQFVQWFMEECVDCLEQGGRGSVLQFMPFTTVSELVKVSAMSSPKVVLAITDLSLPLGRQVAAKAIAAL

SEQ ID NO: 21618 - protein, 69 aa, Artificial Sequence
  Synthetic polypeptide
ASPRLGLLICKWGVVRSKQLRKYQDRPLALCAHHIRPIHEQLPLSLSAPHGQHAGPSEPSPGPTFSQSV

SEQ ID NO: 21619 - protein, 53 aa, Artificial Sequence
  Synthetic polypeptide
GVSSLGSTKIGPWPCVLTTSDRSMSSSLSASQLHTVNMRDPLNRVLVPPSPRV

SEQ ID NO: 21620 - protein, 116 aa, Artificial Sequence
  Synthetic polypeptide
MLDRSMSSSLSASQLHTVNMRDPLNRVLANLFLLISSILGSRTAGPHTQFVQWFMEECVDCLEQGGRGSVLQFMPFTTVSELVKVSAMSSPKVVLAITDLSLPLGRQVAAKAIAAL

SEQ ID NO: 21621 - protein, 109 aa, Artificial Sequence
  Synthetic polypeptide
ARPIHEQLPLSLSAPHGQHAGPSEPSPGQPVPAHLLHPGVSHRWPPHPVRAVVHGGVCGLPGAGWPWQRPAVHALHHRVGTGEGVSHVQPQGGSGHHGPQPAPGPPGGC

SEQ ID NO: 21622 - protein, 35 aa, Artificial Sequence
  Synthetic polypeptide
MLDRSMSSSLSASQLHTVNMRDPLNRVLVPPSPRV

SEQ ID NO: 21623 - protein, 35 aa, Artificial Sequence
  Synthetic polypeptide
ARPIHEQLPLSLSAPHGQHAGPSEPSPGPTFSQSV

SEQ ID NO: 21624 - protein, 117 aa, Artificial Sequence
  Synthetic polypeptide
MLADRSMSSSLSASQLHTVNMRDPLNRVLANLFLLISSILGSRTAGPHTQFVQWFMEECVDCLEQGGRGSVLQFMPFTTVSELVKVSAMSSPKVVLAITDLSLPLGRQVAAKAIAAL

SEQ ID NO: 21625 - protein, 110 aa, Artificial Sequence
  Synthetic polypeptide
ASRPIHEQLPLSLSAPHGQHAGPSEPSPGQPVPAHLLHPGVSHRWPPHPVRAVVHGGVCGLPGAGWPWQRPAVHALHHRVGTGEGVSHVQPQGGSGHHGPQPAPGPPGGC

SEQ ID NO: 21626 - protein, 36 aa, Artificial Sequence
  Synthetic polypeptide
MLADRSMSSSLSASQLHTVNMRDPLNRVLVPPSPRV

SEQ ID NO: 21627 - protein, 36 aa, Artificial Sequence
  Synthetic polypeptide
ASRPIHEQLPLSLSAPHGQHAGPSEPSPGPTFSQSV

SEQ ID NO: 21628 - protein, 87 aa, Artificial Sequence
  Synthetic polypeptide
GRAWWLTPAILALWEAEGGDHELDPGAHVCRRAAADSHADQVSLHRGGHNALLEPAAPQAAHQRGADGHFCQGAGEGLGGQPLHPHL

SEQ ID NO: 21629 - protein, 333 aa, Artificial Sequence
  Synthetic polypeptide
HFGRLRVVIMNSILERMCADVLQQTATQIKFPSTGVDTMPYWNLLPPKRPIKEVLTDIFAKVLEKGWVDSRSIHIFDTLLHMGGVYWFCNNLIKELLKETRKEHTLRAVELLYSIFCLDMQQVTLVLLGHILPGLLTDSSKWHSLMDPPGTALAKLAVWCALSSYSSHKGQASTRQKKRHREDIEDYISLFPLDDVQPSKLMRLLSSNEDDANILSSPTDRSMSSSLSASQLHTVNMRDPLNRVLANLFLLISSILGSRTAGPHTQFVQWFMEECVDCLEQGGRGSVLQFMPFTTVSELVKVSAMSSPKVVLAITDLSLPLGRQVAAKAIAAL

SEQ ID NO: 21630 - protein, 185 aa, Artificial Sequence
  Synthetic polypeptide
HFGRLRVVIMNSILERMCADVLQQTATQIKFPSTGVDTMPYWNLLPPKRPIKEVLTDIFAKVLEKGWVDSRSIHIFDTLLHMGGVYWFCNNLIKELLKETRKEHTLRAVELLYSIFCLDMQQVTLVLLGHILPGLLTDSSKWHSLMDPPGTALAKLAVWCALSSYSSHKGQASTRQKKRHREDIE

SEQ ID NO: 21631 - protein, 52 aa, Artificial Sequence
  Synthetic polypeptide
GRAWWLTPAILALWEAEGGDHELDPGAHVCRRAAADSHADQVSLHRGGHNAL

SEQ ID NO: 21632 - protein, 41 aa, Artificial Sequence
  Synthetic polypeptide
HFGRLRVVIMNSILERMCADVLQQTATQIKFPSTGVDTMPY

SEQ ID NO: 21633 - protein, 60 aa, Artificial Sequence
  Synthetic polypeptide
ARCAGSPVIPGLWEAKQSGPRARTPAEIGRECQHPAQHPADPPGGAHCHKHPQDDGCRPL

SEQ ID NO: 21634 - protein, 612 aa, Artificial Sequence
  Synthetic polypeptide
SQDFGKPSKADREHAPQQKSGENANIQPNIQLILRAEPTVTNILKTMDADHSKSPEGLLGVLGHMLSGKSLDLLLAAAAATGKLKSFARKFINLNEFTTYGSEESTKPASVRALLFDISFLMLCHVAQTYGSEVILSESRTGAEVPFFETWMQTCMPEEGKILNPDHPCFRPDSTKVESLVALLNNSSEMKLVQMKWHEACLSISAAILEILNAWENGVLAFESIQKITDNIKGKVCSLAVCAVAWLVAHVRMLGLDEREKSLQMIRQLAGPLFSENTLQFYNERVVIMNSILERMCADVLQQTATQIKFPSTGVDTMPYWNLLPPKRPIKEVLTDIFAKVLEKGWVDSRSIHIFDTLLHMGGVYWFCNNLIKELLKETRKEHTLRAVELLYSIFCLDMQQVTLVLLGHILPGLLTDSSKWHSLMDPPGTALAKLAVWCALSSYSSHKGQASTRQKKRHREDIEDYISLFPLDDVQPSKLMRLLSSNEDDANILSSPTDRSMSSSLSASQLHTVNMRDPLNRVLANLFLLISSILGSRTAGPHTQFVQWFMEECVDCLEQGGRGSVLQFMPFTTVSELVKVSAMSSPKVVLAITDLSLPLGRQVAAKAIAAL

SEQ ID NO: 21635 - protein, 39 aa, Artificial Sequence
  Synthetic polypeptide
QVCWLTCNPRTLGSQAKRTESTHPSRNRERMPTSSPTSS

SEQ ID NO: 21636 - protein, 464 aa, Artificial Sequence
  Synthetic polypeptide
SQDFGKPSKADREHAPQQKSGENANIQPNIQLILRAEPTVTNILKTMDADHSKSPEGLLGVLGHMLSGKSLDLLLAAAAATGKLKSFARKFINLNEFTTYGSEESTKPASVRALLFDISFLMLCHVAQTYGSEVILSESRTGAEVPFFETWMQTCMPEEGKILNPDHPCFRPDSTKVESLVALLNNSSEMKLVQMKWHEACLSISAAILEILNAWENGVLAFESIQKITDNIKGKVCSLAVCAVAWLVAHVRMLGLDEREKSLQMIRQLAGPLFSENTLQFYNERVVIMNSILERMCADVLQQTATQIKFPSTGVDTMPYWNLLPPKRPIKEVLTDIFAKVLEKGWVDSRSIHIFDTLLHMGGVYWFCNNLIKELLKETRKEHTLRAVELLYSIFCLDMQQVTLVLLGHILPGLLTDSSKWHSLMDPPGTALAKLAVWCALSSYSSHKGQASTRQKKRHREDIE

SEQ ID NO: 21637 - protein, 58 aa, Artificial Sequence
  Synthetic polypeptide
ARCAGSPVIPGLWEAKQSGPRARTPAEIGRECQHPAQHPADPPGGAHCHKHPQVFFRT

SEQ ID NO: 21638 - protein, 332 aa, Artificial Sequence
  Synthetic polypeptide
SQDFGKPSKADREHAPQQKSGENANIQPNIQLILRAEPTVTNILKCSSGLDFLSCPQTMDADHSKSPEGLLGVLGHMLSGKSLDLLLAAAAATGKLKSFARKFINLNEFTTYGSEESTKPASVRALLFDISFLMLCHVAQTYGSEVILSESRTGAEVPFFETWMQTCMPEEGKILNPDHPCFRPDSTKVESLVALLNNSSEMKLVQMKWHEACLSISAAILEILNAWENGVLAFESIQKITDNIKGKVCSLAVCAVAWLVAHVRMLGLDEREKSLQMIRQLAGPLFSENTLQFYNERVVIMNSILERMCADVLQQTATQIKFPSTGVDTMPY

SEQ ID NO: 21639 - protein, 73 aa, Artificial Sequence
  Synthetic polypeptide
KFKAAVSCDHVTAPLHSSLGNRARPCLSKRAERKQWWLWLWRSCPAAQGRSLPRRSAEASTCGSQGWFREPSW

SEQ ID NO: 21640 - protein, 398 aa, Artificial Sequence
  Synthetic polypeptide
AVIMSLRHCTPAWATEQDPVSQKEPKGSSGGYGSGGAALQPKGGLFQGGVLKLRPVGAKDGSENLAGKPALQIPSSRAAAPRPPVSAASGRPQDDTDSSRASLPELPRMQRPSLPDLSRPNTTSSTGMKHSSSAPPPPPPGRRANAPPTPLPMHSSKAPAYNREKPLPPTPGQRLHPGREGPPAPPPVKPPPSPVNIRTGPSGQSLAPPPPPYRQPPGVPNGPSSPTNESAPELPQRHNSLHRKTPGPVRGLAPPPPTSASPSLLSNRPPPPARDPPSRGAAPPPPPPVIRNGARDAPPPPPPYRMHGSEPPSRGKPPPPPSRTPAGPPPPPPPPLRNGHRDSITTVRSFLDDFESKYSFHPVEDFPAPEEYKHFQRIYPSKTNRAARGAPPLPPILR

SEQ ID NO: 21641 - protein, 48 aa, Artificial Sequence
  Synthetic polypeptide
SCHCATALQPGQQSKTLSLKKSRKEAVVAMALEELPCSPREVSSKEEC

SEQ ID NO: 21642 - protein, 57 aa, Artificial Sequence
  Synthetic polypeptide
KFKAAVSCDHVTAPLHSSLGNRARPCLSKRAERKQWWLWLWRSCPAAQGRSLPRRSA

SEQ ID NO: 21643 - protein, 51 aa, Artificial Sequence
  Synthetic polypeptide
AVIMSLRHCTPAWATEQDPVSQKEPKGSSGGYGSGGAALQPKGGLFQGGVL

SEQ ID NO: 21644 - protein, 67 aa, Artificial Sequence
  Synthetic polypeptide
KFKAAVSCDHVTAPLHSSLGNRARPCLSKRAERKQWWLWLWRSCPAAQGRSLPRRSAEASTCGSQGW

SEQ ID NO: 21645 - protein, 61 aa, Artificial Sequence
  Synthetic polypeptide
AVIMSLRHCTPAWATEQDPVSQKEPKGSSGGYGSGGAALQPKGGLFQGGVLKLRPVGAKDG

SEQ ID NO: 21646 - protein, 90 aa, Artificial Sequence
  Synthetic polypeptide
KQELSPQQSWLNRQRNRHAGPDVRGSRGRCGLLPFARVHHLGYHVYPRGRSAAGGSACALRPVRRAGGAGDHLRPVQRLGSGLQRGQGCV

SEQ ID NO: 21647 - protein, 674 aa, Artificial Sequence
  Synthetic polypeptide
TDKEIGMLGQMFVVAEADAGSCLLHEFTISGTTYTPEGEVRQGDQPVRCGQFDGLVELATICALCNDSALDYNEAKGVYEKVGEATETALTCLVEKMNVFDTDLQALSRVERAGACNTVIKQLMRKEFTLEFSRDRKSMSVYCTPTRPHPTGQGSKMFVKGAPESVIERCSSVRVGSRTAPLTPTSREQILAKIRDWGSGSDTLRCLALATRDAPPRKEDMELDDCSKFVQYETDLTFVGCVGMLDPPRPEVAACITRCYQAGIRVVMITGDNKGTAVAICRRLGIFGDTEDVAGKAYTGREFDDLSPEQQRQACRTARCFARVEPAHKSRIVENLQSFNEITAMTGDGVNDAPALKKAEIGIAMGSGTAVAKSAAEMVLSDDNFASIVAAVEEGRAIYSNMKQFIRYLISSNVGEVVCIFLTAILGLPEALIPVQLLWVNLVTDGLPATALGFNPPDLDIMEKLPRSPREALISGWLFFRYLAIGVYVGLATVAAATWWFVYDAEGPHINFYQLRNFLKCSEDNPLFAGIDCEVFESRFPTTMALSVLVTIEMCNALNSVSENQSLLRMPPWMNPWLLVAVAMSMALHFLILLVPPLPLIFQVTPLSGRQWVVVLQISLPVILLDEALKYLSRNHMHACLYPGLLRTVSQAWSRQPLTTSWTPDHTGLASLKK

SEQ ID NO: 21648 - protein, 8 aa, Artificial Sequence
  Synthetic polypeptide
ACWARCSW

SEQ ID NO: 21649 - protein, 644 aa, Artificial Sequence
  Synthetic polypeptide
TDKEIGMLGQMFVVAEADAGSCLLHEFTISGTTYTPEGEVRQGDQPVRCGQFDGLVELATICALCNDSALDYNEAKGVYEKVGEATETALTCLVEKMNVFDTDLQALSRVERAGACNTVIKQLMRKEFTLEFSRDRKSMSVYCTPTRPHPTGQGSKMFVKGAPESVIERCSSVRVGSRTAPLTPTSREQILAKIRDWGSGSDTLRCLALATRDAPPRKEDMELDDCSKFVQYETDLTFVGCVGMLDPPRPEVAACITRCYQAGIRVVMITGDNKGTAVAICRRLGIFGDTEDVAGKAYTGREFDDLSPEQQRQACRTARCFARVEPAHKSRIVENLQSFNEITAMTGDGVNDAPALKKAEIGIAMGSGTAVAKSAAEMVLSDDNFASIVAAVEEGRAIYSNMKQFIRYLISSNVGEVVCIFLTAILGLPEALIPVQLLWVNLVTDGLPATALGFNPPDLDIMEKLPRSPREALISGWLFFRYLAIGVYVGLATVAAATWWFVYDAEGPHINFYQLRNFLKCSEDNPLFAGIDCEVFESRFPTTMALSVLVTIEMCNALNSVSENQSLLRMPPWMNPWLLVAVAMSMALHFLILLVPPLPLIFQVTPLSGRQWVVVLQISLPVILLDEALKYLSRNHMHEEMSQK

SEQ ID NO: 21650 - protein, 697 aa, Artificial Sequence
  Synthetic polypeptide
TDKEIGMLGQMFVVAEADAGSCLLHEFTISGTTYTPEGEVRQGDQPVRCGQFDGLVELATICALCNDSALDYNEAKGVYEKVGEATETALTCLVEKMNVFDTDLQALSRVERAGACNTVIKQLMRKEFTLEFSRDRKSMSVYCTPTRPHPTGQGSKMFVKGAPESVIERCSSVRVGSRTAPLTPTSREQILAKIRDWGSGSDTLRCLALATRDAPPRKEDMELDDCSKFVQYETDLTFVGCVGMLDPPRPEVAACITRCYQAGIRVVMITGDNKGTAVAICRRLGIFGDTEDVAGKAYTGREFDDLSPEQQRQACRTARCFARVEPAHKSRIVENLQSFNEITAMTGDGVNDAPALKKAEIGIAMGSGTAVAKSAAEMVLSDDNFASIVAAVEEGRAIYSNMKQFIRYLISSNVGEVVCIFLTAILGLPEALIPVQLLWVNLVTDGLPATALGFNPPDLDIMEKLPRSPREALISGWLFFRYLAIGVYVGLATVAAATWWFVYDAEGPHINFYQLRNFLKCSEDNPLFAGIDCEVFESRFPTTMALSVLVTIEMCNALNSVSENQSLLRMPPWMNPWLLVAVAMSMALHFLILLVPPLPLIFQVTPLSGRQWVVVLQISLPVILLDEALKYLSRNHMHACLYPGLLRTVSQAWSRQPLTTSWTPDHTGLASLGQGHSIVSLSELLREGGSREEMSQK

SEQ ID NO: 21651 - protein, 688 aa, Artificial Sequence
  Synthetic polypeptide
TDKEIGMLGQMFVVAEADAGSCLLHEFTISGTTYTPEGEVRQGDQPVRCGQFDGLVELATICALCNDSALDYNEAKGVYEKVGEATETALTCLVEKMNVFDTDLQALSRVERAGACNTVIKQLMRKEFTLEFSRDRKSMSVYCTPTRPHPTGQGSKMFVKGAPESVIERCSSVRVGSRTAPLTPTSREQILAKIRDWGSGSDTLRCLALATRDAPPRKEDMELDDCSKFVQYETDLTFVGCVGMLDPPRPEVAACITRCYQAGIRVVMITGDNKGTAVAICRRLGIFGDTEDVAGKAYTGREFDDLSPEQQRQACRTARCFARVEPAHKSRIVENLQSFNEITAMTGDGVNDAPALKKAEIGIAMGSGTAVAKSAAEMVLSDDNFASIVAAVEEGRAIYSNMKQFIRYLISSNVGEVVCIFLTAILGLPEALIPVQLLWVNLVTDGLPATALGFNPPDLDIMEKLPRSPREALISGWLFFRYLAIGVYVGLATVAAATWWFVYDAEGPHINFYQLRNFLKCSEDNPLFAGIDCEVFESRFPTTMALSVLVTIEMCNALNSVSENQSLLRMPPWMNPWLLVAVAMSMALHFLILLVPPLPLIFQVTPLSGRQWVVVLQISLPVILLDEALKYLSRNHMHACLYPGLLRTVSQAWSRQPLTTSWTPDHTGRNEPEVSAGNRVESPVCTSD

SEQ ID NO: 21652 - protein, 643 aa, Artificial Sequence
  Synthetic polypeptide
TDKEIGMLGQMFVVAEADAGSCLLHEFTISGTTYTPEGEVRQGDQPVRCGQFDGLVELATICALCNDSALDYNEAKGVYEKVGEATETALTCLVEKMNVFDTDLQALSRVERAGACNTVIKQLMRKEFTLEFSRDRKSMSVYCTPTRPHPTGQGSKMFVKGAPESVIERCSSVRVGSRTAPLTPTSREQILAKIRDWGSGSDTLRCLALATRDAPPRKEDMELDDCSKFVQYETDLTFVGCVGMLDPPRPEVAACITRCYQAGIRVVMITGDNKGTAVAICRRLGIFGDTEDVAGKAYTGREFDDLSPEQQRQACRTARCFARVEPAHKSRIVENLQSFNEITAMTGDGVNDAPALKKAEIGIAMGSGTAVAKSAAEMVLSDDNFASIVAAVEEGRAIYSNMKQFIRYLISSNVGEVVCIFLTAILGLPEALIPVQLLWVNLVTDGLPATALGFNPPDLDIMEKLPRSPREALISGWLFFRYLAIGVYVGLATVAAATWWFVYDAEGPHINFYQLRNFLKCSEDNPLFAGIDCEVFESRFPTTMALSVLVTIEMCNALNSVSENQSLLRMPPWMNPWLLVAVAMSMALHFLILLVPPLPLIFQVTPLSGRQWVVVLQISLPVILLDEALKYLSRNHMHEMSQK

SEQ ID NO: 21653 - protein, 59 aa, Artificial Sequence
  Synthetic polypeptide
DNASSRVRKGSPCGSWCWNSLRTSWCASCCWLPLSPLSWPGSRRARRPRPPSWSPWSSC

SEQ ID NO: 21654 - protein, 6 aa, Artificial Sequence
  Synthetic polypeptide
IMRAPE

SEQ ID NO: 21655 - protein, 991 aa, Artificial Sequence
  Synthetic polypeptide
CELPSEEGKSLWELVLEQFEDLLVRILLLAALVSFVLAWFEEGEETTTAFVEPLVIMLILVANAIVGVWQERNAESAIEALKEYEPEMGKVIRSDRKGVQRIRARDIVPGDIVEVAVGDKVPADLRLIEIKSTTLRVDQSILTGESVSVTKHTEAIPDPRAVNQDKKNMLFSGTNITSGKAVGVAVATGLHTELGKIRSQMAAVEPERTPLQRKLDEFGRQLSHAISVICVAVWVINIGHFADPAHGGSWLRGAVYYFKIAVALAVAAIPEGLPAVITTCLALGTRRMARKNAIVRSLPSVETLGCTSVICSDKTGTLTTNQMSVCRMFVVAEADAGSCLLHEFTISGTTYTPEGEVRQGDQPVRCGQFDGLVELATICALCNDSALDYNEAKGVYEKVGEATETALTCLVEKMNVFDTDLQALSRVERAGACNTVIKQLMRKEFTLEFSRDRKSMSVYCTPTRPHPTGQGSKMFVKGAPESVIERCSSVRVGSRTAPLTPTSREQILAKIRDWGSGSDTLRCLALATRDAPPRKEDMELDDCSKFVQYETDLTFVGCVGMLDPPRPEVAACITRCYQAGIRVVMITGDNKGTAVAICRRLGIFGDTEDVAGKAYTGREFDDLSPEQQRQACRTARCFARVEPAHKSRIVENLQSFNEITAMTGDGVNDAPALKKAEIGIAMGSGTAVAKSAAEMVLSDDNFASIVAAVEEGRAIYSNMKQFIRYLISSNVGEVVCIFLTAILGLPEALIPVQLLWVNLVTDGLPATALGFNPPDLDIMEKLPRSPREALISGWLFFRYLAIGVYVGLATVAAATWWFVYDAEGPHINFYQLRNFLKCSEDNPLFAGIDCEVFESRFPTTMALSVLVTIEMCNALNSVSENQSLLRMPPWMNPWLLVAVAMSMALHFLILLVPPLPLIFQVTPLSGRQWVVVLQISLPVILLDEALKYLSRNHMHACLYPGLLRTVSQAWSRQPLTTSWTPDHTGLASLKK

SEQ ID NO: 21656 - protein, 961 aa, Artificial Sequence
  Synthetic polypeptide
CELPSEEGKSLWELVLEQFEDLLVRILLLAALVSFVLAWFEEGEETTTAFVEPLVIMLILVANAIVGVWQERNAESAIEALKEYEPEMGKVIRSDRKGVQRIRARDIVPGDIVEVAVGDKVPADLRLIEIKSTTLRVDQSILTGESVSVTKHTEAIPDPRAVNQDKKNMLFSGTNITSGKAVGVAVATGLHTELGKIRSQMAAVEPERTPLQRKLDEFGRQLSHAISVICVAVWVINIGHFADPAHGGSWLRGAVYYFKIAVALAVAAIPEGLPAVITTCLALGTRRMARKNAIVRSLPSVETLGCTSVICSDKTGTLTTNQMSVCRMFVVAEADAGSCLLHEFTISGTTYTPEGEVRQGDQPVRCGQFDGLVELATICALCNDSALDYNEAKGVYEKVGEATETALTCLVEKMNVFDTDLQALSRVERAGACNTVIKQLMRKEFTLEFSRDRKSMSVYCTPTRPHPTGQGSKMFVKGAPESVIERCSSVRVGSRTAPLTPTSREQILAKIRDWGSGSDTLRCLALATRDAPPRKEDMELDDCSKFVQYETDLTFVGCVGMLDPPRPEVAACITRCYQAGIRVVMITGDNKGTAVAICRRLGIFGDTEDVAGKAYTGREFDDLSPEQQRQACRTARCFARVEPAHKSRIVENLQSFNEITAMTGDGVNDAPALKKAEIGIAMGSGTAVAKSAAEMVLSDDNFASIVAAVEEGRAIYSNMKQFIRYLISSNVGEVVCIFLTAILGLPEALIPVQLLWVNLVTDGLPATALGFNPPDLDIMEKLPRSPREALISGWLFFRYLAIGVYVGLATVAAATWWFVYDAEGPHINFYQLRNFLKCSEDNPLFAGIDCEVFESRFPTTMALSVLVTIEMCNALNSVSENQSLLRMPPWMNPWLLVAVAMSMALHFLILLVPPLPLIFQVTPLSGRQWVVVLQISLPVILLDEALKYLSRNHMHEEMSQK

SEQ ID NO: 21657 - protein, 1014 aa, Artificial Sequence
  Synthetic polypeptide
CELPSEEGKSLWELVLEQFEDLLVRILLLAALVSFVLAWFEEGEETTTAFVEPLVIMLILVANAIVGVWQERNAESAIEALKEYEPEMGKVIRSDRKGVQRIRARDIVPGDIVEVAVGDKVPADLRLIEIKSTTLRVDQSILTGESVSVTKHTEAIPDPRAVNQDKKNMLFSGTNITSGKAVGVAVATGLHTELGKIRSQMAAVEPERTPLQRKLDEFGRQLSHAISVICVAVWVINIGHFADPAHGGSWLRGAVYYFKIAVALAVAAIPEGLPAVITTCLALGTRRMARKNAIVRSLPSVETLGCTSVICSDKTGTLTTNQMSVCRMFVVAEADAGSCLLHEFTISGTTYTPEGEVRQGDQPVRCGQFDGLVELATICALCNDSALDYNEAKGVYEKVGEATETALTCLVEKMNVFDTDLQALSRVERAGACNTVIKQLMRKEFTLEFSRDRKSMSVYCTPTRPHPTGQGSKMFVKGAPESVIERCSSVRVGSRTAPLTPTSREQILAKIRDWGSGSDTLRCLALATRDAPPRKEDMELDDCSKFVQYETDLTFVGCVGMLDPPRPEVAACITRCYQAGIRVVMITGDNKGTAVAICRRLGIFGDTEDVAGKAYTGREFDDLSPEQQRQACRTARCFARVEPAHKSRIVENLQSFNEITAMTGDGVNDAPALKKAEIGIAMGSGTAVAKSAAEMVLSDDNFASIVAAVEEGRAIYSNMKQFIRYLISSNVGEVVCIFLTAILGLPEALIPVQLLWVNLVTDGLPATALGFNPPDLDIMEKLPRSPREALISGWLFFRYLAIGVYVGLATVAAATWWFVYDAEGPHINFYQLRNFLKCSEDNPLFAGIDCEVFESRFPTTMALSVLVTIEMCNALNSVSENQSLLRMPPWMNPWLLVAVAMSMALHFLILLVPPLPLIFQVTPLSGRQWVVVLQISLPVILLDEALKYLSRNHMHACLYPGLLRTVSQAWSRQPLTTSWTPDHTGLASLGQGHSIVSLSELLREGGSREEMSQK

SEQ ID NO: 21658 - protein, 1005 aa, Artificial Sequence
  Synthetic polypeptide
CELPSEEGKSLWELVLEQFEDLLVRILLLAALVSFVLAWFEEGEETTTAFVEPLVIMLILVANAIVGVWQERNAESAIEALKEYEPEMGKVIRSDRKGVQRIRARDIVPGDIVEVAVGDKVPADLRLIEIKSTTLRVDQSILTGESVSVTKHTEAIPDPRAVNQDKKNMLFSGTNITSGKAVGVAVATGLHTELGKIRSQMAAVEPERTPLQRKLDEFGRQLSHAISVICVAVWVINIGHFADPAHGGSWLRGAVYYFKIAVALAVAAIPEGLPAVITTCLALGTRRMARKNAIVRSLPSVETLGCTSVICSDKTGTLTTNQMSVCRMFVVAEADAGSCLLHEFTISGTTYTPEGEVRQGDQPVRCGQFDGLVELATICALCNDSALDYNEAKGVYEKVGEATETALTCLVEKMNVFDTDLQALSRVERAGACNTVIKQLMRKEFTLEFSRDRKSMSVYCTPTRPHPTGQGSKMFVKGAPESVIERCSSVRVGSRTAPLTPTSREQILAKIRDWGSGSDTLRCLALATRDAPPRKEDMELDDCSKFVQYETDLTFVGCVGMLDPPRPEVAACITRCYQAGIRVVMITGDNKGTAVAICRRLGIFGDTEDVAGKAYTGREFDDLSPEQQRQACRTARCFARVEPAHKSRIVENLQSFNEITAMTGDGVNDAPALKKAEIGIAMGSGTAVAKSAAEMVLSDDNFASIVAAVEEGRAIYSNMKQFIRYLISSNVGEVVCIFLTAILGLPEALIPVQLLWVNLVTDGLPATALGFNPPDLDIMEKLPRSPREALISGWLFFRYLAIGVYVGLATVAAATWWFVYDAEGPHINFYQLRNFLKCSEDNPLFAGIDCEVFESRFPTTMALSVLVTIEMCNALNSVSENQSLLRMPPWMNPWLLVAVAMSMALHFLILLVPPLPLIFQVTPLSGRQWVVVLQISLPVILLDEALKYLSRNHMHACLYPGLLRTVSQAWSRQPLTTSWTPDHTGRNEPEVSAGNRVESPVCTSD

SEQ ID NO: 21659 - protein, 960 aa, Artificial Sequence
  Synthetic polypeptide
CELPSEEGKSLWELVLEQFEDLLVRILLLAALVSFVLAWFEEGEETTTAFVEPLVIMLILVANAIVGVWQERNAESAIEALKEYEPEMGKVIRSDRKGVQRIRARDIVPGDIVEVAVGDKVPADLRLIEIKSTTLRVDQSILTGESVSVTKHTEAIPDPRAVNQDKKNMLFSGTNITSGKAVGVAVATGLHTELGKIRSQMAAVEPERTPLQRKLDEFGRQLSHAISVICVAVWVINIGHFADPAHGGSWLRGAVYYFKIAVALAVAAIPEGLPAVITTCLALGTRRMARKNAIVRSLPSVETLGCTSVICSDKTGTLTTNQMSVCRMFVVAEADAGSCLLHEFTISGTTYTPEGEVRQGDQPVRCGQFDGLVELATICALCNDSALDYNEAKGVYEKVGEATETALTCLVEKMNVFDTDLQALSRVERAGACNTVIKQLMRKEFTLEFSRDRKSMSVYCTPTRPHPTGQGSKMFVKGAPESVIERCSSVRVGSRTAPLTPTSREQILAKIRDWGSGSDTLRCLALATRDAPPRKEDMELDDCSKFVQYETDLTFVGCVGMLDPPRPEVAACITRCYQAGIRVVMITGDNKGTAVAICRRLGIFGDTEDVAGKAYTGREFDDLSPEQQRQACRTARCFARVEPAHKSRIVENLQSFNEITAMTGDGVNDAPALKKAEIGIAMGSGTAVAKSAAEMVLSDDNFASIVAAVEEGRAIYSNMKQFIRYLISSNVGEVVCIFLTAILGLPEALIPVQLLWVNLVTDGLPATALGFNPPDLDIMEKLPRSPREALISGWLFFRYLAIGVYVGLATVAAATWWFVYDAEGPHINFYQLRNFLKCSEDNPLFAGIDCEVFESRFPTTMALSVLVTIEMCNALNSVSENQSLLRMPPWMNPWLLVAVAMSMALHFLILLVPPLPLIFQVTPLSGRQWVVVLQISLPVILLDEALKYLSRNHMHEMSQK

SEQ ID NO: 21660 - protein, 47 aa, Artificial Sequence
  Synthetic polypeptide
LTPVIPALREAKAGRSLENWEVQMGPRTLQTAQPPARRNLRAATPCT

SEQ ID NO: 21661 - protein, 65 aa, Artificial Sequence
  Synthetic polypeptide
SQHFGRPRRADHLRTGRCRWGLGLYRQPSLLPEEICGLPHPVPELSERGDPDWSPGRAESHLHHL

SEQ ID NO: 21662 - protein, 17 aa, Artificial Sequence
  Synthetic polypeptide
DQLEQYGKTLSLQKLPR

SEQ ID NO: 21663 - protein, 236 aa, Artificial Sequence
  Synthetic polypeptide
AQESETSLSNMAKPCRYKNYPGEDSNDLIRHFLIESSAKGVHLKGADEEPYFGSLSAFVCQHSIMALALPCKLTIPQRELGGADGASDSTDSPASCQKKSAGCHTLYLSSVSVETLTGALAVQKAISTTFERDILPTPTVVHFKVTEQGITLTDVQRKVFFRRHYPLTTLRFCGMDPEQRKWQKYCKPSWIFGFVAKSQTEPQENVCHLFAEYDMVQPASQVIGLVTALLQDAERM

SEQ ID NO: 21664 - protein, 99 aa, Artificial Sequence
  Synthetic polypeptide
AIWQNPVATKITQVRTAMTSSDTSSSSRLPKECISKEQMRSPTLGASLPSCASIPSWPWPCPANSPSHRENWEVQMGPRTLQTAQPPARRNLRAATPCT

SEQ ID NO: 21665 - protein, 133 aa, Artificial Sequence
  Synthetic polypeptide
ILMPRFFSGPTEPESLERDSLENTLTESEARYSSQLAQMQCMITNVEAQLAEIRADLERQNQEYQVLLDVRARLEGEINTYRSLLENEDCKLPCNPCSTPSCTTCVPSPCVPRTVCVPRTVGMPCSPCPQGRY

SEQ ID NO: 21666 - protein, 22 aa, Artificial Sequence
  Synthetic polypeptide
CPGSFLDQLNQSLWRGTPWKTR

SEQ ID NO: 21667 - protein, 16 aa, Artificial Sequence
  Synthetic polypeptide
TRVSGEGLPGKHADGE

SEQ ID NO: 21668 - protein, 11 aa, Artificial Sequence
  Synthetic polypeptide
TPHSSFTRCRL

SEQ ID NO: 21669 - protein, 49 aa, Artificial Sequence
  Synthetic polypeptide
KPELLNQTTWVGVLAPMLNSLEEFGQGTEPHIPLSQGAGSRGGQQRPGE

SEQ ID NO: 21670 - protein, 471 aa, Artificial Sequence
  Synthetic polypeptide
IALKSLGKVLNPTFLFHKVQALEEANNDLENKIQDWYDKKGPAAIQKNYSPYYNTIDDLKDQIVDLTVGNNKTLLDIDNTRMTLDDFRIKFEMEQNLRQGVDADINGLRQVLDNLTMEKSDLEMQYETLQEELMALKKNHKEEMSQLTGQNSGDVNVEINVAPGKDLTKTLNDMRQEYEQLIAKNRKDIENQYETQITQIEHEVSSSGQEVQSSAKEVTQLRHGVQELEIELQSQLSKKAALEKSLEDTKNRYCGQLQMIQEQISNLEAQITDVRQEIECQNQEYSLLLSIKMRLEKEIETYHNLLEGGQEDFESSGAGKIGLGGRGGSGGSYGRGSRGGSGGSYGGGGSGGGYGGGSGSRGGSGGSYGGGSGSGGGSGGGYGGGSGGGHSGGSGGGHSGGSGGNYGGGSGSGGGSGGGYGGGSGSRGGSGGSHGGGSGFGGESGGSYGGGEEASGSGGGYGGGSGKSSHS

SEQ ID NO: 21671 - protein, 8 aa, Artificial Sequence
  Synthetic polypeptide
RVWARLWT

SEQ ID NO: 21672 - protein, 41 aa, Artificial Sequence
  Synthetic polypeptide
KPELLNQTTWVGVLAPMLNSLEEFGQDCGPDSGQQQNSPGH

SEQ ID NO: 21673 - protein, 417 aa, Artificial Sequence
  Synthetic polypeptide
IALKSLGKIVDLTVGNNKTLLDIDNTRMTLDDFRIKFEMEQNLRQGVDADINGLRQVLDNLTMEKSDLEMQYETLQEELMALKKNHKEEMSQLTGQNSGDVNVEINVAPGKDLTKTLNDMRQEYEQLIAKNRKDIENQYETQITQIEHEVSSSGQEVQSSAKEVTQLRHGVQELEIELQSQLSKKAALEKSLEDTKNRYCGQLQMIQEQISNLEAQITDVRQEIECQNQEYSLLLSIKMRLEKEIETYHNLLEGGQEDFESSGAGKIGLGGRGGSGGSYGRGSRGGSGGSYGGGGSGGGYGGGSGSRGGSGGSYGGGSGSGGGSGGGYGGGSGGGHSGGSGGGHSGGSGGNYGGGSGSGGGSGGGYGGGSGSRGGSGGSHGGGSGFGGESGGSYGGGEEASGSGGGYGGGSGKSSHS

SEQ ID NO: 21674 - protein, 2186 aa, Artificial Sequence
  Synthetic polypeptide
GGWITSPREECVSAQTLLLQLLQSCFSVLQGDVLAASEEEKAPIQSPKGVEAAKELYTHLCDVVDKVDGDSVPMEILKQEVRNTLLNGAAIFFPNRQTRRNHLFTMMNVTEQEHKQSLQLTFRSLCTYFSDKDPGGLLLLPEKNDLAKMNISEVLAVMDTLVSVAARECELLMLSGAPGEVGSVLFSLFWSVQGSLLSWCYLQLKSTDSGAKDLAVDLIEKYVGQFLASMRAILESLFSQYSGKTIVERLCNSVFSMAARQLVIFLLDFCTLDIPHCVLLREFSVLTELLKKLCSGPEGGLRKLDVETWQQEQPVVLHTWTKESAHNYENNCHEVSVFVSPGATYFEVEFDDRCETEKRYDYLEFTDARGRKTRYDTKVGTDKWPKKVTFKAGPRLQFLFHSDSSHNEWGYKFTVTACGLPDVAVSWGLDLQLLVSRLMGRLASQCMALKSVRQLGSNMVVPQAKMALVLSSPLWKPVFRHQVCPELELEASWPTHPHRNSKEVKNIPDDPCRHFLLDFAQSEPAQNFCGPYSELFKGFIQACRKQAPKTDIVAGSTIDQAVNATFAALVYRTPDLYEKLQKYVNSGGKIALSEEFAQVYSLADGIRIWMLEMKQKSLMSLGNEAEEKHSSEATEVNPESLAKECIEKSLLLLKFLPTGISSKESCEKLETADETSHLQPLNKRQRTSSVVEEHFQASVSPTEAAPPATGDQSPGLGTQPKLPSSSGLPAADVSPATAEEPLSPSTPTRRPPFTRGRLRLLSFRSMEEARLVPTVKEKYPVLKDVMDFIKDQSLSHRSVVKVLSLRKAQAQSILEVLKITQHCAESLGQPHCFHPPFILFLLELLTCQKDFTNYFGHLEGCGADLHKEIRDTYYQLVLFLVKAVKGFSSLNDRSLLPALSCVQTALLHLLDMGWEPNDLAFFVDIQLPDLLMKMSQENISVHDSVISQWSEEDELADAKQNSEWMDECQDGMFEAWYEKIAQEDPEKQRKMHMFIARYCDLLNVDISCDGCDEIAPWHRYRCLQCSDMDLCKTCFLGGVKPEGHGDDHEMVNMEFTCDHCQGLIIGRRMNCNVCDDFDLCYGCYAAKKYSYGHLPTHSITAHPMVTIRISDRQRLIQPYIHNYSWLLFAALALYSAHLASAEDVDGEKLDPQTRSSATTLRSQCMQLVGDCLMKAHQGKGLKALALLGVLPDGDSSLEDQALPVTVPTGASEEQLEKKAVQGAELSEAGNGKRAVHEEIRPVDFKQRNKADKGVSLSKDPSCQTQISDSPADASPPTGLPDAEDSEVSSQKPIEEKAVTPSPEQVFAECSQKRILGLLAAMLPPLKSGPTVPLIDLEHVLPLMFQVVISNAGHLNETYHLTLGLLGQLIIRLLPAEVDAAVIKVLSAKHNLFAAGDSSIVPDGWKTTHLLFSLGAVCLDSRVGLDWACSMAEILRSLNSAPLWRDVIATFTDHCIKQLPFQLKHTNIFTLLVLVGFPQVLCVGTRCVYMDNANEPHNVIILKHFTEKNRAVIVDVKTRKRKTVKDYQLVQKGGGQECGDSRAQLSQYSQHFAFIASHLLQSSMDSHCPEAVEATWVLSLALKGLYKTLKAHGFEEIRATFLQTDLLKLLVKKCSKGTGFSKTWLLRDLEILSIMLYSSKKEINALAEHGDLELDERGDREEEVERPVSSPGDPEQKKLDPLEGLDEPTRICFLMAHDALNAPLHILRAIYELQMKKTDYFFLEVQKRFDGDELTTDERIRSLAQRWQPSKSLRLEEQSAKAVDTDMIILPCLSRPARCDQATAESNPVTQKLISSTESELQQSYAKQRRSKSAALLHKELNCKSKRAVRDYLFRVNEATAVLYARHVLASLLAEWPSHVPVSEDILELSGPAHMTYILDMFMQLEEKHEWEKILQKVLQGCREDMLGTMALAACQFMEEPGMEVQVRESKHPYNNNTNFEDKVHIPGAIYLSIKFDSQCNTEEGCDELAMSSSSDFQQDRHSFSGSQQKWKDFELPGDTLYYRFTSDMSNTEWGYRFTVTAGHLGRFQTGFEILKQMLSEERVVPHLPLAKIWEWLVGVACRQTGHQRLKAIHLLLRIVRCCGHSDLCDLALLKPLWQLFTHMEYGLFEDVTQPGILLPLHRALTELFFVTENRAQELGVLQDYLLALTTDDHLLRCAAQALQNIAAISLAINYPNKATRLWNVEC

SEQ ID NO: 21675 - protein, 65 aa, Artificial Sequence
  Synthetic polypeptide
WARWLTPVIPALWEAEAGGSQARGKNASLPKPCFCSYSRAASLCCREMYWLLLRRKRLQSKALKE

SEQ ID NO: 21676 - protein, 44 aa, Artificial Sequence
  Synthetic polypeptide
SQHFGRLRRVDHKPEGRMRLCPNPASAATPELLLCAAGRCTGCF

SEQ ID NO: 21677 - protein, 588 aa, Artificial Sequence
  Synthetic polypeptide
GHLMEQPIKVTEWQQTYTYDSGIHSGANTCVPSVSSKGIMEEDEACGRQYTLKKTTTYTQGVPPSQGDLEYQMSTTARAKRVREAMCPGVSGEDSSLLLATQVEGQATNLQRLAEPSQLLKSAIVHLINYQDDAELATRALPELTKLLNDEDPVVVTKAAMIVNQLSKKEASRRALMGSPQLVAAVVRTMQNTSDLDTARCTTSILHNLSHHREGLLAIFKSGGIPALVRMLSSPVESVLFYAITTLHNLLLYQEGAKMAVRLADGLQKMVPLLNKNNPKFLAITTDCLQLLAYGNQESKILTATVDNANILLQIDNARLAADDFRTKFETEQALRLSVEADINGLRRVLDELTLARADLEMQIENLKEELAYLKKNHEEEMNALRGQVGGEINVEMDAAPGVDLSRILNEMRDQYEKMAEKNRKDAEDWFFSKTEELNREVATNSELVQSGKSEISELRRTMQALEIELQSQLSMKASLEGNLAETENRYCVQLSQIQGLIGSVEEQLAQLRCEMEQQNQEYKILLDVKTRLEQEIATYRRLLEGEDAHLTQYKKEPVTTRQVRTIVEEVQDGKVISSREQVHQTTR

SEQ ID NO: 21678 - protein, 2 aa, Artificial Sequence
  Synthetic polypeptide
GT

SEQ ID NO: 21679 - protein, 742 aa, Artificial Sequence
  Synthetic polypeptide
GHLMEQPIKVTEWQQTYTYDSGIHSGANTCVPSVSSKGIMEEDEACGRQYTLKKTTTYTQGVPPSQGDLEYQMSTTARAKRVREAMCPGVSGEDSSLLLATQVEGQATNLQRLAEPSQLLKSAIVHLINYQDDAELATRALPELTKLLNDEDPVVVTKAAMIVNQLSKKEASRRALMGSPQLVAAVVRTMQNTSDLDTARCTTSILHNLSHHREGLLAIFKSGGIPALVRMLSSPVESVLFYAITTLHNLLLYQEGAKMAVRLADGLQKMVPLLNKNNPKFLAITTDCLQLLAYGNQESKLIILANGGPQALVQIMRNYSYEKLLWTTSRVLKVLSVCPSNKPAIVEAGGMQALGKHLTSNSPRLVQNCLWTLRNLSDVATKQEGLESVLKILVNQLSVDDVNVLTCATGTLSNLTCNNSKNKTLVTQNSGVEALIHAILRAGDKDDITEPAVCALRHLTSRHPEAEMAQNSVRLNYGIPAIVKLLNQPNQWPLVKATIGLIRNLALCPANHAPLQEAAVIPRLVQLLVKAHQDAQRHVAAGTQQPYTDGVRMEEIVEGCTGALHILARDPMNRMEIFRLNTIPLFVQLLYSSVENIQRVAAGVLCELAQDKEAADAIDAEGASAPLMELLHSRNEGTATYAAAVLFRISEDKNPDYRKRVSVELTNSLFKHDPAAWEAAQSMIPINEPYGDDMDATYRPMYSSDVPLDPLEMHMDMDGDYPIDTYSDGLRPPYPTADHMLA

SEQ ID NO: 21680 - protein, 294 aa, Artificial Sequence
  Synthetic polypeptide
GHLMEQPIKVTEWQQTYTYDSGIHSGANTCVPSVSSKGIMEEDEACGRQYTLKKTTTYTQGVPPSQGDLEYQMSTTARAKRVREAMCPGVSGEDSSLLLATQVEGQATNLQRLAEPSQLLKSAIVHLINYQDDAELATRALPELTKLLNDEDPVVVTKAAMIVNQLSKKEASRRALMGSPQLVAAVVRTMQNTSDLDTARCTTSILHNLSHHREGLLAIFKSGGIPALVRMLSSPVESVLFYAITTLHNLLLYQEGAKMAVRLADGLQKMVPLLNKNNPKFLAITTDCLQLLAY

SEQ ID NO: 21681 - protein, 292 aa, Artificial Sequence
  Synthetic polypeptide
GHLMEQPIKVTEWQQTYTYDSGIHSGANTCVPSVSSKGIMEEDEACGRQYTLKKTTTYTQGVPPSQGDLEYQMSTTARAKRVREAMCPGVSGEDSSLLLATQVEGQATNLQRLAEPSQLLKSAIVHLINYQDDAELATRALPELTKLLNDEDPVVVTKAAMIVNQLSKKEASRRALMGSPQLVAAVVRTMQNTSDLDTARCTTSILHNLSHHREGLLAIFKSGGIPALVRMLSSPVESVLFYAITTLHNLLLYQEGAKMAVRLADGLQKMVPLLNKNNPKFLAITTDCLQLL

SEQ ID NO: 21682 - protein, 273 aa, Artificial Sequence
  Synthetic polypeptide
GHLMEQPIKVTEWQQTYTYDSGIHSGANTCVPSVSSKGIMEEDEACGRQYTLKKTTTYTQGVPPSQGDLEYQMSTTARAKRVREAMCPGVSGEDSSLLLATQVEGQATNLQRLAEPSQLLKSAIVHLINYQDDAELATRALPELTKLLNDEDPVVVTKAAMIVNQLSKKEASRRALMGSPQLVAAVVRTMQNTSDLDTARCTTSILHNLSHHREGLLAIFKSGGIPALVRMLSSPVESVLFYAITTLHNLLLYQEGAKMAVRLADGLQKMVPL

SEQ ID NO: 21683 - protein, 232 aa, Artificial Sequence
  Synthetic polypeptide
GHLMEQPIKVTEWQQTYTYDSGIHSGANTCVPSVSSKGIMEEDEACGRQYTLKKTTTYTQGVPPSQGDLEYQMSTTARAKRVREAMCPGVSGEDSSLLLATQVEGQATNLQRLAEPSQLLKSAIVHLINYQDDAELATRALPELTKLLNDEDPVVVTKAAMIVNQLSKKEASRRALMGSPQLVAAVVRTMQNTSDLDTARCTTSILHNLSHHREGLLAIFKSGGIPALVRML

SEQ ID NO: 21684 - protein, 101 aa, Artificial Sequence
  Synthetic polypeptide
GHLMEQPIKVTEWQQTYTYDSGIHSGANTCVPSVSSKGIMEEDEACGRQYTLKKTTTYTQGVPPSQGDLEYQMSTTARAKRVREAMCPGVSGEDSSLLLAT

SEQ ID NO: 21685 - protein, 83 aa, Artificial Sequence
  Synthetic polypeptide
GHLMEQPIKVTEWQQTYTYDSGIHSGANTCVPSVSSKGIMEEDEACGRQYTLKKTTTYTQGVPPSQGDLEYQMSTTARAKRVR

SEQ ID NO: 21686 - protein, 24 aa, Artificial Sequence
  Synthetic polypeptide
GLHIQLLRRQDPWLCRANLQRPCH

SEQ ID NO: 21687 - protein, 235 aa, Artificial Sequence
  Synthetic polypeptide
ASTYSCSGDKIPGSAVLIFNVHVIDFHNPADVVEIRTLSRPSETCNETTKLGDFVRYHYNCSLLDGTQLFTSHDYGAPQEATLGANKVIEGLDTGLQGMCVGERRQLIVPPHLAHGESGARGVPGSAVLLFEVELVSREDGLPTGYLFVWHKDPPANLFEDMDLNKDGEVPPEEFSTFIKAQVSEGKGRLMPGQDPEKTIGDMFQNQDRNQDGKITVDELKLKSDEDEERVHEEL

SEQ ID NO: 21688 - protein, 16 aa, Artificial Sequence
  Synthetic polypeptide
PPHTVAQETRSLALPC

SEQ ID NO: 21689 - protein, 37 aa, Artificial Sequence
  Synthetic polypeptide
GLHIQLLRLYTARGHPTKDSRRQDPWLCRANLQRPCH

SEQ ID NO: 21690 - protein, 248 aa, Artificial Sequence
  Synthetic polypeptide
ASTYSCSGCILHEGIQPRTQGDKIPGSAVLIFNVHVIDFHNPADVVEIRTLSRPSETCNETTKLGDFVRYHYNCSLLDGTQLFTSHDYGAPQEATLGANKVIEGLDTGLQGMCVGERRQLIVPPHLAHGESGARGVPGSAVLLFEVELVSREDGLPTGYLFVWHKDPPANLFEDMDLNKDGEVPPEEFSTFIKAQVSEGKGRLMPGQDPEKTIGDMFQNQDRNQDGKITVDELKLKSDEDEERVHEEL

SEQ ID NO: 21691 - protein, 29 aa, Artificial Sequence
  Synthetic polypeptide
PPHTVAQVVYCTRASNQGLKETRSLALPC

SEQ ID NO: 21692 - protein, 8 aa, Artificial Sequence
  Synthetic polypeptide
SQLLRRLR

SEQ ID NO: 21693 - protein, 144 aa, Artificial Sequence
  Synthetic polypeptide
KYKKISQAWWCMPVIPATQEAEINNPDMRVQILKDYVRQHFPATPLLDYALEVEKITTSKKPNLILNVDGLIGVAFVDMLRNCGSFTREEADEYIDIGALNGIFVLGRSMGFIGHYLDQKRLKQGLYRHPWDDISYVLPEHMSM

SEQ ID NO: 21694 - protein, 523 aa, Artificial Sequence
  Synthetic polypeptide
LTSGIPGLWEAKIRTIAIIAEGIPEALTRKLIKKADQKGVTIIGPATVGGIKPGCFKIGNTGGMLDNILASKLYRPGSVAYVSRSGGMSNELNNIISRTTDGVYEGVAIGGDRYPGSTFMDHVLRYQDTPGVKMIVVLGEIGGTEEYKICRGIKEGRLTKPIVCWCIGTCATMFSSEVQFGHAGACANQASETAVAKNQALKEAGVFVPRSFDELGEIIQSVYEDLVANGVIVPAQEVPPPTVPMDYSWARELGLIRKPASFMTSICDERGQELIYAGMPITEVFKEEMGIGGVLGLLWFQKRLPKYSCQFIEMCLMVTADHGPAVSGAHNTIICARAGKDLVSSLTSGLLTIGDRFGGALDAAAKMFSKAFDSGIIPMEFVNKMKKEGKLIMGIGHRVKSINNPDMRVQILKDYVRQHFPATPLLDYALEVEKITTSKKPNLILNVDGLIGVAFVDMLRNCGSFTREEADEYIDIGALNGIFVLGRSMGFIGHYLDQKRLKQGLYRHPWDDISYVLPEHMSM

SEQ ID NO: 21695 - protein, 23 aa, Artificial Sequence
  Synthetic polypeptide
AGCGDSHLESQDFGRPRSGPSPS

SEQ ID NO: 21696 - protein, 24 aa, Artificial Sequence
  Synthetic polypeptide
MGAVTHIWNPRTLGGQDPDHRHHS

SEQ ID NO: 21697 - protein, 19 aa, Artificial Sequence
  Synthetic polypeptide
EAEICVLKMLAIMVIEQPP

SEQ ID NO: 21698 - protein, 56 aa, Artificial Sequence
  Synthetic polypeptide
SQRFWRLRQMDHLRPGVQDQPGQRGKTPSQQKIQKLAGCGGVCLWSQPLRRLRYVS

SEQ ID NO: 21699 - protein, 24 aa, Artificial Sequence
  Synthetic polypeptide
ATQKHKPMQTTTVCCSWRHQQRLQ

SEQ ID NO: 21700 - protein, 56 aa, Artificial Sequence
  Synthetic polypeptide
SQCLGRLEWEDHLRPGVRDQPRRHRSTSLCRRQQFAVHGDISKDCNERERNLHGNS

SEQ ID NO: 21701 - protein, 80 aa, Artificial Sequence
  Synthetic polypeptide
GQEFETSLGDTEAQAYADDNSLLFMETSAKTAMNVNEIFMAIAKKLPKNEPQNATGAPGRNRGVDLQENNPASRSQCCSN

SEQ ID NO: 21702 - protein, 77 aa, Artificial Sequence
  Synthetic polypeptide
SQCLGRLEWEDHLRPGVRDQPRRHRSTSLCRRQQFAVHGDISKDCNERERNLHGNRSVASPPLLSPPQQGHITCLLV

SEQ ID NO: 21703 - protein, 83 aa, Artificial Sequence
  Synthetic polypeptide
GQEFETSLGDTEAQAYADDNSLLFMETSAKTAMNVNEIFMAIGQLLLLPSSLHHSKGISPVCWSRVGLRGPFTTLFFFFFFFF

SEQ ID NO: 21704 - protein, 1016 aa, Artificial Sequence
  Synthetic polypeptide
SQHFGRPKQEDPLKQGVRDEPRQHNSNFLLANAQGTRGFPIVYCSDGFCELTGYGRTEVMQKTCSCRFLYGPETSEPALQRLHKALEGHQEHRAEICFYRKDGSAFWCLLDMMPIKNEMGEVVLFLFSFKDITQSGSPGLGPQGGRGDSNHENSLGRRGATWKFRSARRRSRTVLHRLTGHFGRRGQGGMKANNNVFEPKPSVPEYKVASVGGSRCLLLHYSVSKAIWDGLILLATFYVAVTVPYNVCFSGDDDTPITSRHTLVSDIAVEMLFILDIILNFRTTYVSQSGQVISAPRSIGLHYLATWFFIDLIAALPFDLLYIFNITVTSLVHLLKTVRLLRLLRLLQKLERYSQCSAVVLTLLMSVFALLAHWMACIWYVIGRREMEANDPLLWDIGWLHELGKRLEVPYVNGSVGGPSRRSAYIAALYFTLSSLTSVGFGNVCANTDAEKIFSICTMLIGALMHAVVFGNVTAIIQRMYSRRSLYHSRMKDLKDFIRVHRLPRPLKQRMLEYFQTTWAVNSGIDANELLRDFPDELRADIAMHLNREILQLPLFGAASRGCLRALSLHIKTSFCAPGEYLLRRGDALQAHYYVCSGSLEVLRDNMVLAILGKGDLIGADIPEPGQEPGLGADPNFVLKTSADVKALTYCGLQQLSSRGLAEVLRLYPEYGAAFRAGLPRDLTFNLRQGSDTSGLSRFSRSPRLSQPRSESLGSSSDKTLPSITEAESGAEPGGGPRPRRPLLLPNLSPARPRGSLVSLLGEELPPFSALVSSPSLSPSLSPALAGQGHSASPHGPPRCSAAWKPPQLLIPPLGTFGPPDLSPRIVDGIEDSGSTAEAPSFRFSRRPELPRPRSQAPPTGTRPSPELASEAEEVKEKVCRLNQEISRLNQEVSQLSRELRHIMGLLQARLGPPGHPAGSAWTPDPPCPQLRPPCLSPCASRPPPSLQDTTLAEVHCPASVGTMETGTALLDLRPSILPPYPSEPDPLGPSPVPEASPPTPSLLRHSFQSRSDTFH

SEQ ID NO: 21705 - protein, 98 aa, Artificial Sequence
  Synthetic polypeptide
SKEFETSLGNITATSCWPTHRAHGAFPSSTAPTASASSQATVAPRSCRRPAAAVSSTAQRPVSQPCSVCTKPWRATRSTGLKSASTARMAQPFGASWT

SEQ ID NO: 21706 - protein, 709 aa, Artificial Sequence
  Synthetic polypeptide
GRARWLTPVIPALWEAENTYDRCPMELVRCIRHILYNEQRLVREANNGSSPAGSLADAMSQKHLQINQTFEELRLVTQDTENELKKLQQTQEYFIIQYQESLRIQAQFGPLAQLSPQERLSRETALQQKQVSLEAWLQREAQTLQQYRVELAEKHQKTLQLLRKQQTIILDDELIQWKRRQQLAGNGGPPEGSLDVLQSWCEKLAEIIWQNRQQIRRAEHLCQQLPIPGPVEEMLAEVNATITDIISALVTSTFIIEKQPPQVLKTQTKFAATVRLLVGGKLNVHMNPPQVKATIISEQQAKSLLKNENTRNDYSGEILNNCCVMEYHQATGTLSAHFRNMSLKRIKRSDRRGAESVTEEKFTILFESQFSVGGNELVFQVKTLSLPVVVIVHGSQDNNATATVLWDNAFAEPGRVPFAVPDKVLWPQLCEALNMKFKAEVQSNRGLTKENLVFLAQKLFNNSSSHLEDYSGLSVSWSQFNRENLPGRNYTFWQWFDGVMEVLKKHLKPHWNDGAILGFVNKQQAHDLLINKPDGTFLLRFSDSEIGGITIAWKFDSQERMFWNLMPFTTRDFSIRSLADRLGDLNYLIYVFPDRPKDEVYSKYYTPVPCESATAKAVDGYVKPQIKQVVPEFVNASADAGGGSATYMDQAPSPAVCPQAHYNMYPQNPDSVLDTDGDFDLEDTMDVARRVEELLGRPMDSQWIPHAQS

SEQ ID NO: 21707 - protein, 74 aa, Artificial Sequence
  Synthetic polypeptide
SQHFGRLRTRMTAAPWSWSAASAIYCTMNRGWSEKPTMVALQLEALLMPCPRNTSRSTRRLRSCDWSRRTQRMS

SEQ ID NO: 21708 - protein, 78 aa, Artificial Sequence
  Synthetic polypeptide
GRARWLTPVIPALWEAENTYDRCPMELVRCIRHILYNEQRLVREANNGSSPAGSLADAMSQKHLQINQTFEELRLVTQ

SEQ ID NO: 21709 - protein, 69 aa, Artificial Sequence
  Synthetic polypeptide
SQHFGRLRTRMTAAPWSWSAASAIYCTMNRGWSEKPTMVALQLEALLMPCPRNTSRSTRRLRSCDWSRR

SEQ ID NO: 21710 - protein, 22 aa, Artificial Sequence
  Synthetic polypeptide
GRARWLTPVIPALWEAEGLSRS

SEQ ID NO: 21711 - protein, 752 aa, Artificial Sequence
  Synthetic polypeptide
SQHFGRLRDSVDLDNPQENIKATQLLEGLVQELQKKAEHQVGEDGFLLKIKLGHYATQLQNTYDRCPMELVRCIRHILYNEQRLVREANNGSSPAGSLADAMSQKHLQINQTFEELRLVTQDTENELKKLQQTQEYFIIQYQESLRIQAQFGPLAQLSPQERLSRETALQQKQVSLEAWLQREAQTLQQYRVELAEKHQKTLQLLRKQQTIILDDELIQWKRRQQLAGNGGPPEGSLDVLQSWCEKLAEIIWQNRQQIRRAEHLCQQLPIPGPVEEMLAEVNATITDIISALVTSTFIIEKQPPQVLKTQTKFAATVRLLVGGKLNVHMNPPQVKATIISEQQAKSLLKNENTRNDYSGEILNNCCVMEYHQATGTLSAHFRNMSLKRIKRSDRRGAESVTEEKFTILFESQFSVGGNELVFQVKTLSLPVVVIVHGSQDNNATATVLWDNAFAEPGRVPFAVPDKVLWPQLCEALNMKFKAEVQSNRGLTKENLVFLAQKLFNNSSSHLEDYSGLSVSWSQFNRENLPGRNYTFWQWFDGVMEVLKKHLKPHWNDGAILGFVNKQQAHDLLINKPDGTFLLRFSDSEIGGITIAWKFDSQERMFWNLMPFTTRDFSIRSLADRLGDLNYLIYVFPDRPKDEVYSKYYTPVPCESATAKAVDGYVKPQIKQVVPEFVNASADAGGGSATYMDQAPSPAVCPQAHYNMYPQNPDSVLDTDGDFDLEDTMDVARRVEELLGRPMDSQWIPHAQS

SEQ ID NO: 21712 - protein, 121 aa, Artificial Sequence
  Synthetic polypeptide
SQHFGRLRDSVDLDNPQENIKATQLLEGLVQELQKKAEHQVGEDGFLLKIKLGHYATQLQNTYDRCPMELVRCIRHILYNEQRLVREANNGSSPAGSLADAMSQKHLQINQTFEELRLVTQ

SEQ ID NO: 21713 - protein, 15 aa, Artificial Sequence
  Synthetic polypeptide
PTPRRIQSFRDRGLF

SEQ ID NO: 21714 - protein, 204 aa, Artificial Sequence
  Synthetic polypeptide
SQHFGRPRRVDHLRSGVRDQPDQRRDASRAFVTGDCSEAGLVDDVSDLSAAEMLTLHNWLSFYEKNYVCVGRVTGRFYGEDGLPTPALTQVEAAITRGLEANKLQLQEKQTFPPCNAEWSSARGSRLWCSQKSGGVSRDWIGVPRKLYKPGAKEPRCVCVRTTGPPSGQMPDNPPHRNRGDLDHPNLAEYTGCPPLAITCSFPL

SEQ ID NO: 21715 - protein, 18 aa, Artificial Sequence
  Synthetic polypeptide
GQEFETSLTNAETHPELS

SEQ ID NO: 21716 - protein, 321 aa, Artificial Sequence
  Synthetic polypeptide
NTKISWTHSLPVVVISNICQMPNAWASILWYNMLTNNPKNVNFFTKPPIGTWDQVAEVLSWQFSSTTKRGLSIEQLTTLAEKLLGPGVNYSGCQITWAKFCKENMAGKGFSFWVWLDNIIDLVKKYILALWNEGYIMGFISKERERAILSTKPPGTFLLRFSESSKEGGVTFTWVEKDISGKTQIQSVEPYTKQQLNNMSFAEIIMGYKIMDATNILVSPLVYLYPDIPKEEAFGKYCRPESQEHPEADPGSAAPYLKTKFICVTPTTCSNTIDLPMSPRTLDSLMQFGNNGEGAEPSAGGQFESLTFDMELTSECATSPM

SEQ ID NO: 21717 - protein, 20 aa, Artificial Sequence
  Synthetic polypeptide
RNPVSTKIQKLAGPTPCQLW

SEQ ID NO: 21718 - protein, 93 aa, Artificial Sequence
  Synthetic polypeptide
LDPLLASCGDLQHLSDAKCLGVHPVVQHADQQSQECKLFYQAPNWNLGSSGRGPELAVLLHHQARTEHRAADYTGRETLGTWCELFRVSDHMG

SEQ ID NO: 21719 - protein, 273 aa, Artificial Sequence
  Synthetic polypeptide
NTKISWTHSLPVVVISNICQMPNAWASILWYNMLTNNPKNVNFFTKPPIGTWDQVAEVLSWQFSSTTKRGLSIEQLTTLAEKLLGPGVNYSGCQITWAKFCKENMAGKGFSFWVWLDNIIDLVKKYILALWNEGYIMGFISKERERAILSTKPPGTFLLRFSESSKEGGVTFTWVEKDISGKTQIQSVEPYTKQQLNNMSFAEIIMGYKIMDATNILVSPLVYLYPDIPKEEAFGKYCRPESQEHPEADPGSAAPYLKTKFICVTPFIDAVWK

SEQ ID NO: 21720 - protein, 320 aa, Artificial Sequence
  Synthetic polypeptide
NTKISWTHSLPVVVISNICQMPNAWASILWYNMLTNNPKNVNFFTKPPIGTWDQVAEVLSWQFSSTTKRGLSIEQLTTLAEKLLGPGVNYSGCQITWAKFCKENMAGKGFSFWVWLDNIIDLVKKYILALWNEGYIMGFISKERERAILSTKPPGTFLLRFSESSKEGGVTFTWVEKDISGKTQIQSVEPYTKQQLNNMSFAEIIMGYKIMDATNILVSPLVYLYPDIPKEEAFGKYCRPESQEHPEADPGAAPYLKTKFICVTPTTCSNTIDLPMSPRTLDSLMQFGNNGEGAEPSAGGQFESLTFDMELTSECATSPM

SEQ ID NO: 21721 - protein, 71 aa, Artificial Sequence
  Synthetic polypeptide
RGALAGRPSCAASSSCVALSQPLCLSEPRLAHLKNGKKTPTVQCYCTAITRMCARKATLSCGGTGPAGSER

SEQ ID NO: 21722 - protein, 74 aa, Artificial Sequence
  Synthetic polypeptide
KTERRRLPCSVIVPLLPECVHAKLLFRVVGLGPLGARDRLDGAEWHQPGTGLERPGGHLAAGVPGLGPDPGRDQ

SEQ ID NO: 21723 - protein, 660 aa, Artificial Sequence
  Synthetic polypeptide
GSAGRKAQLRRLQQLCGLEPATLPFRASAGPPEKRKEDAYRAVLLYRYYQNVCTQSYSFVWWDWARWEREIDWMALNGINLALAWSGQEAIWQRVYLALGLTQAEINEFFTGPAFLAWGRMGNLHTWDGPLPPSWHIKQLYLQHRVLDQMRSFGMTPVLPAFAGHVPEAVTRVFPQVNVTKMGSWGHFNCSYSCSFLLAPEDPIFPIIGSLFLRELIKEFGTDHIYGADTFNEMQPPSSEPSYLAAATTAVYEAMTAVDTEAVWLLQGWLFQHQPQFWGPAQIRAVLGAVPRGRLLVLDLFAESQPVYTRTASFQGQPFIWCMLHNFGGNHGLFGALEAVNGGPEAARLFPNSTMVGTGMAPEGISQNEVVYSLMAELGWRKDPVPDLAAWVTSFAARRYGVSHPDAGAAWRLLLRSVYNCSGEACRGHNRSPLVRRPSLQMNTSIWYNRSDVFEAWRLLLTSAPSLATSPAFRYDLLDLTRQAVQELVSLYYEEARSAYLSKELASLLRAGGVLAYELLPALDEVLASDSRFLLGSWLEQARAAAVSEAEADFYEQNSRYQLTLWGPEGNILDYANKQLAGLVANYYTPRWRLFLEALVDSVAQGIPFQQHQFDKNVFQLEQAFVLSKQRYPSQPRGDTVDLAKKIFLKYYPRWVAGSW

SEQ ID NO: 21724 - protein, 70 aa, Artificial Sequence
  Synthetic polypeptide
KTERRRLPCSVIVPLLPECVHAKLLFRVVGLGPLGARDRLDGAEWHQPGTGLERPGGHLAAGVPGLGPDP

SEQ ID NO: 21725 - protein, 102 aa, Artificial Sequence
  Synthetic polypeptide
GSAGRKAQLRRLQQLCGLEPATLPFRASAGPPEKRKEDAYRAVLLYRYYQNVCTQSYSFVWWDWARWEREIDWMALNGINLALAWSGQEAIWQRVYLALGLT

SEQ ID NO: 21726 - protein, 58 aa, Artificial Sequence
  Synthetic polypeptide
RGALAGRPSCAASSSCVALSQPLCLSEPRLAHLKNGKKTPTVQCYCVPGLGPDPGRDQ

SEQ ID NO: 21727 - protein, 578 aa, Artificial Sequence
  Synthetic polypeptide
KTERRRLPCSVIVYLALGLTQAEINEFFTGPAFLAWGRMGNLHTWDGPLPPSWHIKQLYLQHRVLDQMRSFGMTPVLPAFAGHVPEAVTRVFPQVNVTKMGSWGHFNCSYSCSFLLAPEDPIFPIIGSLFLRELIKEFGTDHIYGADTFNEMQPPSSEPSYLAAATTAVYEAMTAVDTEAVWLLQGWLFQHQPQFWGPAQIRAVLGAVPRGRLLVLDLFAESQPVYTRTASFQGQPFIWCMLHNFGGNHGLFGALEAVNGGPEAARLFPNSTMVGTGMAPEGISQNEVVYSLMAELGWRKDPVPDLAAWVTSFAARRYGVSHPDAGAAWRLLLRSVYNCSGEACRGHNRSPLVRRPSLQMNTSIWYNRSDVFEAWRLLLTSAPSLATSPAFRYDLLDLTRQAVQELVSLYYEEARSAYLSKELASLLRAGGVLAYELLPALDEVLASDSRFLLGSWLEQARAAAVSEAEADFYEQNSRYQLTLWGPEGNILDYANKQLAGLVANYYTPRWRLFLEALVDSVAQGIPFQQHQFDKNVFQLEQAFVLSKQRYPSQPRGDTVDLAKKIFLKYYPRWVAGSW

SEQ ID NO: 21728 - protein, 51 aa, Artificial Sequence
  Synthetic polypeptide
GSAGRKAQLRRLQQLCGLEPATLPFRASAGPPEKRKEDAYRAVLLCTWPWA

SEQ ID NO: 21729 - protein, 137 aa, Artificial Sequence
  Synthetic polypeptide
KTERRRLPCSVIVYLALGLTQAEINEFFTGPAFLAWGRMGNLHTWDGPLPPSWHIKQLYLQHRVLDQMRSFGMTPVLPAFAGHVPEAVTRVFPQVNVTKMGSWGHFNCSYSCSFLLAPEDPIFPIIGSLFLRELIKE

SEQ ID NO: 21730 - protein, 92 aa, Artificial Sequence
  Synthetic polypeptide
KTERRRLPCSVIVYLALGLTQAEINEFFTGPAFLAWGRMGNLHTWDGPLPPSWHIKQLYLQHRVLDQMRSFGMTPVLPAFAGHVPEAVTSGY

SEQ ID NO: 21731 - protein, 54 aa, Artificial Sequence
  Synthetic polypeptide
RGALAGRPSCAASSSCVALSQPLCLSEPRLAHLKNGKKTPTVQCYCVPGLGPDP

SEQ ID NO: 21732 - protein, 20 aa, Artificial Sequence
  Synthetic polypeptide
KTERRRLPCSVIVYLALGLT

SEQ ID NO: 21733 - protein, 301 aa, Artificial Sequence
  Synthetic polypeptide
YVLLKYLTFCPWFLKQLQNSSRVIKDEMSDVVVQPYNSLLTLKRLTQNADCVVVLDNTALNRIATDRLHIQNPSFSQINQLVSTIMSASTTTLRYPGYMNNDLIGLIASLIPTPRLHFLMTGYTPLTTDQSVASVRKTTVLDVMRRLLQPKNVMVSTGRDRQTNHCYIAILNIIQGEVDPTQVHKSLQRIRERKLANFIPWGPASIQVALSRKSPYLPSAHRVSGLMMANHTSISSLFESSCQQFDKLRKRDAFLEQFRKEDMFKDNFDEMDRSREVVQELIDEYHAATQPDYISWGTQEQ

SEQ ID NO: 21734 - protein, 107 aa, Artificial Sequence
  Synthetic polypeptide
GTRAIIVCFVKIFDLLSLVSETAPEQLQSDKGRDERRSGSALQFTPDTQEADAERRLCGGAGQHSPEPDCHRPPAHPEPVLLPDQPAGVHHHVGQHHHPALPRLHEQ

SEQ ID NO: 21735 - protein, 288 aa, Artificial Sequence
  Synthetic polypeptide
FSVLYLVCLPPRDYRPNEGKDGACSSLWSSQSQAQCMAHVVLDNTALNRIATDRLHIQNPSFSQINQLVSTIMSASTTTLRYPGYMNNDLIGLIASLIPTPRLHFLMTGYTPLTTDQSVASVRKTTVLDVMRRLLQPKNVMVSTGRDRQTNHCYIAILNIIQGEVDPTQVHKSLQRIRERKLANFIPWGPASIQVALSRKSPYLPSAHRVSGLMMANHTSISSLFESSCQQFDKLRKRDAFLEQFRKEDMFKDNFDEMDRSREVVQELIDEYHAATQPDYISWGTQEQ

SEQ ID NO: 21736 - protein, 40 aa, Artificial Sequence
  Synthetic polypeptide
CASLHETIGLMKGKTVPVPLCGLPRARHSVWHMWCWTTQP

SEQ ID NO: 21737 - protein, 70 aa, Artificial Sequence
  Synthetic polypeptide
RERRCLFLSVVFPEPGTVYGTCGAGQHSPEPDCHRPPAHPEPVLLPDQPAGVHHHVGQHHHPALPRLHEQ

SEQ ID NO: 21738 - protein, 37 aa, Artificial Sequence
  Synthetic polypeptide
AEIVPLHPSLATEQDSILNSITYHSPGETRRDPGGRD

SEQ ID NO: 21739 - protein, 77 aa, Artificial Sequence
  Synthetic polypeptide
SRGITRTREAEIAVSRDRATAPQPGDRARLHLKLHYLPQPRRNQERPRRKRLTQERSHLLKLLARMVSLADSSPQPG

SEQ ID NO: 21740 - protein, 82 aa, Artificial Sequence
  Synthetic polypeptide
SRGITRTREAEIAVSRDRATAPQPGDRARLHLKLHYLPQPRRNQERPRRKRLTQERSHLLKLLARMVSLADSSPQPDAVWRS

SEQ ID NO: 21741 - protein, 52 aa, Artificial Sequence
  Synthetic polypeptide
SRGITRTREAEIAVSRDRATAPQPGDRARLHLKLHYLPQPRRNQERPRRKRL

SEQ ID NO: 21742 - protein, 34 aa, Artificial Sequence
  Synthetic polypeptide
AEIVPLHPSLATEQDSILNSITYHSPGETRRDPG

SEQ ID NO: 21743 - protein, 49 aa, Artificial Sequence
  Synthetic polypeptide
SRGITRTREAEIAVSRDRATAPQPGDRARLHLKLHYLPQPRRNQERPRR

SEQ ID NO: 21744 - protein, 53 aa, Artificial Sequence
  Synthetic polypeptide
REGERESKQAAGCRRAGGRHRGRERASSELILSGSGSQVRQKTWWQIFSQRSY

SEQ ID NO: 21745 - protein, 29 aa, Artificial Sequence
  Synthetic polypeptide
GRASERASRQQAAGGRADGTEGGSERAVS

SEQ ID NO: 21746 - protein, 61 aa, Artificial Sequence
  Synthetic polypeptide
REGERESKQAAGCRRAGGRHRGRERASSELILSGSGSQVSPLIRSEGWMSVKKPSKEPRCL

SEQ ID NO: 21747 - protein, 39 aa, Artificial Sequence
  Synthetic polypeptide
GQAWWLTPVIPALWEAEAGGLPQLRSSRPPWATWRPSCS

SEQ ID NO: 21748 - protein, 30 aa, Artificial Sequence
  Synthetic polypeptide
FQHFGRLRRVDCLSSGVRDHPGQHGDPPVL

SEQ ID NO: 21749 - protein, 23 aa, Artificial Sequence
  Synthetic polypeptide
GGWIASAQEFETTLGNMETLLFL

SEQ ID NO: 21750 - protein, 34 aa, Artificial Sequence
  Synthetic polypeptide
FQHFGRLRRVDCLSSGVRDHPGQHGDPPVLNCGR

SEQ ID NO: 21751 - protein, 93 aa, Artificial Sequence
  Synthetic polypeptide
GGWIASAQEFETTLGNMETLLFLTVGDEKGGGLFLLAGPPASVETLGPRVAEVLEGKGAGKKGRFQGKATKMSRRMEAQALLQDYISTQSAKE

SEQ ID NO: 21752 - protein, 23 aa, Artificial Sequence
  Synthetic polypeptide
GWSRWLTHVIPALWEAKETLLFL

SEQ ID NO: 21753 - protein, 13 aa, Artificial Sequence
  Synthetic polypeptide
SQHFGRPRRPSCS

SEQ ID NO: 21754 - protein, 22 aa, Artificial Sequence
  Synthetic polypeptide
MVAVAHACNPSTLGGQGDPPVL

SEQ ID NO: 21755 - protein, 93 aa, Artificial Sequence
  Synthetic polypeptide
GWSRWLTHVIPALWEAKETLLFLTVGDEKGGGLFLLAGPPASVETLGPRVAEVLEGKGAGKKGRFQGKATKMSRRMEAQALLQDYISTQSAKE

SEQ ID NO: 21756 - protein, 26 aa, Artificial Sequence
  Synthetic polypeptide
MVAVAHACNPSTLGGQGDPPVLNCGR

SEQ ID NO: 21757 - protein, 73 aa, Artificial Sequence
  Synthetic polypeptide
DHTTAVQPGRKIQTPSQKKKSTLWISPWTKLSSIRMSSEILLLNARPDGRPRSSLKRDTRQARTSGSSRNCGF

SEQ ID NO: 21758 - protein, 35 aa, Artificial Sequence
  Synthetic polypeptide
AEITPLQSSLDERFRLRLKKKKVLCGYPLGQNCRQ

SEQ ID NO: 21759 - protein, 96 aa, Artificial Sequence
  Synthetic polypeptide
SQLLGRLRQENGVNPGGGTCNELRSHHCSPAWTKDSDSVSKKKKYSVDIPLDKTVVNKDVFRDPALKRKARREAKVKFEERYKTGKNKWFFQKLRF

SEQ ID NO: 21760 - protein, 34 aa, Artificial Sequence
  Synthetic polypeptide
DHTTAVQPGRKIQTPSQKKKSTLWISPWTKLSSI

SEQ ID NO: 21761 - protein, 57 aa, Artificial Sequence
  Synthetic polypeptide
SQLLGRLRQENGVNPGGGTCNELRSHHCSPAWTKDSDSVSKKKKYSVDIPLDKTVVN

SEQ ID NO: 21762 - protein, 29 aa, Artificial Sequence
  Synthetic polypeptide
TPCWEDCLSPGVQGCSESGVDQGTCLHKV

SEQ ID NO: 21763 - protein, 1845 aa, Artificial Sequence
  Synthetic polypeptide
AQEFKAAVSLELIKEPVSTKCDHIFCKFCMLKLLNQKKGPSQCPLCKNDITKRSLQESTRFSQLVEELLKIICAFQLDTGLEYANSYNFAKKENNSPEHLKDEVSIIQSMGYRNRAKRLLQSEPENPSLQETSLSVQLSNLGTVRTLRTKQRIQPQKTSVYIELGSDSSEDTVNKATYCSVGDQELLQITPQGTRDEISLDSAKKAACEFSETDVTNTEHHQPSNNDLNTTEKRAAERHPEKYQGSSVSNLHVEPCGTNTHASSLQHENSSLLLTKDRMNVEKAEFCNKSKQPGLARSQHNRWAGSKETCNDRRTPSTEKKVDLNADPLCERKEWNKQKLPCSENPRDTEDVPWITLNSSIQKVNEWFSRSDELLGSDDSHDGESESNAKVADVLDVLNEVDEYSGSSEKIDLLASDPHEALICKSERVHSKSVESNIEDKIFGKTYRKKASLPNLSHVTENLIIGAFVTEPQIIQERPLTNKLKRKRRPTSGLHPEDFIKKADLAVQKTPEMINQGTNQTEQNGQVMNITNSGHENKTKGDSIQNEKNPNPIESLEKESAFKTKAEPISSSISNMELELNIHNSKAPKKNRLRRKSSTRHIHALELVVSRNLSPPNCTELQIDSCSSSEEIKKKKYNQMPVRHSRNLQLMEGKEPATGAKKSNKPNEQTSKRHDSDTFPELKLTNAPGSFTKCSNTSELKEFVNPSLPREEKEEKLETVKVSNNAEDPKDLMLSGERVLQTERSVESSSISLVPGTDYGTQESISLLEVSTLGKAKTEPNKCVSQCAAFENPKGLIHGCSKDNRNDTEGFKYPLGHEVNHSRETSIEMEESELDAQYLQNTFKVSKRQSFAPFSNPGNAEEECATFSAHSGSLKKQSPKVTFECEQKEENQGKNESNIKPVQTVNITAGFPVVGQKDKPVDNAKCSIKGGSRFCLSSQFRGNETGLITPNKHGLLQNPYRIPPLFPIKSFVKTKCKKNLLEENFEEHSMSPEREMGNENIPSTVSTISRNNIRENVFKEASSSNINEVGSSTNEVGSSINEIGSSDENIQAELGRNRGPKLNAMLRLGVLQPEVYKQSLPGSNCKHPEIKKQEYEEVVQTVNTDFSPYLISDNLEQPMGSSHASQVCSETPDDLLDDGEIKEDTSFAENDIKESSAVFSKSVQKGELSRSPSPFTHTHLAQGYRRGAKKLESSEENLSSEDEELPCFQHLLFGKVNNIPSQSTRHSTVATECLSKNTEENLLSLKNSLNDCSNQVILAKASQEHHLSEETKCSASLFSSQCSELEDLTANTNTQDPFLIGSSKQMRHQSESQGVGLSDKELVSDDEERGTGLEENNQEEQSMDSNLGEAASGCESETSVSEDCSGLSSQSDILTTQQRDTMQHNLIKLQQEMAELEAVLEQHGSQPSNSYPSIISDSSALEDLRNPEQSTSEKAVLTSQKSSEYPISQNPEGLSADKFEVSADSSTSKNKEPGVERSSPSKCPSLDDRWYMHSCSGSLQNRNYPSQEELIKVVDVEEQQLEESGPHDLTETSYLPRQDLEGTPYLESGISLFSDDPESDPSEDRAPESARVGNIPSSTSALKVPQLKVAESAQSPAAAHTTDTAGYNAMEESVSREKPELTASTERVNKRMSMVVSGLTPEEFMLVYKFARKHHITLTNLITEETTHVVMKTDAEFVCERTLKYFLGIAGGKWVVSYFWVTQSIKERKMLNEHDFEVRGDVVNGRNHQGPKRARESQDRKIFRGLEICCYGPFTNMPTDQLEWMVQLCGASVVKELSSFTLGTGVHPIVVVQPDAWTEDNGFHAIGQMCEAPVVTREWVLDSVALYQCQELDTYLIPQIPHSHY

SEQ ID NO: 21764 - protein, 662 aa, Artificial Sequence
  Synthetic polypeptide
AQEFKAAVSLELIKEPVSTKCDHIFCKFCMLKLLNQKKGPSQCPLCKNDITKRSLQESTRFSQLVEELLKIICAFQLDTGLEYANSYNFAKKENNSPEHLKDEVSIIQSMGYRNRAKRLLQSEPENPSLQETSLSVQLSNLGTVRTLRTKQRIQPQKTSVYIELGEAASGCESETSVSEDCSGLSSQSDILTTQQRDTMQHNLIKLQQEMAELEAVLEQHGSQPSNSYPSIISDSSALEDLRNPEQSTSEKAVLTSQKSSEYPISQNPEGLSADKFEVSADSSTSKNKEPGVERSSPSKCPSLDDRWYMHSCSGSLQNRNYPSQEELIKVVDVEEQQLEESGPHDLTETSYLPRQDLEGTPYLESGISLFSDDPESDPSEDRAPESARVGNIPSSTSALKVPQLKVAESAQSPAAAHTTDTAGYNAMEESVSREKPELTASTERVNKRMSMVVSGLTPEEFMLVYKFARKHHITLTNLITEETTHVVMKTDAEFVCERTLKYFLGIAGGKWVVSYFWVTQSIKERKMLNEHDFEVRGDVVNGRNHQGPKRARESQDRKIFRGLEICCYGPFTNMPTDQLEWMVQLCGASVVKELSSFTLGTGVHPIVVVQPDAWTEDNGFHAIGQMCEAPVVTREWVLDSVALYQCQELDTYLIPQIPHSHY

SEQ ID NO: 21765 - protein, 1606 aa, Artificial Sequence
  Synthetic polypeptide
AQEFKAAVSLELIKEPVSTKCDHIFCKFCMLKLLNQKKGPSQCPLCKNDITKRSLQESTRFSQLVEELLKIICAFQLDTGLEYANSYNFAKKENNSPEHLKDEVSIIQSMGYRNRAKRLLQSEPENPSLQETSLSVQLSNLGTVRTLRTKQRIQPQKTSVYIELGSDSSEDTVNKATYCSVGDQELLQITPQGTRDEISLDSAKKAACEFSETDVTNTEHHQPSNNDLNTTEKRAAERHPEKYQGSSVSNLHVEPCGTNTHASSLQHENSSLLLTKDRMNVEKAEFCNKSKQPGLARSQHNRWAGSKETCNDRRTPSTEKKVDLNADPLCERKEWNKQKLPCSENPRDTEDVPWITLNSSIQKVNEWFSRSDELLGSDDSHDGESESNAKVADVLDVLNEVDEYSGSSEKIDLLASDPHEALICKSERVHSKSVESNIEDKIFGKTYRKKASLPNLSHVTENLIIGAFVTEPQIIQERPLTNKLKRKRRPTSGLHPEDFIKKADLAVQKTPEMINQGTNQTEQNGQVMNITNSGHENKTKGDSIQNEKNPNPIESLEKESAFKTKAEPISSSISNMELELNIHNSKAPKKNRLRRKSSTRHIHALELVVSRNLSPPNCTELQIDSCSSSEEIKKKKYNQMPVRHSRNLQLMEGKEPATGAKKSNKPNEQTSKRHDSDTFPELKLTNAPGSFTKCSNTSELKEFVNPSLPREEKEEKLETVKVSNNAEDPKDLMLSGERVLQTERSVESSSISLVPGTDYGTQESISLLEVSTLGKAKTEPNKCVSQCAAFENPKGLIHGCSKDNRNDTEGFKYPLGHEVNHSRETSIEMEESELDAQYLQNTFKVSKRQSFAPFSNPGNAEEECATFSAHSGSLKKQSPKVTFECEQKEENQGKNESNIKPVQTVNITAGFPVVGQKDKPVDNAKCSIKGGSRFCLSSQFRGNETGLITPNKHGLLQNPYRIPPLFPIKSFVKTKCKKNLLEENFEEHSMSPEREMGNENIPSTVSTISRNNIRENVFKEASSSNINEVGSSTNEVGSSINEIGSSDENIQAELGRNRGPKLNAMLRLGVLQPEVYKQSLPGSNCKHPEIKKQEYEEVVQTVNTDFSPYLISDNLEQPMGSSHASQVCSETPDDLLDDGEIKEDTSFAENDIKESSAVFSKSVQKGELSRSPSPFTHTHLAQGYRRGAKKLESSEENLSSEDEELPCFQHLLFGKVNNIPSQSTRHSTVATECLSKNTEENLLSLKNSLNDCSNQVILAKASQEHHLSEETKCSASLFSSQCSELEDLTANTNTQDPFLIGSSKQMRHQSESQGVGLSDKELVSDDEERGTGLEENNQEEQSMDSNLGEAASGCESETSVSEDCSGLSSQSDILTTQQRDTMQHNLIKLQQEMAELEAVLEQHGSQPSNSYPSIISDSSALEDLRNPEQSTSEKDAEFVCERTLKYFLGIAGGKWVVSYFWVTQSIKERKMLNEHDFEVRGDVVNGRNHQGPKRARESQDRKIFRGLEICCYGPFTNMPTDQLEWMVQLCGASVVKELSSFTLGTGVHPIVVVQPDAWTEDNGFHAIGQMCEAPVVTREWVLDSVALYQCQELDTYLIPQIPHSHY

SEQ ID NO: 21766 - protein, 703 aa, Artificial Sequence
  Synthetic polypeptide
AQEFKAAVSLELIKEPVSTKCDHIFCKFCMLKLLNQKKGPSQCPLCKNDITKRSLQESTRFSQLVEELLKIICAFQLDTGLEYANSYNFAKKENNSPEHLKDEVSIIQSMGYRNRAKRLLQSEPENPSLQETSLSVQLSNLGTVRTLRTKQRIQPQKTSVYIELGSDSSEDTVNKATYCSVGDQELLQITPQGTRDEISLDSAKKGEAASGCESETSVSEDCSGLSSQSDILTTQQRDTMQHNLIKLQQEMAELEAVLEQHGSQPSNSYPSIISDSSALEDLRNPEQSTSEKAVLTSQKSSEYPISQNPEGLSADKFEVSADSSTSKNKEPGVERSSPSKCPSLDDRWYMHSCSGSLQNRNYPSQEELIKVVDVEEQQLEESGPHDLTETSYLPRQDLEGTPYLESGISLFSDDPESDPSEDRAPESARVGNIPSSTSALKVPQLKVAESAQSPAAAHTTDTAGYNAMEESVSREKPELTASTERVNKRMSMVVSGLTPEEFMLVYKFARKHHITLTNLITEETTHVVMKTDAEFVCERTLKYFLGIAGGKWVVSYFWVTQSIKERKMLNEHDFEVRGDVVNGRNHQGPKRARESQDRKIFRGLEICCYGPFTNMPTDQLEWMVQLCGASVVKELSSFTLGTGVHPIVVVQPDAWTEDNGFHAIGQMCEAPVVTREWVLDSVALYQCQELDTYLIPQIPHSHY

SEQ ID NO: 21767 - protein, 1580 aa, Artificial Sequence
  Synthetic polypeptide
AQEFKAAVSLELIKEPVSTKCDHIFCKFCMLKLLNQKKGPSQCPLCKNDITKRSLQESTRFSQLVEELLKIICAFQLDTGLEYANSYNFAKKENNSPEHLKDEVSIIQSMGYRNRAKRLLQSEPENPSLQETSLSVQLSNLGTVRTLRTKQRIQPQKTSVYIELGSDSSEDTVNKATYCSVGDQELLQITPQGTRDEISLDSAKKAACEFSETDVTNTEHHQPSNNDLNTTEKRAAERHPEKYQGSSVSNLHVEPCGTNTHASSLQHENSSLLLTKDRMNVEKAEFCNKSKQPGLARSQHNRWAGSKETCNDRRTPSTEKKVDLNADPLCERKEWNKQKLPCSENPRDTEDVPWITLNSSIQKVNEWFSRSDELLGSDDSHDGESESNAKVADVLDVLNEVDEYSGSSEKIDLLASDPHEALICKSERVHSKSVESNIEDKIFGKTYRKKASLPNLSHVTENLIIGAFVTEPQIIQERPLTNKLKRKRRPTSGLHPEDFIKKADLAVQKTPEMINQGTNQTEQNGQVMNITNSGHENKTKGDSIQNEKNPNPIESLEKESAFKTKAEPISSSISNMELELNIHNSKAPKKNRLRRKSSTRHIHALELVVSRNLSPPNCTELQIDSCSSSEEIKKKKYNQMPVRHSRNLQLMEGKEPATGAKKSNKPNEQTSKRHDSDTFPELKLTNAPGSFTKCSNTSELKEFVNPSLPREEKEEKLETVKVSNNAEDPKDLMLSGERVLQTERSVESSSISLVPGTDYGTQESISLLEVSTLGKAKTEPNKCVSQCAAFENPKGLIHGCSKDNRNDTEGFKYPLGHEVNHSRETSIEMEESELDAQYLQNTFKVSKRQSFAPFSNPGNAEEECATFSAHSGSLKKQSPKVTFECEQKEENQGKNESNIKPVQTVNITAGFPVVGQKDKPVDNAKCSIKGGSRFCLSSQFRGNETGLITPNKHGLLQNPYRIPPLFPIKSFVKTKCKKNLLEENFEEHSMSPEREMGNENIPSTVSTISRNNIRENVFKEASSSNINEVGSSTNEVGSSINEIGSSDENIQAELGRNRGPKLNAMLRLGVLQPEVYKQSLPGSNCKHPEIKKQEYEEVVQTVNTDFSPYLISDNLEQPMGSSHASQVCSETPDDLLDDGEIKEDTSFAENDIKESSAVFSKSVQKGELSRSPSPFTHTHLAQGYRRGAKKLESSEENLSSEDEELPCFQHLLFGKVNNIPSQSTRHSTVATECLSKNTEENLLSLKNSLNDCSNQVILAKASQEHHLSEETKCSASLFSSQCSELEDLTANTNTQDPFLIGSSKQMRHQSESQGVGLSDKELVSDDEERGTGLEENNQEEQSMDSNLGEAASGCESETSVSEDCSGLSSQSDILTTQQRDTMQHNLIKLQQEMAELEAVLEQHGSQPSNSYPSIISDSSALEDLRNPEQSTSEKGVTQSIKERKMLNEHDFEVRGDVVNGRNHQGPKRARESQDRKIFRGLEICCYGPFTNMPTDQLEWMVQLCGASVVKELSSFTLGTGVHPIVVVQPDAWTEDNGFHAIGQMCEAPVVTREWVLDSVALYQCQELDTYLIPQIPHSHY

SEQ ID NO: 21768 - protein, 681 aa, Artificial Sequence
  Synthetic polypeptide
AQEFKAAVSLELIKEPVSTKCDHIFCKFCMLKLLNQKKGPSQCPLCKNDITKRSLQESTRFSQLVEELLKIICAFQLDTGLEYANSYNFAKKENNSPEHLKDEVSIIQSMGYRNRAKRLLQSEPENPSLQETSLSVQLSNLGTVRTLRTKQRIQPQKTSVYIELGSDSSEDTVNKATYCSVGDQELLQITPQGTRDEISLDSAKKAACEFSETDVTNTEHHQPSNNDLNTTEKRAAERHPEKYQGEAASGCESETSVSEDCSGLSSQSDILTTQQRDTMQHNLIKLQQEMAELEAVLEQHGSQPSNSYPSIISDSSALEDLRNPEQSTSEKVLTSQKSSEYPISQNPEGLSADKFEVSADSSTSKNKEPGVERSSPSKCPSLDDRWYMHSCSGSLQNRNYPSQEELIKVVDVEEQQLEESGPHDLTETSYLPRQDLEGTPYLESGISLFSDDPESDPSEDRAPESARVGNIPSSTSALKVPQLKVAESAQSPAAAHTTDTAGYNAMEESVSREKPELTASTERVNKRMSMVVSGLTPEEFMLVYKFARKHHITLTNLITEETTHVVMKTDAEFVCERTLKYFLGIAGGKWVVSYFWVTQSIKERKMLNEHDFEVRGDVVNGRNHQGPKRARESQDRKIFRGLEICCYGPFTNMPTGCPPNCGCAARCLDRGQWLPCNWADV

SEQ ID NO: 21769 - protein, 1866 aa, Artificial Sequence
  Synthetic polypeptide
AQEFKAAVSLELIKEPVSTKCDHIFCKFCMLKLLNQKKGPSQCPLCKNDITKRSLQESTRFSQLVEELLKIICAFQLDTGLEYANSYNFAKKENNSPEHLKDEVSIIQSMGYRNRAKRLLQSEPENPSLQETSLSVQLSNLGTVRTLRTKQRIQPQKTSVYIELGSDSSEDTVNKATYCSVGDQELLQITPQGTRDEISLDSAKKAACEFSETDVTNTEHHQPSNNDLNTTEKRAAERHPEKYQGSSVSNLHVEPCGTNTHASSLQHENSSLLLTKDRMNVEKAEFCNKSKQPGLARSQHNRWAGSKETCNDRRTPSTEKKVDLNADPLCERKEWNKQKLPCSENPRDTEDVPWITLNSSIQKVNEWFSRSDELLGSDDSHDGESESNAKVADVLDVLNEVDEYSGSSEKIDLLASDPHEALICKSERVHSKSVESNIEDKIFGKTYRKKASLPNLSHVTENLIIGAFVTEPQIIQERPLTNKLKRKRRPTSGLHPEDFIKKADLAVQKTPEMINQGTNQTEQNGQVMNITNSGHENKTKGDSIQNEKNPNPIESLEKESAFKTKAEPISSSISNMELELNIHNSKAPKKNRLRRKSSTRHIHALELVVSRNLSPPNCTELQIDSCSSSEEIKKKKYNQMPVRHSRNLQLMEGKEPATGAKKSNKPNEQTSKRHDSDTFPELKLTNAPGSFTKCSNTSELKEFVNPSLPREEKEEKLETVKVSNNAEDPKDLMLSGERVLQTERSVESSSISLVPGTDYGTQESISLLEVSTLGKAKTEPNKCVSQCAAFENPKGLIHGCSKDNRNDTEGFKYPLGHEVNHSRETSIEMEESELDAQYLQNTFKVSKRQSFAPFSNPGNAEEECATFSAHSGSLKKQSPKVTFECEQKEENQGKNESNIKPVQTVNITAGFPVVGQKDKPVDNAKCSIKGGSRFCLSSQFRGNETGLITPNKHGLLQNPYRIPPLFPIKSFVKTKCKKNLLEENFEEHSMSPEREMGNENIPSTVSTISRNNIRENVFKEASSSNINEVGSSTNEVGSSINEIGSSDENIQAELGRNRGPKLNAMLRLGVLQPEVYKQSLPGSNCKHPEIKKQEYEEVVQTVNTDFSPYLISDNLEQPMGSSHASQVCSETPDDLLDDGEIKEDTSFAENDIKESSAVFSKSVQKGELSRSPSPFTHTHLAQGYRRGAKKLESSEENLSSEDEELPCFQHLLFGKVNNIPSQSTRHSTVATECLSKNTEENLLSLKNSLNDCSNQVILAKASQEHHLSEETKCSASLFSSQCSELEDLTANTNTQDPFLIGSSKQMRHQSESQGVGLSDKELVSDDEERGTGLEENNQEEQSMDSNLGEAASGCESETSVSEDCSGLSSQSDILTTQQRDTMQHNLIKLQQEMAELEAVLEQHGSQPSNSYPSIISDSSALEDLRNPEQSTSEKDSHIHGQRNNSMFSKRPREHISVLTSQKSSEYPISQNPEGLSADKFEVSADSSTSKNKEPGVERSSPSKCPSLDDRWYMHSCSGSLQNRNYPSQEELIKVVDVEEQQLEESGPHDLTETSYLPRQDLEGTPYLESGISLFSDDPESDPSEDRAPESARVGNIPSSTSALKVPQLKVAESAQSPAAAHTTDTAGYNAMEESVSREKPELTASTERVNKRMSMVVSGLTPEEFMLVYKFARKHHITLTNLITEETTHVVMKTDAEFVCERTLKYFLGIAGGKWVVSYFWVTQSIKERKMLNEHDFEVRGDVVNGRNHQGPKRARESQDRKIFRGLEICCYGPFTNMPTDQLEWMVQLCGASVVKELSSFTLGTGVHPIVVVQPDAWTEDNGFHAIGQMCEAPVVTREWVLDSVALYQCQELDTYLIPQIPHSHY

SEQ ID NO: 21770 - protein, 45 aa, Artificial Sequence
  Synthetic polypeptide
AQEFKAAVSLELIKEPVSTKCDHIFCKFCMLKLLNQKKGPSQCPL

SEQ ID NO: 21771 - protein, 741 aa, Artificial Sequence
  Synthetic polypeptide
AQEFKAAVSLELIKEPVSTKCDHIFCKFCMLKLLNQKKGPSQCPLCKNDITKRSLQESTRFSQLVEELLKIICAFQLDTGLEYANSYNFAKKENNSPEHLKDEVSIIQSMGYRNRAKRLLQSEPENPSLQETSLSVQLSNLGTVRTLRTKQRIQPQKTSVYIELGSDSSEDTVNKATYCSVGDQELLQITPQGTRDEISLDSAKKAACEFSETDVTNTEHHQPSNNDLNTTEKRAAERHPEKYQGEAASGCESETSVSEDCSGLSSQSDILTTQQRDTMQHNLIKLQQEMAELEAVLEQHGSQPSNSYPSIISDSSALEDLRNPEQSTSEKVLTSQKSSEYPISQNPEGLSADKFEVSADSSTSKNKEPGVERSSPSKCPSLDDRWYMHSCSGSLQNRNYPSQEELIKVVDVEEQQLEESGPHDLTETSYLPRQDLEGTPYLESGISLFSDDPESDPSEDRAPESARVGNIPSSTSALKVPQLKVAESAQSPAAAHTTDTAGYNAMEESVSREKPELTASTERVNKRMSMVVSGLTPEEFMLVYKFARKHHITLTNLITEETTHVVMKTDAEFVCERTLKYFLGIAGGKWVVSYFWVTQSIKERKMLNEHDFEVRGDVVNGRNHQGPKRARESQDRKIFRGLEICCYGPFTNMPTDQLEWMVQLCGASVVKELSSFTLGTGVHPIVVVQPDAWTEDNGFHAIGQMCEAPVVTREWVLDSVALYQCQELDTYLIPQIPHSHY

SEQ ID NO: 21772 - protein, 605 aa, Artificial Sequence
  Synthetic polypeptide
AQEFKAAVSLELIKEPVSTKCDHIFCKFCMLKLLNQKKGPSQCPLCKNDITKRSLQESTRFSQLVEELLKIICAFQLDTGLEYANSYNFAKKENNSPEHLKDEVSIIQSMGYRNRAKRLLQSEPENPSLETSLSVQLSNLGTVRTLRTKQRIQPQKTSVYIELGSDSSEDTVNKATYCSVGDQELLQITPQGTRDEISLDSAKKAACEFSETDVTNTEHHQPSNNDLNTTEKRAAERHPEKYQGEAASGCESETSVSEDCSGLSSQSDILTTQQRDTMQHNLIKLQQEMAELEAVLEQHGSQPSNSYPSIISDSSALEDLRNPEQSTSEKAVLTSQKSSEYPISQNPEGLSADKFEVSADSSTSKNKEPGVERSSPSKCPSLDDRWYMHSCSGSLQNRNYPSQEELIKVVDVEEQQLEESGPHDLTETSYLPRQDLEGTPYLESGISLFSDDPESDPSEDRAPESARVGNIPSSTSALKVPQLKVAESAQSPAAAHTTDTAGYNAMEESVSREKPELTASTERVNKRMSMVVSGLTPEEFMLVYKFARKHHITLTNLITEETTHVVMKTDAEFVCERTLKYFLGIAGGKWVVSYFWVTQSIKERK

SEQ ID NO: 21773 - protein, 631 aa, Artificial Sequence
  Synthetic polypeptide
AQEFKAAVSLELIKEPVSTKCDHIFCKFCMLKLLNQKKGPSQCPLCKNDITKRSLQESTRFSQLVEELLKIICAFQLDTGLEYANSYNFAKKENNSPEHLKDEVSIIQSMGYRNRAKRLLQSEPENPSLQETSLSVQLSNLGTVRTLRTKQRIQPQKTSVYIELGSDSSEDTVNKATYCSVGDQELLQITPQGTRDEISLDSAKKAACEFSETDVTNTEHHQPSNNDLNTTEKRAAERHPEKYQGSSVSNLHVEPCGTNTHASSLQHENSSLLLTKDRMNVEKAEFCNKSKQPGLARSQHNRWAGSKETCNDRRTPSTEKKVDLNADPLCERKEWNKQKLPCSENPRDTEDVPWITLNSSIQKVNEWFSRSDELLGSDDSHDGESESNAKVADVLDVLNEVDEYSGSSEKIDLLASDPHEALICKSERVHSKSVESNIEDKIFGKTYRKKASLPNLSHVTENLIIGAFVTEPQIIQERPLTNKLKRKRRPTSGLHPEDFIKKADLAVQKTPEMINQGTNQTEQNGQVMNITNSGHENKTKGDSIQNEKNPNPIESLEKESAFKTKAEPISSSISNMELELNIHNSKAPKKNRLRRKSSTRHIHALELVVSRNLSPPNCTELQIDSCSSSEE

SEQ ID NO: 21774 - protein, 604 aa, Artificial Sequence
  Synthetic polypeptide
AQEFKAAVSLELIKEPVSTKCDHIFCKSLQESTRFSQLVEELLKIICAFQLDTGLEYANSYNFAKKENNSPEHLKDEVSIIQSMGYRNRAKRLLQSEPENPSLQETSLSVQLSNLGTVRTLRTKQRIQPQKTSVYIELGSDSSEDTVNKATYCSVGDQELLQITPQGTRDEISLDSAKKAACEFSETDVTNTEHHQPSNNDLNTTEKRAAERHPEKYQGSSVSNLHVEPCGTNTHASSLQHENSSLLLTKDRMNVEKAEFCNKSKQPGLARSQHNRWAGSKETCNDRRTPSTEKKVDLNADPLCERKEWNKQKLPCSENPRDTEDVPWITLNSSIQKVNEWFSRSDELLGSDDSHDGESESNAKVADVLDVLNEVDEYSGSSEKIDLLASDPHEALICKSERVHSKSVESNIEDKIFGKTYRKKASLPNLSHVTENLIIGAFVTEPQIIQERPLTNKLKRKRRPTSGLHPEDFIKKADLAVQKTPEMINQGTNQTEQNGQVMNITNSGHENKTKGDSIQNEKNPNPIESLEKESAFKTKAEPISSSISNMELELNIHNSKAPKKNRLRRKSSTRHIHALELVVSRNLSPPNCTELQIDSCSSSE

SEQ ID NO: 21775 - protein, 41 aa, Artificial Sequence
  Synthetic polypeptide
AQEFKAAVSLELIKEPVSTKCDHIFCKVLLCCPSWSTVVRS

SEQ ID NO: 21776 - protein, 455 aa, Artificial Sequence
  Synthetic polypeptide
AQEFKAAVSLELIKEPVSTKCDHIFCKFCMLKLLNQKKGPSQCPLCKNDITKRSLQESTRFSQLVEELLKIICAFQLDTGLEYANSYNFAKKENNSPEHLKDEVSIIQSMGYRNRAKRLLQSEPENPSLQETSLSVQLSNLGTVRTLRTKQRIQPQKTSVYIELGSDSSEDTVNKATYCSVGDQELLQITPQGTRDEISLDSAKKAACEFSETDVTNTEHHQPSNNDLNTTEKRAAERHPEKYQGSSVSNLHVEPCGTNTHASSLQHENSSLLLTKDRMNVEKAEFCNKSKQPGLARSQHNRWAGSKETCNDRRTPSTEKKVDLNADPLCERKEWNKQKLPCSENPRDTEDVPWITLNSSIQKVNEWFSRSDELLGSDDSHDGESESNAKVADVLDVLNEVDEYSGSSEKIDLLASDPHEALICKSERVHSKSVESNIEDKIFGKTYRKKASLPN

SEQ ID NO: 21777 - protein, 204 aa, Artificial Sequence
  Synthetic polypeptide
AQEFKAAVSLELIKEPVSTKCDHIFCKFCMLKLLNQKKGPSQCPLCKNDITKRSLQESTRFSQLVEELLKIICAFQLDTGLEYANSYNFAKKENNSPEHLKDEVSIIQSMGYRNRAKRLLQSEPENPSLETSLSVQLSNLGTVRTLRTKQRIQPQKTSVYIELGSDSSEDTVNKATYCSVGDQELLQITPQGTRDEISLDSAKK

SEQ ID NO: 21778 - protein, 80 aa, Artificial Sequence
  Synthetic polypeptide
AQEFKAAVSLELIKEPVSTKCDHIFCKSLQESTRFSQLVEELLKIICAFQLDTGLEYANSYNFAKKENNSPEHLKDEVSI

SEQ ID NO: 21779 - protein, 24 aa, Artificial Sequence
  Synthetic polypeptide
GVMAGACGPRSNTRERRWPSWRST

SEQ ID NO: 21780 - protein, 99 aa, Artificial Sequence
  Synthetic polypeptide
WRVPVVLAVILGRGGGQVGEALDASAAGVCQAAEEAGGDREALRSLGCAGKQGEQQRVLHQPSAGHRGRPLRAGAVQRSEDKGWGQAHQCSQVCPGSPQ

SEQ ID NO: 21781 - protein, 1167 aa, Artificial Sequence
  Synthetic polypeptide
GEEVAKLEKHLMLLRQEYVKLQKKLAETEKRCALLAAQANKESSSESFISRLLAIVADLYEQEQYSDLKIKVGDRHISAHKFVLAARSDSWSLANLSSTKELDLSDANPEVTMTMLRWIYTDELEFREDDVFLTELMKLANRFQLQLLRERCEKGVMSLVNVRNCIRFYQTAEELNASTLMNYCAEIIASHWDDLRKEDFSSMSAQLLYKMIKSKTEYPLHKAIKVEREDVVFLYLIEMDSQLPGKLNEADHNGDLALDLALSRRLESIATTLVSHKADVDMVDKSGWSLLHKGIQRGDLFAATFLIKNGAFVNAATLGAQETPLHLVALYSSKKHSADVMSEMAQIAEALLQAGANPNMQDSKGRTPLHVSIMAGNEYVFSQLLQCKQLDLELKDHEGSTALWLAVQHITVSSDQSVNPFEDVPVVNGTSFDENSFAARLIQRGSHTDAPDTATGNCLLQRAAGAGNEAAALFLATNGAHVNHRNKWGETPLHTACRHGLANLTAELLQQGANPNLQTEEALPLPKEAASLTSLADSVHLQTPLHMAIAYNHPDVVSVILEQKANALHATNNLQIIPDFSLKDSRDQTVLGLALWTGMHTIAAQLLGSGAAINDTMSDGQTLLHMAIQRQDSKSALFLLEHQADINVRTQDGETALQLAIRNQLPLVVDAICTRGADMSVPDEKGNPPLWLALANNLEDIASTLVRHGCDATCWGPGPGGCLQTLLHRAIDENNEPTACFLIRSGCDVNSPRQPGANGEGEEEARDGQTPLHLAASWGLEETVQCLLEFGANVNAQDAEGRTPIHVAISSQHGVIIQLLVSHPDIHLNVRDRQGLTPFACAMTFKNNKSAEAILKRESGAAEQVDNKGRNFLHVAVQNSDIESVLFLISVHANVNSRVQDASKLTPLHLAVQAGSEIIVRNLLLAGAKVNELTKHRQTALHLAAQQDLPTICSVLLENGVDFAAVDENGNNALHLAVMHGRLNNIRVLLTECTVDAEAFNLRGQSPLHILGQYGKENAAAIFDLFLECMPGYPLDKPDADGSTVLLLAYMKGNANLCRAIVRSGARLGVNNNQGVNIFNYQVATKQLLFRLLDMLSKEPPWCDGSYCYECTARFGVTTRKHHCRHCGRLLCHKCSTKEIPIIKFDLNKPVRVCNICFDVLTLGGVS

SEQ ID NO: 21782 - protein, 1168 aa, Artificial Sequence
  Synthetic polypeptide
GEEVAKLEKHLMLLRQEYVKLQKKLAETEKRCALLAAQANKESSSESFISRLLAIVADLYEQEQYSDLKIKVGDRHISAHKFVLAARSDSWSLANLSSTKELDLSDANPEVTMTMLRWIYTDELEFREDDVFLTELMKLANRFQLQLLRERCEKGVMSLVNVRNCIRFYQTAEELNASTLMNYCAEIIASHWDDLRKEDFSSMSAQLLYKMIKSKTEYPLHKAIKVEREDVVFLYLIEMDSQLPGKLNEADHNGDLALDLALSRRLESIATTLVSHKADVDMVDKSGWSLLHKGIQRGDLFAATFLIKNGAFVNAATLGAQETPLHLVALYSSKKHSADVMSEMAQIAEALLQAGANPNMQDSKGRTPLHVSIMAGNEYVFSQLLQCKQLDLELKDHEGSTALWLAVQHITVSSDQSVNPFEDVPVVNGTSFDENSFAARLIQRGSHTDAPDTATGNCLLQRAAGAGNEAAALFLATNGAHVNHRNKWGETPLHTACRHGLANLTAELLQQGANPNLQTEEALPLPKEAASLTSLADSVHLQTPLHMAIAYNHPDVVSVILEQKANALHATNNLQIIPDFSLKDSRDQTVLGLALWTGMHTIAAQLLGSGAAINDTMSDGQTLLHMAIQRQDSKSALFLLEHQADINVSRTQDGETALQLAIRNQLPLVVDAICTRGADMSVPDEKGNPPLWLALANNLEDIASTLVRHGCDATCWGPGPGGCLQTLLHRAIDENNEPTACFLIRSGCDVNSPRQPGANGEGEEEARDGQTPLHLAASWGLEETVQCLLEFGANVNAQDAEGRTPIHVAISSQHGVIIQLLVSHPDIHLNVRDRQGLTPFACAMTFKNNKSAEAILKRESGAAEQVDNKGRNFLHVAVQNSDIESVLFLISVHANVNSRVQDASKLTPLHLAVQAGSEIIVRNLLLAGAKVNELTKHRQTALHLAAQQDLPTICSVLLENGVDFAAVDENGNNALHLAVMHGRLNNIRVLLTECTVDAEAFNLRGQSPLHILGQYGKENAAAIFDLFLECMPGYPLDKPDADGSTVLLLAYMKGNANLCRAIVRSGARLGVNNNQGVNIFNYQVATKQLLFRLLDMLSKEPPWCDGSYCYECTARFGVTTRKHHCRHCGRLLCHKCSTKEIPIIKFDLNKPVRVCNICFDVLTLGGVS

SEQ ID NO: 21783 - protein, 79 aa, Artificial Sequence
  Synthetic polypeptide
WRVPVVLAVILGRGGGQVGEALDASAAGVCQAAEEAGGDREALRSLGCAGKQGEQQRVLHQPSAGHRGRPLRAGAVQML

SEQ ID NO: 21784 - protein, 67 aa, Artificial Sequence
  Synthetic polypeptide
GEEVAKLEKHLMLLRQEYVKLQKKLAETEKRCALLAAQANKESSSESFISRLLAIVADLYEQEQYRC

SEQ ID NO: 21785 - protein, 485 aa, Artificial Sequence
  Synthetic polypeptide
GEEVAKLEKHLMLLRQEYVKLQKKLAETEKRCALLAAQANKESSSESFISRLLAIVADLYEQEQYSDLKIKVGDRHISAHKFVLAARSDSWSLANLSSTKELDLSDANPEVTMTMLRWIYTDELEFREDDVFLTELMKLANRFQLQLLRERCEKGVMSLVNVRNCIRFYQTAEELNASTLMNYCAEIIASHWDDLRKEDFSSMSAQLLYKMIKSKTEYPLHKAIKVEREDVVFLYLIEMDSQLPGKLNEADHNGDLALDLALSRRLESIATTLVSHKADVDMVDKSGWSLLHKGIQRGDLFAATFLIKNGAFVNAATLGAQETPLHLVALYSSKKHSADVMSEMAQIAEALLQAGANPNMQDSKGRTPLHVSIMAGNEYVFSQLLQCKQLDLELKDHEGSTALWLAVQHITVSSDQSVNPFEDVPVVNGTSFDENSFAARLIQRGSHTDAPDTATGKARASRRGDAGVCRRQEMACKCLHPKFRN

SEQ ID NO: 21786 - protein, 1170 aa, Artificial Sequence
  Synthetic polypeptide
GVMAEEVAKLEKHLMLLRQEYVKLQKKLAETEKRCALLAAQANKESSSESFISRLLAIVADLYEQEQYSDLKIKVGDRHISAHKFVLAARSDSWSLANLSSTKELDLSDANPEVTMTMLRWIYTDELEFREDDVFLTELMKLANRFQLQLLRERCEKGVMSLVNVRNCIRFYQTAEELNASTLMNYCAEIIASHWDDLRKEDFSSMSAQLLYKMIKSKTEYPLHKAIKVEREDVVFLYLIEMDSQLPGKLNEADHNGDLALDLALSRRLESIATTLVSHKADVDMVDKSGWSLLHKGIQRGDLFAATFLIKNGAFVNAATLGAQETPLHLVALYSSKKHSADVMSEMAQIAEALLQAGANPNMQDSKGRTPLHVSIMAGNEYVFSQLLQCKQLDLELKDHEGSTALWLAVQHITVSSDQSVNPFEDVPVVNGTSFDENSFAARLIQRGSHTDAPDTATGNCLLQRAAGAGNEAAALFLATNGAHVNHRNKWGETPLHTACRHGLANLTAELLQQGANPNLQTEEALPLPKEAASLTSLADSVHLQTPLHMAIAYNHPDVVSVILEQKANALHATNNLQIIPDFSLKDSRDQTVLGLALWTGMHTIAAQLLGSGAAINDTMSDGQTLLHMAIQRQDSKSALFLLEHQADINVRTQDGETALQLAIRNQLPLVVDAICTRGADMSVPDEKGNPPLWLALANNLEDIASTLVRHGCDATCWGPGPGGCLQTLLHRAIDENNEPTACFLIRSGCDVNSPRQPGANGEGEEEARDGQTPLHLAASWGLEETVQCLLEFGANVNAQDAEGRTPIHVAISSQHGVIIQLLVSHPDIHLNVRDRQGLTPFACAMTFKNNKSAEAILKRESGAAEQVDNKGRNFLHVAVQNSDIESVLFLISVHANVNSRVQDASKLTPLHLAVQAGSEIIVRNLLLAGAKVNELTKHRQTALHLAAQQDLPTICSVLLENGVDFAAVDENGNNALHLAVMHGRLNNIRVLLTECTVDAEAFNLRGQSPLHILGQYGKENAAAIFDLFLECMPGYPLDKPDADGSTVLLLAYMKGNANLCRAIVRSGARLGVNNNQGVNIFNYQVATKQLLFRLLDMLSKEPPWCDGSYCYECTARFGVTTRKHHCRHCGRLLCHKCSTKEIPIIKFDLNKPVRVCNICFDVLTLGGVS

SEQ ID NO: 21787 - protein, 11 aa, Artificial Sequence
  Synthetic polypeptide
WRRRWPSWRST

SEQ ID NO: 21788 - protein, 90 aa, Artificial Sequence
  Synthetic polypeptide
SDGGGGGQVGEALDASAAGVCQAAEEAGGDREALRSLGCAGKQGEQQRVLHQPSAGHRGRPLRAGAVQRSEDKGWGQAHQCSQVCPGSPQ

SEQ ID NO: 21789 - protein, 1171 aa, Artificial Sequence
  Synthetic polypeptide
GVMAEEVAKLEKHLMLLRQEYVKLQKKLAETEKRCALLAAQANKESSSESFISRLLAIVADLYEQEQYSDLKIKVGDRHISAHKFVLAARSDSWSLANLSSTKELDLSDANPEVTMTMLRWIYTDELEFREDDVFLTELMKLANRFQLQLLRERCEKGVMSLVNVRNCIRFYQTAEELNASTLMNYCAEIIASHWDDLRKEDFSSMSAQLLYKMIKSKTEYPLHKAIKVEREDVVFLYLIEMDSQLPGKLNEADHNGDLALDLALSRRLESIATTLVSHKADVDMVDKSGWSLLHKGIQRGDLFAATFLIKNGAFVNAATLGAQETPLHLVALYSSKKHSADVMSEMAQIAEALLQAGANPNMQDSKGRTPLHVSIMAGNEYVFSQLLQCKQLDLELKDHEGSTALWLAVQHITVSSDQSVNPFEDVPVVNGTSFDENSFAARLIQRGSHTDAPDTATGNCLLQRAAGAGNEAAALFLATNGAHVNHRNKWGETPLHTACRHGLANLTAELLQQGANPNLQTEEALPLPKEAASLTSLADSVHLQTPLHMAIAYNHPDVVSVILEQKANALHATNNLQIIPDFSLKDSRDQTVLGLALWTGMHTIAAQLLGSGAAINDTMSDGQTLLHMAIQRQDSKSALFLLEHQADINVSRTQDGETALQLAIRNQLPLVVDAICTRGADMSVPDEKGNPPLWLALANNLEDIASTLVRHGCDATCWGPGPGGCLQTLLHRAIDENNEPTACFLIRSGCDVNSPRQPGANGEGEEEARDGQTPLHLAASWGLEETVQCLLEFGANVNAQDAEGRTPIHVAISSQHGVIIQLLVSHPDIHLNVRDRQGLTPFACAMTFKNNKSAEAILKRESGAAEQVDNKGRNFLHVAVQNSDIESVLFLISVHANVNSRVQDASKLTPLHLAVQAGSEIIVRNLLLAGAKVNELTKHRQTALHLAAQQDLPTICSVLLENGVDFAAVDENGNNALHLAVMHGRLNNIRVLLTECTVDAEAFNLRGQSPLHILGQYGKENAAAIFDLFLECMPGYPLDKPDADGSTVLLLAYMKGNANLCRAIVRSGARLGVNNNQGVNIFNYQVATKQLLFRLLDMLSKEPPWCDGSYCYECTARFGVTTRKHHCRHCGRLLCHKCSTKEIPIIKFDLNKPVRVCNICFDVLTLGGVS

SEQ ID NO: 21790 - protein, 70 aa, Artificial Sequence
  Synthetic polypeptide
GVMAEEVAKLEKHLMLLRQEYVKLQKKLAETEKRCALLAAQANKESSSESFISRLLAIVADLYEQEQYRC

SEQ ID NO: 21791 - protein, 70 aa, Artificial Sequence
  Synthetic polypeptide
SDGGGGGQVGEALDASAAGVCQAAEEAGGDREALRSLGCAGKQGEQQRVLHQPSAGHRGRPLRAGAVQML

SEQ ID NO: 21792 - protein, 488 aa, Artificial Sequence
  Synthetic polypeptide
GVMAEEVAKLEKHLMLLRQEYVKLQKKLAETEKRCALLAAQANKESSSESFISRLLAIVADLYEQEQYSDLKIKVGDRHISAHKFVLAARSDSWSLANLSSTKELDLSDANPEVTMTMLRWIYTDELEFREDDVFLTELMKLANRFQLQLLRERCEKGVMSLVNVRNCIRFYQTAEELNASTLMNYCAEIIASHWDDLRKEDFSSMSAQLLYKMIKSKTEYPLHKAIKVEREDVVFLYLIEMDSQLPGKLNEADHNGDLALDLALSRRLESIATTLVSHKADVDMVDKSGWSLLHKGIQRGDLFAATFLIKNGAFVNAATLGAQETPLHLVALYSSKKHSADVMSEMAQIAEALLQAGANPNMQDSKGRTPLHVSIMAGNEYVFSQLLQCKQLDLELKDHEGSTALWLAVQHITVSSDQSVNPFEDVPVVNGTSFDENSFAARLIQRGSHTDAPDTATGKARASRRGDAGVCRRQEMACKCLHPKFRN

SEQ ID NO: 21793 - protein, 159 aa, Artificial Sequence
  Synthetic polypeptide
GPVWWLALVISALWEAEVGGSLEARSSRAAWATWRNLVSTKNTKVSQVWWHVSVIPGTREDEAQESLEPGKRRGGGQVGEALDASAAGVCQAAEEAGGDREALRSLGCAGKQGEQQRVLHQPSAGHRGRPLRAGAVQRSEDKGWGQAHQCSQVCPGSPQ

SEQ ID NO: 21794 - protein, 1184 aa, Artificial Sequence
  Synthetic polypeptide
FQVLGRMRHKNRLNPENGEEVAKLEKHLMLLRQEYVKLQKKLAETEKRCALLAAQANKESSSESFISRLLAIVADLYEQEQYSDLKIKVGDRHISAHKFVLAARSDSWSLANLSSTKELDLSDANPEVTMTMLRWIYTDELEFREDDVFLTELMKLANRFQLQLLRERCEKGVMSLVNVRNCIRFYQTAEELNASTLMNYCAEIIASHWDDLRKEDFSSMSAQLLYKMIKSKTEYPLHKAIKVEREDVVFLYLIEMDSQLPGKLNEADHNGDLALDLALSRRLESIATTLVSHKADVDMVDKSGWSLLHKGIQRGDLFAATFLIKNGAFVNAATLGAQETPLHLVALYSSKKHSADVMSEMAQIAEALLQAGANPNMQDSKGRTPLHVSIMAGNEYVFSQLLQCKQLDLELKDHEGSTALWLAVQHITVSSDQSVNPFEDVPVVNGTSFDENSFAARLIQRGSHTDAPDTATGNCLLQRAAGAGNEAAALFLATNGAHVNHRNKWGETPLHTACRHGLANLTAELLQQGANPNLQTEEALPLPKEAASLTSLADSVHLQTPLHMAIAYNHPDVVSVILEQKANALHATNNLQIIPDFSLKDSRDQTVLGLALWTGMHTIAAQLLGSGAAINDTMSDGQTLLHMAIQRQDSKSALFLLEHQADINVRTQDGETALQLAIRNQLPLVVDAICTRGADMSVPDEKGNPPLWLALANNLEDIASTLVRHGCDATCWGPGPGGCLQTLLHRAIDENNEPTACFLIRSGCDVNSPRQPGANGEGEEEARDGQTPLHLAASWGLEETVQCLLEFGANVNAQDAEGRTPIHVAISSQHGVIIQLLVSHPDIHLNVRDRQGLTPFACAMTFKNNKSAEAILKRESGAAEQVDNKGRNFLHVAVQNSDIESVLFLISVHANVNSRVQDASKLTPLHLAVQAGSEIIVRNLLLAGAKVNELTKHRQTALHLAAQQDLPTICSVLLENGVDFAAVDENGNNALHLAVMHGRLNNIRVLLTECTVDAEAFNLRGQSPLHILGQYGKENAAAIFDLFLECMPGYPLDKPDADGSTVLLLAYMKGNANLCRAIVRSGARLGVNNNQGVNIFNYQVATKQLLFRLLDMLSKEPPWCDGSYCYECTARFGVTTRKHHCRHCGRLLCHKCSTKEIPIIKFDLNKPVRVCNICFDVLTLGGVS

SEQ ID NO: 21795 - protein, 14 aa, Artificial Sequence
  Synthetic polypeptide
TRKTERRWPSWRST

SEQ ID NO: 21796 - protein, 1185 aa, Artificial Sequence
  Synthetic polypeptide
FQVLGRMRHKNRLNPENGEEVAKLEKHLMLLRQEYVKLQKKLAETEKRCALLAAQANKESSSESFISRLLAIVADLYEQEQYSDLKIKVGDRHISAHKFVLAARSDSWSLANLSSTKELDLSDANPEVTMTMLRWIYTDELEFREDDVFLTELMKLANRFQLQLLRERCEKGVMSLVNVRNCIRFYQTAEELNASTLMNYCAEIIASHWDDLRKEDFSSMSAQLLYKMIKSKTEYPLHKAIKVEREDVVFLYLIEMDSQLPGKLNEADHNGDLALDLALSRRLESIATTLVSHKADVDMVDKSGWSLLHKGIQRGDLFAATFLIKNGAFVNAATLGAQETPLHLVALYSSKKHSADVMSEMAQIAEALLQAGANPNMQDSKGRTPLHVSIMAGNEYVFSQLLQCKQLDLELKDHEGSTALWLAVQHITVSSDQSVNPFEDVPVVNGTSFDENSFAARLIQRGSHTDAPDTATGNCLLQRAAGAGNEAAALFLATNGAHVNHRNKWGETPLHTACRHGLANLTAELLQQGANPNLQTEEALPLPKEAASLTSLADSVHLQTPLHMAIAYNHPDVVSVILEQKANALHATNNLQIIPDFSLKDSRDQTVLGLALWTGMHTIAAQLLGSGAAINDTMSDGQTLLHMAIQRQDSKSALFLLEHQADINVSRTQDGETALQLAIRNQLPLVVDAICTRGADMSVPDEKGNPPLWLALANNLEDIASTLVRHGCDATCWGPGPGGCLQTLLHRAIDENNEPTACFLIRSGCDVNSPRQPGANGEGEEEARDGQTPLHLAASWGLEETVQCLLEFGANVNAQDAEGRTPIHVAISSQHGVIIQLLVSHPDIHLNVRDRQGLTPFACAMTFKNNKSAEAILKRESGAAEQVDNKGRNFLHVAVQNSDIESVLFLISVHANVNSRVQDASKLTPLHLAVQAGSEIIVRNLLLAGAKVNELTKHRQTALHLAAQQDLPTICSVLLENGVDFAAVDENGNNALHLAVMHGRLNNIRVLLTECTVDAEAFNLRGQSPLHILGQYGKENAAAIFDLFLECMPGYPLDKPDADGSTVLLLAYMKGNANLCRAIVRSGARLGVNNNQGVNIFNYQVATKQLLFRLLDMLSKEPPWCDGSYCYECTARFGVTTRKHHCRHCGRLLCHKCSTKEIPIIKFDLNKPVRVCNICFDVLTLGGVS

SEQ ID NO: 21797 - protein, 139 aa, Artificial Sequence
  Synthetic polypeptide
GPVWWLALVISALWEAEVGGSLEARSSRAAWATWRNLVSTKNTKVSQVWWHVSVIPGTREDEAQESLEPGKRRGGGQVGEALDASAAGVCQAAEEAGGDREALRSLGCAGKQGEQQRVLHQPSAGHRGRPLRAGAVQML

SEQ ID NO: 21798 - protein, 84 aa, Artificial Sequence
  Synthetic polypeptide
FQVLGRMRHKNRLNPENGEEVAKLEKHLMLLRQEYVKLQKKLAETEKRCALLAAQANKESSSESFISRLLAIVADLYEQEQYRC

SEQ ID NO: 21799 - protein, 502 aa, Artificial Sequence
  Synthetic polypeptide
FQVLGRMRHKNRLNPENGEEVAKLEKHLMLLRQEYVKLQKKLAETEKRCALLAAQANKESSSESFISRLLAIVADLYEQEQYSDLKIKVGDRHISAHKFVLAARSDSWSLANLSSTKELDLSDANPEVTMTMLRWIYTDELEFREDDVFLTELMKLANRFQLQLLRERCEKGVMSLVNVRNCIRFYQTAEELNASTLMNYCAEIIASHWDDLRKEDFSSMSAQLLYKMIKSKTEYPLHKAIKVEREDVVFLYLIEMDSQLPGKLNEADHNGDLALDLALSRRLESIATTLVSHKADVDMVDKSGWSLLHKGIQRGDLFAATFLIKNGAFVNAATLGAQETPLHLVALYSSKKHSADVMSEMAQIAEALLQAGANPNMQDSKGRTPLHVSIMAGNEYVFSQLLQCKQLDLELKDHEGSTALWLAVQHITVSSDQSVNPFEDVPVVNGTSFDENSFAARLIQRGSHTDAPDTATGKARASRRGDAGVCRRQEMACKCLHPKFRN

SEQ ID NO: 21800 - protein, 126 aa, Artificial Sequence
  Synthetic polypeptide
FTPVIPALWKAEAGPVPGIHHPKNHPSHPGGRSLKGEQGVHARPLPLQPSGGPGHPLPGGGPALPAQAGPGGGEPGRPHVVAGQASRGHQPSSRPHPLQGVPGETTKLPESRGHPAEPPEPQEAPL

SEQ ID NO: 21801 - protein, 391 aa, Artificial Sequence
  Synthetic polypeptide
SQHFGRPRQAQSQGSITLKIIPATQEEDRLKESKVFMRALFHYNPREDRAIPCQEAGLPFQRRQVLEVVSQDDPTWWQAKRVGDTNLRAGLIPSKGFQERRLSYRRAAGTLPSPQSLRKPPYDQPCDKETCDCEGYLKGHYVAGLRRSFRLGCRERLGGSQEGKMSSGAESPELLTYEEVARYQHQPGERPRLVVLIGSLGARLHELKQKVVAENPQHFGVAVPHTTRPRKSHEKEGVEYHFVSKQAFEADLHHNKFLEHGEYKENLYGTSLEAIQAVMAKNKVCLVDVEPEALKQLRTSEFKPYIIFVKPAIQEKRKTPPMSPACEDTAAPFDEQQQEMAASAAFIDRHYGHLVDAVLVKEDLQGAYSQLKVVLEKLSKDTHWVPVSWVR

SEQ ID NO: 21802 - protein, 26 aa, Artificial Sequence
  Synthetic polypeptide
MGSVVHTCNPSTLEGRGRPSPRDPSP

SEQ ID NO: 21803 - protein, 121 aa, Artificial Sequence
  Synthetic polypeptide
SQHFGRPRQAQSQGSITLKIIPATQEEDRLKESKVFMRALFHYNPREDRAIPCQEAGLPFQRRQVLEVVSQDDPTWWQAKRVGDTNLRAGLIPSKGFQERRLSYRRAAGTLPSPQSLRKPP

SEQ ID NO: 21804 - protein, 95 aa, Artificial Sequence
  Synthetic polypeptide
FYKLLFSPLISTSPSCRLVRKVPCFPYAFHHDFKFPEASPAMLNYGCRTPLPLPAAPVHLRGSVTTATAGCPGSPTGASVPRGQCHTRADGPVCS

SEQ ID NO: 21805 - protein, 80 aa, Artificial Sequence
  Synthetic polypeptide
TMAAARLCLSLLLLSTCVALLLQPLLGAQGAPLEPVYPGDNATPEQMAQYAADLRRYINMLTRPRPRPMCPGQDGAYRQI

SEQ ID NO: 21806 - protein, 67 aa, Artificial Sequence
  Synthetic polypeptide
GLPSHAELWLPHASASPCCSCPPAWLCYYSHCWVPREPHWSQCTQGTMPHQSRWPSMQLISVDTSTC

SEQ ID NO: 21807 - protein, 96 aa, Artificial Sequence
  Synthetic polypeptide
TMAAARLCLSLLLLSTCVALLLQPLLGAQGAPLEPVYPGDNATPEQMAQYAADLRRYINMLTRPRYGKRHKEDTLAFSEWGSPHAAVPRELSPLDL

SEQ ID NO: 21808 - protein, 106 aa, Artificial Sequence
  Synthetic polypeptide
TMAAARLCLSLLLLSTCVALLLQPLLGAQGAPLEPVYPGDNATPEQMAQYAADLRRYINMLTRPSACPCCLFPPRYGKRHKEDTLAFSEWGSPHAAVPRELSPLDL

SEQ ID NO: 21809 - protein, 287 aa, Artificial Sequence
  Synthetic polypeptide
IKICILTRFPGDSLFLFGDRPFWWVHESGYYSQAPAQVHQFPSSCETGPGSPSGHCMITGAALWPIMTALSSQVATRARSRWVRVMPSLAYCTFLLAVGLSRIFILAHFPHQVLAGLITGAVLGWLMTPRVPMERELSFYGLTALALMLGTSLIYWTLFTLGLDLSWSISLAFKWCERPEWIHVDSRPFASLSRDSGAALGLGIALHSPCYAQVRRAQLGNGQKIACLVLAMGLLGPLDWLGHPPQISLFYIFNFLKYTLWPCLVLALVPWAVHMFSAQEAPPIHSS

SEQ ID NO: 21810 - protein, 50 aa, Artificial Sequence
  Synthetic polypeptide
QGSQVIPCFFLETGPFGGSMSLVTTARLQPRFTSSPLLVRLVQAALLDTA

SEQ ID NO: 21811 - protein, 14 aa, Artificial Sequence
  Synthetic polypeptide
FPVSFWRQALLVGP

SEQ ID NO: 21812 - protein, 184 aa, Artificial Sequence
  Synthetic polypeptide
IKICILTRFPGDSLFLFGDRPFWWVHESGYYSQAPAQVATRARSRWVRVMPSLAYCTFLLAVGLSRIFILAHFPHQVLAGLITGAVLGWLMTPRVPMERELSFYGLTALALMLGTSLIYWTLFTLGLDLSWSISLAFKWCERPEWIHVDSRPFASLSRDSGAALGLGIALHSPCYAQVRRAQLG

SEQ ID NO: 21813 - protein, 40 aa, Artificial Sequence
  Synthetic polypeptide
QGSQVIPCFFLETGPFGGSMSLVTTARLQPRWPLGPAAAG

SEQ ID NO: 21814 - protein, 72 aa, Artificial Sequence
  Synthetic polypeptide
KLVEWTRCCPGGHKTWACSPGSATEPLCMGPLGGSPRPNPECQEIGHPREAQNPPAAVVHPREEGVSQSAAR

SEQ ID NO: 21815 - protein, 576 aa, Artificial Sequence
  Synthetic polypeptide
SGQGAVLGDTRLGPVLLALPLNRCVWGLWEDHPDLIQNAKKSDIPEKPKTPQQLWYTHEKKVYLKVRPDEIMRDYIQKHPELNISEEGITKSTLTKAERQLKDKFDGRPTKPPPNSYSLYCAELMANMKDVPSTERMVLCSQQWKLLSQKEKDAYHKKCDQKKKDYEVELLRFLESLPEEEQQRVLGEEKMLNINKKQATSPASKKPAQEGGKGGSEKPKRPVSAMFIFSEEKRRQLQEERPELSESELTRLLARMWNDLSEKKKAKYKAREAALKAQSERKPGGEREERGKLPESPKRAEEIWQQSVIGDYLARFKNDRVKALKAMEMTWNNMEKKEKLMWIKKAAEDQKRYERELSEMRAPPAATNSSKKMKFQGEPKKPPMNGYQKFSQELLSNGELNHLPLKERMVEIGSRWQRISQSQKEHYKKLAEEQQKQYKVHLDLWVKSLSPQDRAAYKEYISNKRKSMTKLRGPNPKSSRTTLQSKSESEEDDEEDEDDEDEDEEEEDDENGDSSEDGGDSSESSSEDESEDGDENEEDDEDEDDDEDDDEDEDNESEGSSSSSSSSGDSSDSDSN

SEQ ID NO: 21816 - protein, 13 aa, Artificial Sequence
  Synthetic polypeptide
TAVYGAFGRITPT

SEQ ID NO: 21817 - protein, 99 aa, Artificial Sequence
  Synthetic polypeptide
KLVEWTRCCPGGHKTWACSPGSATEPLCMGPLGGSPRPNPECQEIGHPREAQNPPAAVVHPREEGVSQSAARCHYEGGEGLPGEAVVSALGQKEAEMDS

SEQ ID NO: 21818 - protein, 613 aa, Artificial Sequence
  Synthetic polypeptide
SGQGAVLGDTRLGPVLLALPLNRCVWGLWEDHPDLIQNAKKSDIPEKPKTPQQLWYTHEKKVYLKVRPDATTKEVKDSLGKQWSQLSDKKRLKWIHKALEQRKEYEEIMRDYIQKHPELNISEEGITKSTLTKAERQLKDKFDGRPTKPPPNSYSLYCAELMANMKDVPSTERMVLCSQQWKLLSQKEKDAYHKKCDQKKKDYEVELLRFLESLPEEEQQRVLGEEKMLNINKKQATSPASKKPAQEGGKGGSEKPKRPVSAMFIFSEEKRRQLQEERPELSESELTRLLARMWNDLSEKKKAKYKAREAALKAQSERKPGGEREERGKLPESPKRAEEIWQQSVIGDYLARFKNDRVKALKAMEMTWNNMEKKEKLMWIKKAAEDQKRYERELSEMRAPPAATNSSKKMKFQGEPKKPPMNGYQKFSQELLSNGELNHLPLKERMVEIGSRWQRISQSQKEHYKKLAEEQQKQYKVHLDLWVKSLSPQDRAAYKEYISNKRKSMTKLRGPNPKSSRTTLQSKSESEEDDEEDEDDEDEDEEEEDDENGDSSEDGGDSSESSSEDESEDGDENEEDDEDEDDDEDDDEDEDNESEGSSSSSSSSGDSSDSDSN

SEQ ID NO: 21819 - protein, 594 aa, Artificial Sequence
  Synthetic polypeptide
SGQGAVLGDTRLGPVLLALPLNRCVWGLWEDHPDLIQNAKKSDIPEKPKTPQQLWYTHEKKVYLKVRPDEIMRDYIQKHPELNISEEGITKSTLTKAERQLKDKFDGRPTKPPPNSYSLYCAELMANMKDVPSTERMVLCSQQWKLLSQKEKDAYHKKCDQKKKDYEVELLRFLESLPEEEQQRVLGEEKMLNINKKQATSPASKKPAQEGGKGGSEKPKRPVSAMFIFSEEKRRQLQEERPELSESELTRLLARMWNDLSEKKKAKYKAREAALKAQSERKPGGEREERGKLPESPKRAEEIWQQSVIGDYLARFKNDRVKALKAMEMTWNNMEKKEKLMWIKKAAEDQKRYERELSEMRAPPAATNSSKKMKFQGEPKKPPMNGYQKFSQELLSNGELNHLPLKERMVEIGSRWQRISQSQKEHYKKLAEEQQKQYKVHLDLWVKSLSPQDRAAYKEYISNKRKSMTKLRGPNPKSSRTTLQSKSPRRMMKRMRMTRTRMKKRKMMRMGTPLKMAATPLSPAARTRARMGMRMKRMTRTKTTTRMTMRMKIMSPRAAAPAPPPQGTPQTLTPTEAQPHPRAARESPGAPLPN

SEQ ID NO: 21820 - protein, 601 aa, Artificial Sequence
  Synthetic polypeptide
KLVEWTRCCPGGHKTWACSPGSATEPLCMGPLMKYIQDFQREKQEFERNLARFREDHPDLIQNAKKSDIPEKPKTPQQLWYTHEKKVYLKVRPDEIMRDYIQKHPELNISEEGITKSTLTKAERQLKDKFDGRPTKPPPNSYSLYCAELMANMKDVPSTERMVLCSQQWKLLSQKEKDAYHKKCDQKKKDYEVELLRFLESLPEEEQQRVLGEEKMLNINKKQATSPASKKPAQEGGKGGSEKPKRPVSAMFIFSEEKRRQLQEERPELSESELTRLLARMWNDLSEKKKAKYKAREAALKAQSERKPGGEREERGKLPESPKRAEEIWQQSVIGDYLARFKNDRVKALKAMEMTWNNMEKKEKLMWIKKAAEDQKRYERELSEMRAPPAATNSSKKMKFQGEPKKPPMNGYQKFSQELLSNGELNHLPLKERMVEIGSRWQRISQSQKEHYKKLAEEQQKQYKVHLDLWVKSLSPQDRAAYKEYISNKRKSMTKLRGPNPKSSRTTLQSKSESEEDDEEDEDDEDEDEEEEDDENGDSSEDGGDSSESSSEDESEDGDENEEDDEDEDDDEDDDEDEDNESEGSSSSSSSSGDSSDSDSN

SEQ ID NO: 21821 - protein, 69 aa, Artificial Sequence
  Synthetic polypeptide
TAVYGAFDEIYSGLPERETGVRAKPGPIQGGSPRPNPECQEIGHPREAQNPPAAVVHPREEGVSQSAAR

SEQ ID NO: 21822 - protein, 638 aa, Artificial Sequence
  Synthetic polypeptide
KLVEWTRCCPGGHKTWACSPGSATEPLCMGPLMKYIQDFQREKQEFERNLARFREDHPDLIQNAKKSDIPEKPKTPQQLWYTHEKKVYLKVRPDATTKEVKDSLGKQWSQLSDKKRLKWIHKALEQRKEYEEIMRDYIQKHPELNISEEGITKSTLTKAERQLKDKFDGRPTKPPPNSYSLYCAELMANMKDVPSTERMVLCSQQWKLLSQKEKDAYHKKCDQKKKDYEVELLRFLESLPEEEQQRVLGEEKMLNINKKQATSPASKKPAQEGGKGGSEKPKRPVSAMFIFSEEKRRQLQEERPELSESELTRLLARMWNDLSEKKKAKYKAREAALKAQSERKPGGEREERGKLPESPKRAEEIWQQSVIGDYLARFKNDRVKALKAMEMTWNNMEKKEKLMWIKKAAEDQKRYERELSEMRAPPAATNSSKKMKFQGEPKKPPMNGYQKFSQELLSNGELNHLPLKERMVEIGSRWQRISQSQKEHYKKLAEEQQKQYKVHLDLWVKSLSPQDRAAYKEYISNKRKSMTKLRGPNPKSSRTTLQSKSESEEDDEEDEDDEDEDEEEEDDENGDSSEDGGDSSESSSEDESEDGDENEEDDEDEDDDEDDDEDEDNESEGSSSSSSSSGDSSDSDSN

SEQ ID NO: 21823 - protein, 96 aa, Artificial Sequence
  Synthetic polypeptide
TAVYGAFDEIYSGLPERETGVRAKPGPIQGGSPRPNPECQEIGHPREAQNPPAAVVHPREEGVSQSAARCHYEGGEGLPGEAVVSALGQKEAEMDS

SEQ ID NO: 21824 - protein, 619 aa, Artificial Sequence
  Synthetic polypeptide
KLVEWTRCCPGGHKTWACSPGSATEPLCMGPLMKYIQDFQREKQEFERNLARFREDHPDLIQNAKKSDIPEKPKTPQQLWYTHEKKVYLKVRPDEIMRDYIQKHPELNISEEGITKSTLTKAERQLKDKFDGRPTKPPPNSYSLYCAELMANMKDVPSTERMVLCSQQWKLLSQKEKDAYHKKCDQKKKDYEVELLRFLESLPEEEQQRVLGEEKMLNINKKQATSPASKKPAQEGGKGGSEKPKRPVSAMFIFSEEKRRQLQEERPELSESELTRLLARMWNDLSEKKKAKYKAREAALKAQSERKPGGEREERGKLPESPKRAEEIWQQSVIGDYLARFKNDRVKALKAMEMTWNNMEKKEKLMWIKKAAEDQKRYERELSEMRAPPAATNSSKKMKFQGEPKKPPMNGYQKFSQELLSNGELNHLPLKERMVEIGSRWQRISQSQKEHYKKLAEEQQKQYKVHLDLWVKSLSPQDRAAYKEYISNKRKSMTKLRGPNPKSSRTTLQSKSPRRMMKRMRMTRTRMKKRKMMRMGTPLKMAATPLSPAARTRARMGMRMKRMTRTKTTTRMTMRMKIMSPRAAAPAPPPQGTPQTLTPTEAQPHPRAARESPGAPLPN

SEQ ID NO: 21825 - protein, 51 aa, Artificial Sequence
  Synthetic polypeptide
KLVEWTRCCPGGHKTWACSPGSATEPLCMGPLMKYIQDFQREKQEFERNLA

SEQ ID NO: 21826 - protein, 26 aa, Artificial Sequence
  Synthetic polypeptide
TAVYGAFDEIYSGLPERETGVRAKPG

SEQ ID NO: 21827 - protein, 57 aa, Artificial Sequence
  Synthetic polypeptide
GWPWFLIPVIPALWEAEGSASCIAMVSWSLCTCAQMVPAVPPGFKTLPASLAPWMPS

SEQ ID NO: 21828 - protein, 81 aa, Artificial Sequence
  Synthetic polypeptide
SQRFGRLREVPPVLQWCPGASVPVPKWCPLCHLVSRPYPLHWHHGCLREDREARGHQDPLERPPRHPGDDCASYRHLLHCL

SEQ ID NO: 21829 - protein, 52 aa, Artificial Sequence
  Synthetic polypeptide
GWPWFLIPVIPALWEAEGSASCIAMVSWSLCTCAQMVPAVPPGFKTLPASLA

SEQ ID NO: 21830 - protein, 43 aa, Artificial Sequence
  Synthetic polypeptide
SQRFGRLREVPPVLQWCPGASVPVPKWCPLCHLVSRPYPLHWH

SEQ ID NO: 21831 - protein, 47 aa, Artificial Sequence
  Synthetic polypeptide
GWPWFLIPVIPALWEAEGSASCIAMVSWSLCTCAQMVPAVPPGFKTL

SEQ ID NO: 21832 - protein, 37 aa, Artificial Sequence
  Synthetic polypeptide
SQRFGRLREVPPVLQWCPGASVPVPKWCPLCHLVSRP

SEQ ID NO: 21833 - protein, 8 aa, Artificial Sequence
  Synthetic polypeptide
SQRFGRLR

SEQ ID NO: 21834 - protein, 283 aa, Artificial Sequence
  Synthetic polypeptide
GQAQWLTPVIPARCEAKAEGSLEVRSWRPAWPTCKNSQNPNSKIVLLDVPVRAEAQVELRGNSFPASLVVAAEEGEREQNSLDSWGPKVEHTYELHNNGPGTVNGLHLSIHLPGQSQPSDLLYILDIQPQGGLQCFPQPPVNPLKVDWGLPIPSPSPIHPAHHKRDRRQIFLPEPEQPSRLQDPVLVSCDSAPCTVVQCDLQEMARGQRAMVTVLAFLWLPSLYQVWTQLLRALEERAIPIWWVLVGVLGGLLLLTILVLAMWKVGFFKRNRPPLEEDDEEGE

SEQ ID NO: 21835 - protein, 93 aa, Artificial Sequence
  Synthetic polypeptide
SQHVARPRQKDHWRSGVGDQPGQHARTARIQTARLCCWTCRSGQRPKWSCEGTPFQPPWWWQQKKVRGSRTAWTAGDPKWSTPMSSTTMALGL

SEQ ID NO: 21836 - protein, 74 aa, Artificial Sequence
  Synthetic polypeptide
PGAVAHTCNPSTLRGQGRRITGGQELETSLANMQEQPESKQQDCAAGRAGPGRGPSGAARELLSSLPGGGSRRR

SEQ ID NO: 21837 - protein, 317 aa, Artificial Sequence
  Synthetic polypeptide
GQAQWLTPVIPARCEAKAEGSLEVRSWRPAWPTCKNSQNPNSKIVLLDVPVRAEAQVELRGNSFPASLVVAAEEGEREQNSLDSWGPKVEHTYELHNNGPGTVNGLHLSIHLPGQSQPSDLLYILDIQPQGGLQCFPQPPVNPLKVDWGLPIPSPSPIHPAHHKRDRRQIFLPEPEQPSRLQDPVLVSCDSAPCTVVQCDLQEMARGQRAMVTVLAFLWLPSLYQRPLDQFVLQSHAWFNVSSLPYAVPPLSLPRGEAQVWTQLLRALEERAIPIWWVLVGVLGGLLLLTILVLAMWKVGFFKRNRPPLEEDDEEGE

SEQ ID NO: 21838 - protein, 64 aa, Artificial Sequence
  Synthetic polypeptide
GQAQWLTPVIPARCEAKAEGSLEQEQPESKQQDCAAGRAGPGRGPSGAARELLSSLPGGGSRRR

SEQ ID NO: 21839 - protein, 263 aa, Artificial Sequence
  Synthetic polypeptide
SQHVARPRQKDHWSKNSQNPNSKIVLLDVPVRAEAQVELRGNSFPASLVVAAEEGEREQNSLDSWGPKVEHTYELHNNGPGTVNGLHLSIHLPGQSQPSDLLYILDIQPQGGLQCFPQPPVNPLKVDWGLPIPSPSPIHPAHHKRDRRQIFLPEPEQPSRLQDPVLVSCDSAPCTVVQCDLQEMARGQRAMVTVLAFLWLPSLYQVWTQLLRALEERAIPIWWVLVGVLGGLLLLTILVLAMWKVGFFKRNRPPLEEDDEEGE

SEQ ID NO: 21840 - protein, 91 aa, Artificial Sequence
  Synthetic polypeptide
PGAVAHTCNPSTLRGQGRRITGARTARIQTARLCCWTCRSGQRPKWSCEGTPFQPPWWWQQKKVRGSRTAWTAGDPKWSTPMSSTTMALGL

SEQ ID NO: 21841 - protein, 297 aa, Artificial Sequence
  Synthetic polypeptide
SQHVARPRQKDHWSKNSQNPNSKIVLLDVPVRAEAQVELRGNSFPASLVVAAEEGEREQNSLDSWGPKVEHTYELHNNGPGTVNGLHLSIHLPGQSQPSDLLYILDIQPQGGLQCFPQPPVNPLKVDWGLPIPSPSPIHPAHHKRDRRQIFLPEPEQPSRLQDPVLVSCDSAPCTVVQCDLQEMARGQRAMVTVLAFLWLPSLYQRPLDQFVLQSHAWFNVSSLPYAVPPLSLPRGEAQVWTQLLRALEERAIPIWWVLVGVLGGLLLLTILVLAMWKVGFFKRNRPPLEEDDEEGE

SEQ ID NO: 21842 - protein, 53 aa, Artificial Sequence
  Synthetic polypeptide
AWWHTPVVPATREAESGHRGGRPADPGPQPGGDGRRVPVPLEGRGRPVPLAAL

SEQ ID NO: 21843 - protein, 950 aa, Artificial Sequence
  Synthetic polypeptide
SQLLGRLRVAIVVGAPRTLGPSQEETGGVFLCPWRAEGGQCPSLLFDLRDETRNVGSQTLQTFKARQGLGASVVSWSDVIVACAPWQHWNVLEKTEEAEKTPVGSCFLAQPESGRRAEYSPCRGNTLSRIYVENDFSWDKRYCEAGFSSVVTQAGELVLGAPGGYYFLGLLAQAPVADIFSSYRPGILLWHVSSQSLSFDSSNPEYFDGYWGYSVAVGEFDGDLNTTEYVVGAPTWSWTLGAVEILDSYYQRLHRLRGEQMASYFGHSVAVTDVNGDGRHDLLVGAPLYMESRADRKLAEVGRVYLFLQPRGPHALGAPSLLLTGTQLYGRFGSAIAPLGDLDRDGYNDIAVAAPYGGPSGRGQVLVFLGQSEGLRSRPSQVLDSPFPTGSAFGFSLRGAVDIDDNGYPDLIVGAYGANQVAVYRAQPVVKASVQLLVQDSLNPAVKSCVLPQTKTPVSCFNIQMCVGATGHNIPQKLSLNAELQLDRQKPRQGRRVLLLGSQQAGTTLNLDLGGKHSPICHTTMAFLRDEADFRDKLSPIVLSLNVSLPPTEAGMAPAVVLHGDTHVQEQTRIVLDCGEDDVCVPQLQLTASVTGSPLLVGADNVLELQMDAANEGEGAYEAELAVHLPQGAHYMRALSNVEGFERLICNQKKENETRVVLCELGNPMKKNAQIGIAMLVSVGNLEEAGESVSFQLQIRSKNSQNPNSKIVLLDVPVRAEAQVELRGNSFPASLVVAAEEGEREQNSLDSWGPKVEHTYELHNNGPGTVNGLHLSIHLPGQSQPSDLLYILDIQPQGGLQCFPQPPVNPLKVDWGLPIPSPSPIHPAHHKRDRRQIFLPEPEQPSRLQDPVLVSCDSAPCTVVQCDLQEMARGQRAMVTVLAFLWLPSLYQVWTQLLRALEERAIPIWWVLVGVLGGLLLLTILVLAMWKVGFFKRNRPPLEEDDEEGE

SEQ ID NO: 21844 - protein, 984 aa, Artificial Sequence
  Synthetic polypeptide
SQLLGRLRVAIVVGAPRTLGPSQEETGGVFLCPWRAEGGQCPSLLFDLRDETRNVGSQTLQTFKARQGLGASVVSWSDVIVACAPWQHWNVLEKTEEAEKTPVGSCFLAQPESGRRAEYSPCRGNTLSRIYVENDFSWDKRYCEAGFSSVVTQAGELVLGAPGGYYFLGLLAQAPVADIFSSYRPGILLWHVSSQSLSFDSSNPEYFDGYWGYSVAVGEFDGDLNTTEYVVGAPTWSWTLGAVEILDSYYQRLHRLRGEQMASYFGHSVAVTDVNGDGRHDLLVGAPLYMESRADRKLAEVGRVYLFLQPRGPHALGAPSLLLTGTQLYGRFGSAIAPLGDLDRDGYNDIAVAAPYGGPSGRGQVLVFLGQSEGLRSRPSQVLDSPFPTGSAFGFSLRGAVDIDDNGYPDLIVGAYGANQVAVYRAQPVVKASVQLLVQDSLNPAVKSCVLPQTKTPVSCFNIQMCVGATGHNIPQKLSLNAELQLDRQKPRQGRRVLLLGSQQAGTTLNLDLGGKHSPICHTTMAFLRDEADFRDKLSPIVLSLNVSLPPTEAGMAPAVVLHGDTHVQEQTRIVLDCGEDDVCVPQLQLTASVTGSPLLVGADNVLELQMDAANEGEGAYEAELAVHLPQGAHYMRALSNVEGFERLICNQKKENETRVVLCELGNPMKKNAQIGIAMLVSVGNLEEAGESVSFQLQIRSKNSQNPNSKIVLLDVPVRAEAQVELRGNSFPASLVVAAEEGEREQNSLDSWGPKVEHTYELHNNGPGTVNGLHLSIHLPGQSQPSDLLYILDIQPQGGLQCFPQPPVNPLKVDWGLPIPSPSPIHPAHHKRDRRQIFLPEPEQPSRLQDPVLVSCDSAPCTVVQCDLQEMARGQRAMVTVLAFLWLPSLYQRPLDQFVLQSHAWFNVSSLPYAVPPLSLPRGEAQVWTQLLRALEERAIPIWWVLVGVLGGLLLLTILVLAMWKVGFFKRNRPPLEEDDEEGE

SEQ ID NO: 21845 - protein, 49 aa, Artificial Sequence
  Synthetic polypeptide
GQEFKTSLANMSGHRGGRPADPGPQPGGDGRRVPVPLEGRGRPVPLAAL

SEQ ID NO: 21846 - protein, 79 aa, Artificial Sequence
  Synthetic polypeptide
PGTVAHTCNPSTLGGRGGQIMRSGVQDQPGQYEWPSWWAPRGPWAPARRRRAACSCAPGGPRAASAPRCSLTSVMRPEM

SEQ ID NO: 21847 - protein, 55 aa, Artificial Sequence
  Synthetic polypeptide
DQAQWLTPAIPALWEAESGHRGGRPADPGPQPGGDGRRVPVPLEGRGRPVPLAAL

SEQ ID NO: 21848 - protein, 959 aa, Artificial Sequence
  Synthetic polypeptide
TRHSGSHLQSQHFGRQRVAIVVGAPRTLGPSQEETGGVFLCPWRAEGGQCPSLLFDLRDETRNVGSQTLQTFKARQGLGASVVSWSDVIVACAPWQHWNVLEKTEEAEKTPVGSCFLAQPESGRRAEYSPCRGNTLSRIYVENDFSWDKRYCEAGFSSVVTQAGELVLGAPGGYYFLGLLAQAPVADIFSSYRPGILLWHVSSQSLSFDSSNPEYFDGYWGYSVAVGEFDGDLNTTEYVVGAPTWSWTLGAVEILDSYYQRLHRLRGEQMASYFGHSVAVTDVNGDGRHDLLVGAPLYMESRADRKLAEVGRVYLFLQPRGPHALGAPSLLLTGTQLYGRFGSAIAPLGDLDRDGYNDIAVAAPYGGPSGRGQVLVFLGQSEGLRSRPSQVLDSPFPTGSAFGFSLRGAVDIDDNGYPDLIVGAYGANQVAVYRAQPVVKASVQLLVQDSLNPAVKSCVLPQTKTPVSCFNIQMCVGATGHNIPQKLSLNAELQLDRQKPRQGRRVLLLGSQQAGTTLNLDLGGKHSPICHTTMAFLRDEADFRDKLSPIVLSLNVSLPPTEAGMAPAVVLHGDTHVQEQTRIVLDCGEDDVCVPQLQLTASVTGSPLLVGADNVLELQMDAANEGEGAYEAELAVHLPQGAHYMRALSNVEGFERLICNQKKENETRVVLCELGNPMKKNAQIGIAMLVSVGNLEEAGESVSFQLQIRSKNSQNPNSKIVLLDVPVRAEAQVELRGNSFPASLVVAAEEGEREQNSLDSWGPKVEHTYELHNNGPGTVNGLHLSIHLPGQSQPSDLLYILDIQPQGGLQCFPQPPVNPLKVDWGLPIPSPSPIHPAHHKRDRRQIFLPEPEQPSRLQDPVLVSCDSAPCTVVQCDLQEMARGQRAMVTVLAFLWLPSLYQVWTQLLRALEERAIPIWWVLVGVLGGLLLLTILVLAMWKVGFFKRNRPPLEEDDEEGE

SEQ ID NO: 21849 - protein, 63 aa, Artificial Sequence
  Synthetic polypeptide
PGTVAHTCNPSTLGGREWPSWWAPRGPWAPARRRRAACSCAPGGPRAASAPRCSLTSVMRPEM

SEQ ID NO: 21850 - protein, 993 aa, Artificial Sequence
  Synthetic polypeptide
TRHSGSHLQSQHFGRQRVAIVVGAPRTLGPSQEETGGVFLCPWRAEGGQCPSLLFDLRDETRNVGSQTLQTFKARQGLGASVVSWSDVIVACAPWQHWNVLEKTEEAEKTPVGSCFLAQPESGRRAEYSPCRGNTLSRIYVENDFSWDKRYCEAGFSSVVTQAGELVLGAPGGYYFLGLLAQAPVADIFSSYRPGILLWHVSSQSLSFDSSNPEYFDGYWGYSVAVGEFDGDLNTTEYVVGAPTWSWTLGAVEILDSYYQRLHRLRGEQMASYFGHSVAVTDVNGDGRHDLLVGAPLYMESRADRKLAEVGRVYLFLQPRGPHALGAPSLLLTGTQLYGRFGSAIAPLGDLDRDGYNDIAVAAPYGGPSGRGQVLVFLGQSEGLRSRPSQVLDSPFPTGSAFGFSLRGAVDIDDNGYPDLIVGAYGANQVAVYRAQPVVKASVQLLVQDSLNPAVKSCVLPQTKTPVSCFNIQMCVGATGHNIPQKLSLNAELQLDRQKPRQGRRVLLLGSQQAGTTLNLDLGGKHSPICHTTMAFLRDEADFRDKLSPIVLSLNVSLPPTEAGMAPAVVLHGDTHVQEQTRIVLDCGEDDVCVPQLQLTASVTGSPLLVGADNVLELQMDAANEGEGAYEAELAVHLPQGAHYMRALSNVEGFERLICNQKKENETRVVLCELGNPMKKNAQIGIAMLVSVGNLEEAGESVSFQLQIRSKNSQNPNSKIVLLDVPVRAEAQVELRGNSFPASLVVAAEEGEREQNSLDSWGPKVEHTYELHNNGPGTVNGLHLSIHLPGQSQPSDLLYILDIQPQGGLQCFPQPPVNPLKVDWGLPIPSPSPIHPAHHKRDRRQIFLPEPEQPSRLQDPVLVSCDSAPCTVVQCDLQEMARGQRAMVTVLAFLWLPSLYQRPLDQFVLQSHAWFNVSSLPYAVPPLSLPRGEAQVWTQLLRALEERAIPIWWVLVGVLGGLLLLTILVLAMWKVGFFKRNRPPLEEDDEEGE

SEQ ID NO: 21851 - protein, 956 aa, Artificial Sequence
  Synthetic polypeptide
SQHFGRPRRADHLRVAIVVGAPRTLGPSQEETGGVFLCPWRAEGGQCPSLLFDLRDETRNVGSQTLQTFKARQGLGASVVSWSDVIVACAPWQHWNVLEKTEEAEKTPVGSCFLAQPESGRRAEYSPCRGNTLSRIYVENDFSWDKRYCEAGFSSVVTQAGELVLGAPGGYYFLGLLAQAPVADIFSSYRPGILLWHVSSQSLSFDSSNPEYFDGYWGYSVAVGEFDGDLNTTEYVVGAPTWSWTLGAVEILDSYYQRLHRLRGEQMASYFGHSVAVTDVNGDGRHDLLVGAPLYMESRADRKLAEVGRVYLFLQPRGPHALGAPSLLLTGTQLYGRFGSAIAPLGDLDRDGYNDIAVAAPYGGPSGRGQVLVFLGQSEGLRSRPSQVLDSPFPTGSAFGFSLRGAVDIDDNGYPDLIVGAYGANQVAVYRAQPVVKASVQLLVQDSLNPAVKSCVLPQTKTPVSCFNIQMCVGATGHNIPQKLSLNAELQLDRQKPRQGRRVLLLGSQQAGTTLNLDLGGKHSPICHTTMAFLRDEADFRDKLSPIVLSLNVSLPPTEAGMAPAVVLHGDTHVQEQTRIVLDCGEDDVCVPQLQLTASVTGSPLLVGADNVLELQMDAANEGEGAYEAELAVHLPQGAHYMRALSNVEGFERLICNQKKENETRVVLCELGNPMKKNAQIGIAMLVSVGNLEEAGESVSFQLQIRSKNSQNPNSKIVLLDVPVRAEAQVELRGNSFPASLVVAAEEGEREQNSLDSWGPKVEHTYELHNNGPGTVNGLHLSIHLPGQSQPSDLLYILDIQPQGGLQCFPQPPVNPLKVDWGLPIPSPSPIHPAHHKRDRRQIFLPEPEQPSRLQDPVLVSCDSAPCTVVQCDLQEMARGQRAMVTVLAFLWLPSLYQVWTQLLRALEERAIPIWWVLVGVLGGLLLLTILVLAMWKVGFFKRNRPPLEEDDEEGE

SEQ ID NO: 21852 - protein, 990 aa, Artificial Sequence
  Synthetic polypeptide
SQHFGRPRRADHLRVAIVVGAPRTLGPSQEETGGVFLCPWRAEGGQCPSLLFDLRDETRNVGSQTLQTFKARQGLGASVVSWSDVIVACAPWQHWNVLEKTEEAEKTPVGSCFLAQPESGRRAEYSPCRGNTLSRIYVENDFSWDKRYCEAGFSSVVTQAGELVLGAPGGYYFLGLLAQAPVADIFSSYRPGILLWHVSSQSLSFDSSNPEYFDGYWGYSVAVGEFDGDLNTTEYVVGAPTWSWTLGAVEILDSYYQRLHRLRGEQMASYFGHSVAVTDVNGDGRHDLLVGAPLYMESRADRKLAEVGRVYLFLQPRGPHALGAPSLLLTGTQLYGRFGSAIAPLGDLDRDGYNDIAVAAPYGGPSGRGQVLVFLGQSEGLRSRPSQVLDSPFPTGSAFGFSLRGAVDIDDNGYPDLIVGAYGANQVAVYRAQPVVKASVQLLVQDSLNPAVKSCVLPQTKTPVSCFNIQMCVGATGHNIPQKLSLNAELQLDRQKPRQGRRVLLLGSQQAGTTLNLDLGGKHSPICHTTMAFLRDEADFRDKLSPIVLSLNVSLPPTEAGMAPAVVLHGDTHVQEQTRIVLDCGEDDVCVPQLQLTASVTGSPLLVGADNVLELQMDAANEGEGAYEAELAVHLPQGAHYMRALSNVEGFERLICNQKKENETRVVLCELGNPMKKNAQIGIAMLVSVGNLEEAGESVSFQLQIRSKNSQNPNSKIVLLDVPVRAEAQVELRGNSFPASLVVAAEEGEREQNSLDSWGPKVEHTYELHNNGPGTVNGLHLSIHLPGQSQPSDLLYILDIQPQGGLQCFPQPPVNPLKVDWGLPIPSPSPIHPAHHKRDRRQIFLPEPEQPSRLQDPVLVSCDSAPCTVVQCDLQEMARGQRAMVTVLAFLWLPSLYQRPLDQFVLQSHAWFNVSSLPYAVPPLSLPRGEAQVWTQLLRALEERAIPIWWVLVGVLGGLLLLTILVLAMWKVGFFKRNRPPLEEDDEEGE

SEQ ID NO: 21853 - protein, 61 aa, Artificial Sequence
  Synthetic polypeptide
GRARWLMPVIPALWEAEAGRSPESGHRGGRPADPGPQPGGDGRRVPVPLEGRGRPVPLAAL

SEQ ID NO: 21854 - protein, 30 aa, Artificial Sequence
  Synthetic polypeptide
HLQCHHFGSPRWEDHLSPGVHDQLWQHRLC

SEQ ID NO: 21855 - protein, 1397 aa, Artificial Sequence
  Synthetic polypeptide
AQEFMTSFGSIDYVDKEKAIAKALEDLRANFYCELCDKQYQKHQEFDNHINSYDHAHKQRLKDLKQREFARNVSSRSRKDEKKQEKALRRLHELAEQRKQAECAPGSGPMFKPTTVAVDEEGGEDDKDESATNSGTGATASCGLGSEFSTDKGGPFTAVQITNTTGLAQAPGLASQGISFGIKNNLGTPLQKLGVSFSFAKKAPVKLESIASVFKDHAEEGTSEDGTKPDEKSSDQGLQKVGDSDGSSNLDGKKEDEDPQDGGSLASTLSKLKRMKREEGAGATEPEYYHYIPPAHCKVKPNFPFLLFMRASEQMDGDNTTHPKNAPESKKGSSPKPKSCIKAAASQGAEKTVSEVSEQPKETSMTEPSEPGSKAEAKKALGGDVSDQSLESHSQKVSETQMCESNSSKETSLATPAGKESQEGPKHPTGPFFPVLSKDESTALQWPSELLIFTKAEPSISYSCNPLYFDFKLSRNKDARTKGTEKPKDIGSSSKDHLQGLDPGEPNKSKEVGGEKIVRSSGGRMDAPASGSACSGLNKQEPGGSHGSETEDTGRSLPSKKERSGKSHRHKKKKKHKKSSKHKRKHKADTEEKSSKAESGEKSKKRKKRKRKKNKSSAPADSERGPKPEPPGSGSPAPPRRRRRAQDDSQRRSLPAEEGSSGKKDEGGGGSSSQDHGGRKHKGELPPSSCQRRAGTKRSSRSSHRSQPSSGDEDSDDASSHRLHQKSPSQYSEEEEEEDSGSEHSRSRSRSGRRHSSHRSSRRSYSSSSDASSDQSCYSRQRSYSDDSYSDYSDRSRRHSKRSHDSDDSDYASSKHRSKRHKYSSSDDDYSLSCSQSRSRSRSHTRERSRSRGRSRSSSCSRSRSKRRSRSTTAHSWQRSRSYSRDRSRSTRSPSQRSGSRKRSWGHESPEERHSGRRDFIRSKIYRSQSPHYFRSGRGEGPGKKDDGRGDDSKATGPPSQNSNIGTGRGSEGDCSPEDKNSVTAKLLLEKIQSRKVERKPSVSEEVQATPNKAGPKLKDPPQGYFGPKLPPSLGNKPVLPLIGKLPATRKPNKKCEESGLERGEEQEQSETEEGPPGSSDALFGHQFPSEETTGPLLDPPPEESKSGEATADHPVAPLGTPAHSDCYPGDPTISHNYLPDPSDGDTLESLDSSSQPGPVESSLLPIAPDLEHFPSYAPPSGDPSIESTDGAEDASLAPLESQPITFTPEEMEKYSKLQQAAQQHIQQQLLAKQVKAFPASAALAPATPALQPIHIQQPATASATSITTVQHAILQHHAAAAAAAIGIHPHPHPQPLAQVHHIPQPHLTPISLSHLTHSIIPGHPATFLASHPIHIIPASAIHPGPFTFHPVPHAALYPTLLAPRPAAAAATALHLHPLLHPIFSGQDLQHPPSHGT

SEQ ID NO: 21856 - protein, 141 aa, Artificial Sequence
  Synthetic polypeptide
AQEFMTSFGSIDYVDKEKAIAKALEDLRANFYCELCDKQYQKHQEFDNHINSYDHAHKQRLKDLKQREFARNVSSRSRKDEKKQEKALRRLHELAEQRKQAECAPGSGPMFKPTTVAVDEEGGEDDKDESATNSGTGATAS

SEQ ID NO: 21857 - protein, 942 aa, Artificial Sequence
  Synthetic polypeptide
NALPQMDDDDDDDDVGDHDDDHPGMEVVLHEDKKYYPTAEEVYGPEVETIVQEEDTQPLTEPIIKPVKTKKFTLMEQTLPVTVYEMDFLADLMDNSELIRNVTLCGHLHHGKTCFVDCLIEQTHPEIRKRYDQDLCYTDILFTEQERGVGIKSTPVTVVLPDTKGKSYLFNIMDTPGHVNFSDEVTAGLRISDGVVLFIDAAEGVMLNTERLIKHAVQERLAVTVCINKIDRLILELKLPPTDAYYKLRHIVDEVNGLISMYSTDENLILSPLLGNVCFSSSQYSICFTLGSFAKIYADTFGDINYQEFAKRLWGDIYFNPKTRKFTKKAPTSSSQRSFVEFILEPLYKILAQVVGDVDTSLPRTLDELGIHLTKEELKLNIRPLLRLVCKKFFGEFTGFVDMCVQHIPSPKVGAKPKIEHTYTGGVDSDLGEAMSDCDPDGPLMCHTTKMYSTDDGVQFHAFGRVLSGTIHAGQPVKVLGENYTLEDEEDSQICTVGRLWISVARYHIEVNRVPAGNWVLIEGVDQPIVKTATITEPRGNEEAQIFRPLKFNTTSVIKIAVEPVNPSELPKMLDGLRKVNKSYPSLTTKVEESGEHVILGTGELYLDCVMHDLRKMYSEIDIKVADPVVTFCETVVETSSLKCFAETPNKKNKITMIAEPLEKGLAEDIENEVVQITWNRKKLGEFFQTKYDWDLLAARSIWAFGPDATGPNILVDDTLPSEVDKALLGSVKDSIVQGFQWGTREGPLCDELIRNVKFKILDAVVAQEPLHRGGGQIIPTARRVVYSAFLMATPRLMEPYYFVEVQAPADCVSAVYTVLARRRGHVTQDAPIPGSPLYTIKAFIPAIDSFGFETDLRTHTQGQAFSLSVFHHWQIVPGDPLDKSIVIRPLEPQPAPHLAREFMIKTRRRKGLSEDVSISKFFDDPMLLELAKQDVVLNYPM

SEQ ID NO: 21858 - protein, 36 aa, Artificial Sequence
  Synthetic polypeptide
TSKLPHALGSGPLHSLFHQPTRMLFPRWMMMTTTMT

SEQ ID NO: 21859 - protein, 68 aa, Artificial Sequence
  Synthetic polypeptide
SKVQILRAVQKILSVCLPCDRSFLFPHPSLHSHHIGFLAKPQSCHMLLALGLCIRCFTSRLECSSPDG

SEQ ID NO: 21860 - protein, 932 aa, Artificial Sequence
  Synthetic polypeptide
NALPQMDDDDDDDDVGDHDDDHPGMEVVLHEDKKYYPTAEEVYGPEVETIVQEEDTQPLTEPIIKPVKTKKFTLMEQTLPVTVYEMDFLADLMDNSELIRNVTLCGHLHHGKTHPEIRKRYDQDLCYTDILFTEQERGVGIKSTPVTVVLPDTKGKSYLFNIMDTPGHVNFSDEVTAGLRISDGVVLFIDAAEGVMLNTERLIKHAVQERLAVTVCINKIDRLILELKLPPTDAYYKLRHIVDEVNGLISMYSTDENLILSPLLGNVCFSSSQYSICFTLGSFAKIYADTFGDINYQEFAKRLWGDIYFNPKTRKFTKKAPTSSSQRSFVEFILEPLYKILAQVVGDVDTSLPRTLDELGIHLTKEELKLNIRPLLRLVCKKFFGEFTGFVDMCVQHIPSPKVGAKPKIEHTYTGGVDSDLGEAMSDCDPDGPLMCHTTKMYSTDDGVQFHAFGRVLSGTIHAGQPVKVLGENYTLEDEEDSQICTVGRLWISVARYHIEVNRVPAGNWVLIEGVDQPIVKTATITEPRGNEEAQIFRPLKFNTTSVIKIAVEPVNPSELPKMLDGLRKVNKSYPSLTTKVEESGEHVILGTGELYLDCVMHDLRKMYSEIDIKVADPVVTFCETVVETSSLKCFAETPNKKNKITMIAEPLEKGLAEDIENEVVQITWNRKKLGEFFQTKYDWDLLAARSIWAFGPDATGPNILVDDTLPSEVDKALLGSVKDSIVQGFQWGTREGPLCDELIRNVKFKILDAVVAQEPLHRGGGQIIPTARRVVYSAFLMATPRLMEPYYFVEVQAPADCVSAVYTVLARRRGHVTQDAPIPGSPLYTIKAFIPAIDSFGFETDLRTHTQGQAFSLSVFHHWQIVPGDPLDKSIVIRPLEPQPAPHLAREFMIKTRRRKGLSEDVSISKFFDDPMLLELAKQDVVLNYPM

SEQ ID NO: 21861 - protein, 118 aa, Artificial Sequence
  Synthetic polypeptide
NALPQMDDDDDDDDVGDHDDDHPGMEVVLHEDKKYYPTAEEVYGPEVETIVQEEDTQPLTEPIIKPVKTKKFTLMEQTLPVTVYEMDFLADLMDNSELIRNVTLCGHLHHGKTCFVDC

SEQ ID NO: 21862 - protein, 76 aa, Artificial Sequence
  Synthetic polypeptide
NALPQMDDDDDDDDVGDHDDDHPGMEVVLHEDKKYYPTAEEVYGPEVETIVQEEDTQPLTEPIIKPVKTKKFTLME

SEQ ID NO: 21863 - protein, 14 aa, Artificial Sequence
  Synthetic polypeptide
NIGYEYGEEKVSPQ

SEQ ID NO: 21864 - protein, 58 aa, Artificial Sequence
  Synthetic polypeptide
TRNEILGMNMEKKRCHHSDGSGGQHAASSGTGAAPHPSGAGQSAAASGSGGGRAGAGV

SEQ ID NO: 21865 - protein, 843 aa, Artificial Sequence
  Synthetic polypeptide
IWRRKGVTTVMAVEDSTLQVVVRVRPPTPRELDSQRRPVVQVVDERVLVFNPEEPDGGFPGLKWGGTHDGPKKKGKDLTFVFDRVFGEAATQQDVFQHTTHSVLDSFLQGYNCSVFAYGATGAGKTHTMLGREGDPGIMYLTTVELYRRLEARQQEKHFEVLISYQEVYNEQIHDLLEPKGPLAIREDPDKGVVVQGLSFHQPASAEQLLEILTRGNRNRTQHPTDANATSSRSHAIFQIFVKQQDRVPGLTQAVQVAKMSLIDLAGSERASSTHAKGERLREGANINRSLLALINVLNALADAKGRKTHVPYRDSKLTRLLKDSLGGNCRTVMIAAISPSSLTYEDTYNTLKYADRAKEIRLSLKSNVTSLDCHISQYATICQQLQAEVAALRKKLQVYEGGGQPPPQDLPGSPKSGPPPEHLPSSPLPPHPPSQPCTPELPAGPRALQEESLGMEAQVERAMEGNSSDQEQSPEDEDEGPAEEVPTQMPEQNPTHALPESPRLTLQPKPVVGHFSARELDGDRSKQLALKVLCVAQRQYSLLQAANLLTPDMITEFETLQQLVQEEKIEPGAEALRTSGLARGAPLAQELCSESIPVPSPLCPEPPGYTGPVTRTMARRLSGPLHTLGIPPGPNCTPAQGSRWPMEKKRRRPSALEADSPMAPKRGTKRQRQSFLPCLRRGSLPDTQPSQGPSTPKGERASSPCHSPRVCPATVIKSRVPLGPSAMQNCSTPLALPTRDLNATFDLSEEPPSKPSFHECIGWDKIPQELSRLDQPFIPRAPVPLFTMKGPKPTSSLPGTSACKKKRVASSSVSHGRSRIARLPSSTLKRPAGPLVLPGDWH

SEQ ID NO: 21866 - protein, 541 aa, Artificial Sequence
  Synthetic polypeptide
GRAGGRGRERLGGRAGGAGRGWAGGRAGPGEVGRAGGRGRERLGGRADAGETAVKPPAPPLPQMMEGNGNGHEHCSDCENEEDNSYNRGGLSPANDTGAKKKKKKQKKKKEKGSETDSAQDQPVKMNSLPAERIQEIQKAIELFSVGQGPAKTMEEASKRSYQFWDTQPVPKLGEVVNTHGPVEPDKDNIRQEPYTLPQGFTWDALDLGDRGVLKELYTLLNENYVEDDDNMFRFDYSPEFLLWALRPPGWLPQWHCGVRVVSSRKLVGFISAIPANIHIYDTEKKMVEINFLCVHKKLRSKRVAPVLIREITRRVHLEGIFQAVYTAGVVLPKPVGTCRYWHRSLNPRKLIEVKFSHLSRNMTMQRTMKLYRLPETPKTAGLRPMETKDIPVVHQLLTRYLKQFHLTPVMSQEEVEHWFYPQENIIDTFVVENANGEVTDFLSFYTLPSTIMNHPTHKSLKAAYSFYNVHTQTPLLDLMSDALVLAKMKGFDVFNALDLMENKTFLEKLKFGIGDGNLQYYLYNWKCPSMGAEKVGLVLQ

SEQ ID NO: 21867 - protein, 53 aa, Artificial Sequence
  Synthetic polypeptide
GGRAGGAGRGWAGGRAGPGEVGRAGGRGRERLGGRAGGAGRGWAGGRTRERQQ

SEQ ID NO: 21868 - protein, 71 aa, Artificial Sequence
  Synthetic polypeptide
AGGRAGPGEVGRAGGRGRERLGGRAGGAGRGWAGGRAGPGEVGRAGGRGRDSSEAAGTSAAADDGRERERP

SEQ ID NO: 21869 - protein, 182 aa, Artificial Sequence
  Synthetic polypeptide
GRAGGRGRERLGGRAGGAGRGWAGGRAGPGEVGRAGGRGRERLGGRADAGETAVKPPAPPLPQMMEGNGNGHEHCSDCENEEDNSYNRGGLSPANDTGAKKKKKKQKKKKEKGSETDSAQDQPVKMNSLPAERIQEIQKAIELFSVGQGPAKTMEEASKRSYQFWDTQPVPKLAKRTVHPPE

SEQ ID NO: 21870 - protein, 134 aa, Artificial Sequence
  Synthetic polypeptide
GRAGGRGRERLGGRAGGAGRGWAGGRAGPGEVGRAGGRGRERLGGRADAGETAVKPPAPPLPQMMEGNGNGHEHCSDCENEEDNSYNRGGLSPANDTGAKKKKKKQKKKKEKGSETDSAQDQPVKVGVQKYEHG

SEQ ID NO: 21871 - protein, 81 aa, Artificial Sequence
  Synthetic polypeptide
GRAGGRGRERLGGRAGGAGRGWAGGRAGPGEVGRAGGRGRERLGGRADAGEVGRAGGRGRDSSEAAGTSAAADDGRERERP

SEQ ID NO: 21872 - protein, 550 aa, Artificial Sequence
  Synthetic polypeptide
GGRAGGAGRGWAGGRAGPGEVGRAGGRGRERLGGRAGGAGRGWAGGRTRERLGGRADAGETAVKPPAPPLPQMMEGNGNGHEHCSDCENEEDNSYNRGGLSPANDTGAKKKKKKQKKKKEKGSETDSAQDQPVKMNSLPAERIQEIQKAIELFSVGQGPAKTMEEASKRSYQFWDTQPVPKLGEVVNTHGPVEPDKDNIRQEPYTLPQGFTWDALDLGDRGVLKELYTLLNENYVEDDDNMFRFDYSPEFLLWALRPPGWLPQWHCGVRVVSSRKLVGFISAIPANIHIYDTEKKMVEINFLCVHKKLRSKRVAPVLIREITRRVHLEGIFQAVYTAGVVLPKPVGTCRYWHRSLNPRKLIEVKFSHLSRNMTMQRTMKLYRLPETPKTAGLRPMETKDIPVVHQLLTRYLKQFHLTPVMSQEEVEHWFYPQENIIDTFVVENANGEVTDFLSFYTLPSTIMNHPTHKSLKAAYSFYNVHTQTPLLDLMSDALVLAKMKGFDVFNALDLMENKTFLEKLKFGIGDGNLQYYLYNWKCPSMGAEKVGLVLQ

SEQ ID NO: 21873 - protein, 62 aa, Artificial Sequence
  Synthetic polypeptide
AGGRAGPGEVGRAGGRGRERLGGRAGGAGRGWAGGRAGPGEVGRAGGRGRGWAGGRTRERQQ

SEQ ID NO: 21874 - protein, 191 aa, Artificial Sequence
  Synthetic polypeptide
GGRAGGAGRGWAGGRAGPGEVGRAGGRGRERLGGRAGGAGRGWAGGRTRERLGGRADAGETAVKPPAPPLPQMMEGNGNGHEHCSDCENEEDNSYNRGGLSPANDTGAKKKKKKQKKKKEKGSETDSAQDQPVKMNSLPAERIQEIQKAIELFSVGQGPAKTMEEASKRSYQFWDTQPVPKLAKRTVHPPE

SEQ ID NO: 21875 - protein, 143 aa, Artificial Sequence
  Synthetic polypeptide
GGRAGGAGRGWAGGRAGPGEVGRAGGRGRERLGGRAGGAGRGWAGGRTRERLGGRADAGETAVKPPAPPLPQMMEGNGNGHEHCSDCENEEDNSYNRGGLSPANDTGAKKKKKKQKKKKEKGSETDSAQDQPVKVGVQKYEHG

SEQ ID NO: 21876 - protein, 29 aa, Artificial Sequence
  Synthetic polypeptide
GRAGGRGRDSSEAAGTSAAADDGRERERP

SEQ ID NO: 21877 - protein, 498 aa, Artificial Sequence
  Synthetic polypeptide
GGRADAGETAVKPPAPPLPQMMEGNGNGHEHCSDCENEEDNSYNRGGLSPANDTGAKKKKKKQKKKKEKGSETDSAQDQPVKMNSLPAERIQEIQKAIELFSVGQGPAKTMEEASKRSYQFWDTQPVPKLGEVVNTHGPVEPDKDNIRQEPYTLPQGFTWDALDLGDRGVLKELYTLLNENYVEDDDNMFRFDYSPEFLLWALRPPGWLPQWHCGVRVVSSRKLVGFISAIPANIHIYDTEKKMVEINFLCVHKKLRSKRVAPVLIREITRRVHLEGIFQAVYTAGVVLPKPVGTCRYWHRSLNPRKLIEVKFSHLSRNMTMQRTMKLYRLPETPKTAGLRPMETKDIPVVHQLLTRYLKQFHLTPVMSQEEVEHWFYPQENIIDTFVVENANGEVTDFLSFYTLPSTIMNHPTHKSLKAAYSFYNVHTQTPLLDLMSDALVLAKMKGFDVFNALDLMENKTFLEKLKFGIGDGNLQYYLYNWKCPSMGAEKVGLVLQ

SEQ ID NO: 21878 - protein, 10 aa, Artificial Sequence
  Synthetic polypeptide
AGGRTRERQQ

SEQ ID NO: 21879 - protein, 139 aa, Artificial Sequence
  Synthetic polypeptide
GGRADAGETAVKPPAPPLPQMMEGNGNGHEHCSDCENEEDNSYNRGGLSPANDTGAKKKKKKQKKKKEKGSETDSAQDQPVKMNSLPAERIQEIQKAIELFSVGQGPAKTMEEASKRSYQFWDTQPVPKLAKRTVHPPE

SEQ ID NO: 21880 - protein, 91 aa, Artificial Sequence
  Synthetic polypeptide
GGRADAGETAVKPPAPPLPQMMEGNGNGHEHCSDCENEEDNSYNRGGLSPANDTGAKKKKKKQKKKKEKGSETDSAQDQPVKVGVQKYEHG

SEQ ID NO: 21881 - protein, 20 aa, Artificial Sequence
  Synthetic polypeptide
GRAGGRGRGWAGGRTRERQQ

SEQ ID NO: 21882 - protein, 38 aa, Artificial Sequence
  Synthetic polypeptide
GGRADAGEVGRAGGRGRDSSEAAGTSAAADDGRERERP

SEQ ID NO: 21883 - protein, 507 aa, Artificial Sequence
  Synthetic polypeptide
AGGRTRERLGGRADAGETAVKPPAPPLPQMMEGNGNGHEHCSDCENEEDNSYNRGGLSPANDTGAKKKKKKQKKKKEKGSETDSAQDQPVKMNSLPAERIQEIQKAIELFSVGQGPAKTMEEASKRSYQFWDTQPVPKLGEVVNTHGPVEPDKDNIRQEPYTLPQGFTWDALDLGDRGVLKELYTLLNENYVEDDDNMFRFDYSPEFLLWALRPPGWLPQWHCGVRVVSSRKLVGFISAIPANIHIYDTEKKMVEINFLCVHKKLRSKRVAPVLIREITRRVHLEGIFQAVYTAGVVLPKPVGTCRYWHRSLNPRKLIEVKFSHLSRNMTMQRTMKLYRLPETPKTAGLRPMETKDIPVVHQLLTRYLKQFHLTPVMSQEEVEHWFYPQENIIDTFVVENANGEVTDFLSFYTLPSTIMNHPTHKSLKAAYSFYNVHTQTPLLDLMSDALVLAKMKGFDVFNALDLMENKTFLEKLKFGIGDGNLQYYLYNWKCPSMGAEKVGLVLQ

SEQ ID NO: 21884 - protein, 148 aa, Artificial Sequence
  Synthetic polypeptide
AGGRTRERLGGRADAGETAVKPPAPPLPQMMEGNGNGHEHCSDCENEEDNSYNRGGLSPANDTGAKKKKKKQKKKKEKGSETDSAQDQPVKMNSLPAERIQEIQKAIELFSVGQGPAKTMEEASKRSYQFWDTQPVPKLAKRTVHPPE

SEQ ID NO: 21885 - protein, 100 aa, Artificial Sequence
  Synthetic polypeptide
AGGRTRERLGGRADAGETAVKPPAPPLPQMMEGNGNGHEHCSDCENEEDNSYNRGGLSPANDTGAKKKKKKQKKKKEKGSETDSAQDQPVKVGVQKYEHG

SEQ ID NO: 21886 - protein, 517 aa, Artificial Sequence
  Synthetic polypeptide
GRAGGRGRGWAGGRTRERLGGRADAGETAVKPPAPPLPQMMEGNGNGHEHCSDCENEEDNSYNRGGLSPANDTGAKKKKKKQKKKKEKGSETDSAQDQPVKMNSLPAERIQEIQKAIELFSVGQGPAKTMEEASKRSYQFWDTQPVPKLGEVVNTHGPVEPDKDNIRQEPYTLPQGFTWDALDLGDRGVLKELYTLLNENYVEDDDNMFRFDYSPEFLLWALRPPGWLPQWHCGVRVVSSRKLVGFISAIPANIHIYDTEKKMVEINFLCVHKKLRSKRVAPVLIREITRRVHLEGIFQAVYTAGVVLPKPVGTCRYWHRSLNPRKLIEVKFSHLSRNMTMQRTMKLYRLPETPKTAGLRPMETKDIPVVHQLLTRYLKQFHLTPVMSQEEVEHWFYPQENIIDTFVVENANGEVTDFLSFYTLPSTIMNHPTHKSLKAAYSFYNVHTQTPLLDLMSDALVLAKMKGFDVFNALDLMENKTFLEKLKFGIGDGNLQYYLYNWKCPSMGAEKVGLVLQ

SEQ ID NO: 21887 - protein, 29 aa, Artificial Sequence
  Synthetic polypeptide
GGRADAGEVGRAGGRGRGWAGGRTRERQQ

SEQ ID NO: 21888 - protein, 47 aa, Artificial Sequence
  Synthetic polypeptide
AGGRTRERLGGRADAGEVGRAGGRGRDSSEAAGTSAAADDGRERERP

SEQ ID NO: 21889 - protein, 158 aa, Artificial Sequence
  Synthetic polypeptide
GRAGGRGRGWAGGRTRERLGGRADAGETAVKPPAPPLPQMMEGNGNGHEHCSDCENEEDNSYNRGGLSPANDTGAKKKKKKQKKKKEKGSETDSAQDQPVKMNSLPAERIQEIQKAIELFSVGQGPAKTMEEASKRSYQFWDTQPVPKLAKRTVHPPE

SEQ ID NO: 21890 - protein, 110 aa, Artificial Sequence
  Synthetic polypeptide
GRAGGRGRGWAGGRTRERLGGRADAGETAVKPPAPPLPQMMEGNGNGHEHCSDCENEEDNSYNRGGLSPANDTGAKKKKKKQKKKKEKGSETDSAQDQPVKVGVQKYEHG

SEQ ID NO: 21891 - protein, 57 aa, Artificial Sequence
  Synthetic polypeptide
GRAGGRGRGWAGGRTRERLGGRADAGEVGRAGGRGRDSSEAAGTSAAADDGRERERP

SEQ ID NO: 21892 - protein, 526 aa, Artificial Sequence
  Synthetic polypeptide
GGRADAGEVGRAGGRGRGWAGGRTRERLGGRADAGETAVKPPAPPLPQMMEGNGNGHEHCSDCENEEDNSYNRGGLSPANDTGAKKKKKKQKKKKEKGSETDSAQDQPVKMNSLPAERIQEIQKAIELFSVGQGPAKTMEEASKRSYQFWDTQPVPKLGEVVNTHGPVEPDKDNIRQEPYTLPQGFTWDALDLGDRGVLKELYTLLNENYVEDDDNMFRFDYSPEFLLWALRPPGWLPQWHCGVRVVSSRKLVGFISAIPANIHIYDTEKKMVEINFLCVHKKLRSKRVAPVLIREITRRVHLEGIFQAVYTAGVVLPKPVGTCRYWHRSLNPRKLIEVKFSHLSRNMTMQRTMKLYRLPETPKTAGLRPMETKDIPVVHQLLTRYLKQFHLTPVMSQEEVEHWFYPQENIIDTFVVENANGEVTDFLSFYTLPSTIMNHPTHKSLKAAYSFYNVHTQTPLLDLMSDALVLAKMKGFDVFNALDLMENKTFLEKLKFGIGDGNLQYYLYNWKCPSMGAEKVGLVLQ

SEQ ID NO: 21893 - protein, 38 aa, Artificial Sequence
  Synthetic polypeptide
AGGRTRERLGGRADAGEVGRAGGRGRGWAGGRTRERQQ

SEQ ID NO: 21894 - protein, 167 aa, Artificial Sequence
  Synthetic polypeptide
GGRADAGEVGRAGGRGRGWAGGRTRERLGGRADAGETAVKPPAPPLPQMMEGNGNGHEHCSDCENEEDNSYNRGGLSPANDTGAKKKKKKQKKKKEKGSETDSAQDQPVKMNSLPAERIQEIQKAIELFSVGQGPAKTMEEASKRSYQFWDTQPVPKLAKRTVHPPE

SEQ ID NO: 21895 - protein, 119 aa, Artificial Sequence
  Synthetic polypeptide
GGRADAGEVGRAGGRGRGWAGGRTRERLGGRADAGETAVKPPAPPLPQMMEGNGNGHEHCSDCENEEDNSYNRGGLSPANDTGAKKKKKKQKKKKEKGSETDSAQDQPVKVGVQKYEHG

SEQ ID NO: 21896 - protein, 24 aa, Artificial Sequence
  Synthetic polypeptide
PEVRSSRPAWPTWRSGEHPWPRGA

SEQ ID NO: 21897 - protein, 392 aa, Artificial Sequence
  Synthetic polypeptide
SQHFGRSRQADDLRSGVRDQPGQHGEVVNTHGPVEPDKDNIRQEPYTLPQGFTWDALDLGDRGVLKELYTLLNENYVEDDDNMFRFDYSPEFLLWALRPPGWLPQWHCGVRVVSSRKLVGFISAIPANIHIYDTEKKMVEINFLCVHKKLRSKRVAPVLIREITRRVHLEGIFQAVYTAGVVLPKPVGTCRYWHRSLNPRKLIEVKFSHLSRNMTMQRTMKLYRLPETPKTAGLRPMETKDIPVVHQLLTRYLKQFHLTPVMSQEEVEHWFYPQENIIDTFVVENANGEVTDFLSFYTLPSTIMNHPTHKSLKAAYSFYNVHTQTPLLDLMSDALVLAKMKGFDVFNALDLMENKTFLEKLKFGIGDGNLQYYLYNWKCPSMGAEKVGLVLQ

SEQ ID NO: 21898 - protein, 14 aa, Artificial Sequence
  Synthetic polypeptide
GQEFETSLANMAKW

SEQ ID NO: 21899 - protein, 48 aa, Artificial Sequence
  Synthetic polypeptide
SQHFGRSRQADDLRSGVRDQPGQHGEVVNTHGPVEPDKDNIRQEPYTL

SEQ ID NO: 21900 - protein, 63 aa, Artificial Sequence
  Synthetic polypeptide
PTAGGRPTGARVREHREAAPGHFTGRRCSPPSQPGVGDAHGRGHRAPLLLQPRHGSYHLGVAL

SEQ ID NO: 21901 - protein, 667 aa, Artificial Sequence
  Synthetic polypeptide
ARWSAAAPSPAGRLYNLLQVDDPPEPVYANIERQPRATSPGAAAAPLPSPVWETHTDAGTGRPYYYNPDTGVTTWESPFEAAEGAASPATSPASVDSHVSLETEWGQYWDEESRRVFFYNPLTGETAWEDEAENEPEEELEMQPGLSPGSPGDPRPPTPETDYPESLTSYPEEDYSPVGSFGEPGPTSPLTTPPGWSCHVSQDKQMLYTNHFTQEQWVRLEDPHGKPYFYNPEDSSVRWELPQVPVPAPRSIHKSSQDGDTPAQASPPEEKTKTLDKAGVLHRTKTADKGKRLRKKHWSASWTVLEGGVLTFFKDSKTSAAGGLRQPSKFSTPEYTVELRGATLSWAPKDKSSRKNVLELRSRDGSEYLIQHDSEAIISTWHKAIAQGIQELSAELPPEESESSRVDFGSSERLGSWQEKEEDARPNAAAPALGPVGLESDLSKVRHKLRKFLQRRPTLQSLREKGYIKDQVFGCALAALCERERSRVPRFVQQCIRAVEARGLDIDGLYRISGNLATIQKLRYKVDHDERLDLDDGRWEDVHVITGALKLFFRELPEPLFPFSHFRQFIAAIKLQDQARRSRCVRDLVRSLPAPNHDTLRMLFQHLCRVIEHGEQNRMSVQSVAIVFGPTLLRPEVEETSMPMTMVFQNQVVELILQQCADIFPPH

SEQ ID NO: 21902 - protein, 41 aa, Artificial Sequence
  Synthetic polypeptide
IFMFRCRNANELDGRLLPQALLGGYITYCRWTTHRSPCTRT

SEQ ID NO: 21903 - protein, 689 aa, Artificial Sequence
  Synthetic polypeptide
ARWSAAAPSPAGRLYNLLQVDDPPEPVYANIERQPRATSPGAAAAPLPSPVWETHTDAGTGRPYYYNPDTGVTTWESPFEAAEGAASPATSPASVDSHVSLETEWGQYWDEESRRVFFYNPLTGETAWEDEAENEPEEELEMQPGLSPGSPGDPRPPTPETDYPESLTSYPEEDYSPVGSFGEPGPTSPLTTPPGWSCHVSQDKQMLYTNHFTQEQWVRLEDPHGKPYFYNPEDSSVRWELPQVPVPAPRSIHKSSQDGDTPAQASPPEEKVPAELDEVGSWEEVSPATAAVRTKTLDKAGVLHRTKTADKGKRLRKKHWSASWTVLEGGVLTFFKDSKTSAAGGLRQPSKFSTPEYTVELRGATLSWAPKDKSSRKNVLELRSRDGSEYLIQHDSEAIISTWHKAIAQGIQELSAELPPEESESSRVDFGSSERLGSWQEKEEDARPNAAAPALGPVGLESDLSKVRHKLRKFLQRRPTLQSLREKGYIKDQVFGCALAALCERERSRVPRFVQQCIRAVEARGLDIDGLYRISGNLATIQKLRYKVDHDERLDLDDGRWEDVHVITGALKLFFRELPEPLFPFSHFRQFIAAIKLQDQARRSRCVRDLVRSLPAPNHDTLRMLFQHLCRVIEHGEQNRMSVQSVAIVFGPTLLRPEVEETSMPMTMVFQNQVVELILQQCADIFPPH

SEQ ID NO: 21904 - protein, 662 aa, Artificial Sequence
  Synthetic polypeptide
ARWSAAAPSPAGRLYNLLQVDDPPEPVYANIERQPRATSPGAAAAPLPSPVWETHTDAGTGRPYYYNPDTGVTTWESPFEAAEGAASPATSPASVDSHVSLETEWGQYWDEESRRVFFYNPLTGETAWEDEAENEPEEELEMQPGLSPGSPGDPRPPTPETDYPESLTSYPEEDYSPVGSFGEPGPTSPLTTPPGWSCHVSQDKQMLYTNHFTQEQVPVPAPRSIHKSSQDGDTPAQASPPEEKVPAELDEVGSWEEVSPATAAVRTKTLDKAGVLHRTKTADKGKRLRKKHWSASWTVLEGGVLTFFKDSKTSAAGGLRQPSKFSTPEYTVELRGATLSWAPKDKSSRKNVLELRSRDGSEYLIQHDSEAIISTWHKAIAQGIQELSAELPPEESESSRVDFGSSERLGSWQEKEEDARPNAAAPALGPVGLESDLSKVRHKLRKFLQRRPTLQSLREKGYIKDQVFGCALAALCERERSRVPRFVQQCIRAVEARGLDIDGLYRISGNLATIQKLRYKVDHDERLDLDDGRWEDVHVITGALKLFFRELPEPLFPFSHFRQFIAAIKLQDQARRSRCVRDLVRSLPAPNHDTLRMLFQHLCRVIEHGEQNRMSVQSVAIVFGPTLLRPEVEETSMPMTMVFQNQVVELILQQCADIFPPH

SEQ ID NO: 21905 - protein, 214 aa, Artificial Sequence
  Synthetic polypeptide
ARWSAAAPSPAGRLYNLLQVDDPPEPVYANIERQPRATSPGAAAAPLPSPVWETHTDAGTGRPYYYNPDTGVTTWESPFEAAEGAASPATSPASVDSHPPTPETDYPESLTSYPEEDYSPVGSFGEPGPTSPLTTPPGWSCHVSQDKQMLYTNHFTQEQWVRLEDPHGKPYFYNPEDSSVRWELPQVPVPAPRSIHKSSQDGDTPAQASPPEEK

SEQ ID NO: 21906 - protein, 139 aa, Artificial Sequence
  Synthetic polypeptide
MNVCPSAKPGATGGQRPYPVHCCPQHCPWLNHRNYLLESPHRFSVADLQQIADGVYEGFLKALIEFASQHVYHCDLCTQRGFICQICQHHDIIFPFEFDTTVRCAECKTVFHQSCQAVVKKGCPRCARRRKYQEQNIFA

SEQ ID NO: 21907 - protein, 61 aa, Artificial Sequence
  Synthetic polypeptide
MSVPRPNQGPQEGRGHILCIAVPSTVPGSTTGIISWNLRIGSVLLTSNRSQTGCMKDSSRP

SEQ ID NO: 21908 - protein, 40 aa, Artificial Sequence
  Synthetic polypeptide
ECLSLGQTRGHRRAEAISCALLSPALSLAQPQELSLGISA

SEQ ID NO: 21909 - protein, 120 aa, Artificial Sequence
  Synthetic polypeptide
MNVCPSAKPGATGGQRPYPVHCCPQHCPWLNHRNYLLESPHRFSVADLQQHVYHCDLCTQRGFICQICQHHDIIFPFEFDTTVRCAECKTVFHQSCQAVVKKGCPRCARRRKYQEQNIFA

SEQ ID NO: 21910 - protein, 98 aa, Artificial Sequence
  Synthetic polypeptide
MSVPRPNQGPQEGRGHILCIAVPSTVPGSTTGIISWNLRIGSVLLTSNSMSTTATCAPSAASSARSASTTTSSSPLSLTPQSGVPSARPSSTRAARLW

SEQ ID NO: 21911 - protein, 61 aa, Artificial Sequence
  Synthetic polypeptide
MNVCPSAKPGATGGQRPYPVHCCPQHCPWLNHRNYLLESPHRFSVADLQQVRVSCFPRPDL

SEQ ID NO: 21912 - protein, 49 aa, Artificial Sequence
  Synthetic polypeptide
MSVPRPNQGPQEGRGHILCIAVPSTVPGSTTGIISWNLRIGSVLLTSNR

SEQ ID NO: 21913 - protein, 191 aa, Artificial Sequence
  Synthetic polypeptide
LGVVAHVCNPANPEAEICRQALKFLTQIRAQPLINLQMVNASLYEHVERMHLIGRRREQLKLLGDYLGLCRSGALKELSKRLNHRNYLLESPHRFSVADLQQIADGVYEGFLKALIEFASQHVYHCDLCTQRGFICQICQHHDIIFPFEFDTTVRCAECKTVFHQSCQAVVKKGCPRCARRRKYQEQNIFA

SEQ ID NO: 21914 - protein, 40 aa, Artificial Sequence
  Synthetic polypeptide
DQPDQRGETLSLLKNTKISWAWWRMFVIQLIRRLRSAGRP

SEQ ID NO: 21915 - protein, 164 aa, Artificial Sequence
  Synthetic polypeptide
GWTRWLMSVILALWEVKAGLANMVFLGLGELLLSCNWAVVADILLSVVVPRCRGTAEALQITVGHILGDAGSPYLTGLISSVLRARRPDSYLQRFRSLQQSFLCCAFVIALGGGCFLLTALYLERDETRAWQPVTGTPDSNDVDSNDLERQGLLSGAGASTEEP

SEQ ID NO: 21916 - protein, 106 aa, Artificial Sequence
  Synthetic polypeptide
HFGRSRPAWPIWCSWALGSCFCPATGQWLPTSCCLWWCPDAGGRQRHFRSRWATSWETLAAPISQDLSLVSCGPGALTPICSASAACSRASCAAPLSSPWGAAASC

SEQ ID NO: 21917 - protein, 79 aa, Artificial Sequence
  Synthetic polypeptide
MDAVAHVCNPSTLGGQGRPGQYGVPGPWGAASVLQLGSGCRHPAVCGGAQMPGDGRGTSDHGGPHPGRRWQPLSHRTYL

SEQ ID NO: 21918 - protein, 34 aa, Artificial Sequence
  Synthetic polypeptide
DQAQWLTPVILALLEAVAGSSSEMFPQACISRAC

SEQ ID NO: 21919 - protein, 34 aa, Artificial Sequence
  Synthetic polypeptide
SWHFWRPWRVHHLRCSHKPAFPEHAEISVAEQAF

SEQ ID NO: 21920 - protein, 677 aa, Artificial Sequence
  Synthetic polypeptide
ARRRRSEWKWAADRAAIVSRWNWLQAHVSDLEYRIRQQTDIYKQIRANKGLIVLGEVPPPEHTTDLFLPLSSEVKTDHGTDKLIESVSQPLENHGARIIGHISESLSTKSCGALRPVNGVINTLQPVLADHIPGDSSDAEEQLHKKQRLNLVSSSSDGTCVAARTRPVLSCKKRRLVRPNSIVPLSKKVHRNSTIRPGCDVNPSCALCGSGSINTMPPEIHYEAPLLERLSQLDSCVHPVLAFPDDVPTSLHFQSMLKSQWQNKPFDKIKPPKKLSLKHRAPMPGSLPDSARKDRHKLVSSFLTTAKLSHHQTRPDRTHRQHLDDVGAVPMVERVTAPKAERLLNPPPPVHDPNHSKMRLRDHSSERSEVLKHHTDMSSSSYLAATHHPPHSPLVRQLSTSSDSPAPASSSSQVTASTSQQPVRRRRGESSFDINNIVIPMSVAATTRVEKLQYKEILTPSWREVDLQSLKGSPDEENEEIEDLSDAAFAALHAKCEEMERARWLWTTSVPPQRRGSRSYRSSDGRTTPQLGSANPSTPQPASPDVSSSHSLSEYSHGQSPRSPISPELHSAPLTPVARDTPRHLASEDTRCSTPELGLDEQSVQPWERRTFPLAHSPQAECEDQLDAQERAARCTRRTSGSKTGRETEAAPTSPPIVPLKSRHLVAAATAQRPTHR

SEQ ID NO: 21921 - protein, 50 aa, Artificial Sequence
  Synthetic polypeptide
PGDAGQNGNGLQTGQLLSAAGTGFRLMFLTWNIEFVSKQTFTNRYVLIRG

SEQ ID NO: 21922 - protein, 28 aa, Artificial Sequence
  Synthetic polypeptide
QETQVRMEMGCRPGSYCQPLELASGSCF

SEQ ID NO: 21923 - protein, 613 aa, Artificial Sequence
  Synthetic polypeptide
ARRRRSEWKWAADRAAIVSRWNWLQAHVSDLEYRIRQQTDIYKQIRANKGLIVLGEVPPPEHTTDLFLPLSSEVKTDHGTDKLIESVSQPLENHGARIIGHISESLSTKSCGALRPVNGVINTLQPVLADHIPGDSSDAEEQLHKKQRLNLVSSSSDGTCVAARTRPVLSCKKRRLVRPNSIVPLSKKVHRNSTIRPGCDVNPSCALCGSGSINTMPPEIHYEAPLLERLSQLDSCVHPVLAFPDDVPTSLHFQSMLKSQWQNKPFDKIKPPKKLSLKHRAPMPGSLPDSARKDRHKLVSSFLTTAMLKHHTDMSSSSYLAATHHPPHSPLVRQLSTSSDSPAPASSSSQVTASTSQPVRRRRGESSFDINNIVIPMSVAATTRVEKLQYKEILTPSWREVDLQSLKGSPDEENEEIEDLSDAAFAALHAKCEEMERARWLWTTSVPPQRRGSRSYRSSDGRTTPQLGSANPSTPQPASPDVSSSHSLSEYSHGQSPRSPISPELHSAPLTPVARDTPRHLASEDTRCSTPELGLDEQSVQPWERRTFPLAHSPQAECEDQLDAQERAARCTRRTSGSKTGRETEAAPTSPPIVPLKSRHLVAAATAQRPTHR

SEQ ID NO: 21924 - protein, 8 aa, Artificial Sequence
  Synthetic polypeptide
QYSRLAWC

SEQ ID NO: 21925 - protein, 50 aa, Artificial Sequence
  Synthetic polypeptide
TSLVLTVVCTSSSLMKLMPSASREGAWLVAREFMTLLSTSCCPKLMAWSS

SEQ ID NO: 21926 - protein, 28 aa, Artificial Sequence
  Synthetic polypeptide
LQENKLRAPTDATLWPLAQTKKIMQVTL

SEQ ID NO: 21927 - protein, 49 aa, Artificial Sequence
  Synthetic polypeptide
SVTVSHHPQMGPYSCRKTSSGLPLMLHYGLWHKPRRLCKLHYERYHQMG

SEQ ID NO: 21928 - protein, 258 aa, Artificial Sequence
  Synthetic polypeptide
CYIMAFGTNQEDYASYIMNGIIKWGDPVTRVLDDGELLVQQTKNSDRTPLVSVLLEGPPHSGKTALAAKIAEESNFPFIKICSPDKMIGFSETAKCQAMKKIFDDAYKSQLSCVVVDDIERLLDYVPIGPRFSNLVLQALLVLLKKAPPQGRKLLIIGTTSRKDVLQEMEMLNAFSTTIHVPNIATGEQLLEALELLGNFKDKERTTIAQQVKGKKVWIGIKKLLMLIEMSLQMDPEYRVRKFLALLREEGASPLDFD

SEQ ID NO: 21929 - protein, 252 aa, Artificial Sequence
  Synthetic polypeptide
CYIMAFGTNQEDYASYIMNGIIKWGDPVTRVLDDGELLVQQTKNSDRTPLVSVLLEGPPHSGKTALAAKIAEESNFPFIKICSPDKMIGFSETAKCQAMKKIFDDAYKSQLSCVVVDDIERLLDYVPIGPRFSNLVLQALLVLLKKAPPQGRKLLIIGTTSRKDVLQEMEMLNAFSTTIHVPNIATGEQLLEALELLGNFKDKERTTIAQQVKGKKVWIGIKKLLMLIEMSLQMDPEYRVRKFLALLREEGA

SEQ ID NO: 21930 - protein, 44 aa, Artificial Sequence
  Synthetic polypeptide
GLSSPGNLALNSASTPLLCLYDLGLSWTTCTSNASATGCRAAVR

SEQ ID NO: 21931 - protein, 161 aa, Artificial Sequence
  Synthetic polypeptide
SRTILDHMHLKCKCHGLSGSCEVKTCWWAQPDFRAIGDFLKDKYDSASEMVVEKHRESRGWVETLRAKYSLFKPPTERDLVYYENSPNFCEPNPETGSFGTRDRTCNVTSHGIDGCDLLCCGRGHNTRTEKRKEKCHCIFHWCCYVSCQECIRIYDVHTCK

SEQ ID NO: 21932 - protein, 72 aa, Artificial Sequence
  Synthetic polypeptide
ASETTNPPEGRNSEHISTSERTDSRRTTLRAVTLTARFRGFILESYQLPSLHNSSRNYAGSLAQMMRHLLEA

SEQ ID NO: 21933 - protein, 32 aa, Artificial Sequence
  Synthetic polypeptide
HSPRGSAASFLKAISFPVCTIHQEIMRGHWHK

SEQ ID NO: 21934 - protein, 30 aa, Artificial Sequence
  Synthetic polypeptide
SQHLGRPRQADHLRSGVQEQPGQHVLGFCH

SEQ ID NO: 21935 - protein, 32 aa, Artificial Sequence
  Synthetic polypeptide
GQEFKNSLANMFWDFAIRNPKSWRWILFTKLH

SEQ ID NO: 21936 - protein, 576 aa, Artificial Sequence
  Synthetic polypeptide
QVRWLMPVIPAPWEAKAGRSPEVRSSRTAWPTCFGILPLETPSPGDGSYLQNYTNTPPVIDVPSTGAPSKKSVARIGQTGTKSVFSQSGNSREVTPILAQTQSSGPQTSTTPQVLSPTITSPPNALPRRSSRLFTSDSSTTKENSKKLKMKFPPKIPNRKTKSKTNKGGITQPNINDSLEITKLDSSIISEGKISTITPQIQAFNLQKAAAEGLMSLLREMGKGYLALCSYNCKEAINILSHLPSHHYNTGWVLCQIGRAYFELSEYMQAERIFSEVRRIENYRVEGMEIYSTTLWHLQKDVALSVLSKDLTDMDKNSPEAWCAAGNCFSLQREHDIAIKFFQRAIQVDPNYAYAYTLLGHEFVLTEELDKALACFRNAIRVNPRHYNAWYGLGMIYYKQEKFSLAEMHFQKALDINPQSSVLLCHIGVVQHALKKSEKALDTLNKAIVIDPKNPLCKFHRASVLFANEKYKSALQELEELKQIVPKESLVYFLIGKVYKKLGQTHLALMNFSWAMDLDPKGANNQIKEAIDKRYLPDDEEPITQEEQIMGTDESQESSMTDADDTQLHAAESDEF

SEQ ID NO: 21937 - protein, 582 aa, Artificial Sequence
  Synthetic polypeptide
QVRWLMPVIPAPWEAKAGRSPEVRSSRTAWPTCFGILPLETPSPGDGSYLQNYTNTPPVIDVPSTGAPSKKTFRVLQSVARIGQTGTKSVFSQSGNSREVTPILAQTQSSGPQTSTTPQVLSPTITSPPNALPRRSSRLFTSDSSTTKENSKKLKMKFPPKIPNRKTKSKTNKGGITQPNINDSLEITKLDSSIISEGKISTITPQIQAFNLQKAAAEGLMSLLREMGKGYLALCSYNCKEAINILSHLPSHHYNTGWVLCQIGRAYFELSEYMQAERIFSEVRRIENYRVEGMEIYSTTLWHLQKDVALSVLSKDLTDMDKNSPEAWCAAGNCFSLQREHDIAIKFFQRAIQVDPNYAYAYTLLGHEFVLTEELDKALACFRNAIRVNPRHYNAWYGLGMIYYKQEKFSLAEMHFQKALDINPQSSVLLCHIGVVQHALKKSEKALDTLNKAIVIDPKNPLCKFHRASVLFANEKYKSALQELEELKQIVPKESLVYFLIGKVYKKLGQTHLALMNFSWAMDLDPKGANNQIKEAIDKRYLPDDEEPITQEEQIMGTDESQESSMTDADDTQLHAAESDEF

SEQ ID NO: 21938 - protein, 575 aa, Artificial Sequence
  Synthetic polypeptide
QVRWLMPVIPAPWEAKAGRSPEVRSSRTAWPTCFGILPLETPSPGDGSYLQNYTNTPPVIDVPSTGAPSKKSVARIGQTGTKSVFSQSGNSREVTPILAQTQSSGPQTSTTPQVLSPTITSPPNALPRRSSRLFTSDSSTTKENSKKLKMKFPPKIPNRKTKSKTNKGGITQPNINDSLEITKLDSSIISEGKISTITPQIQAFNLQKAAAGLMSLLREMGKGYLALCSYNCKEAINILSHLPSHHYNTGWVLCQIGRAYFELSEYMQAERIFSEVRRIENYRVEGMEIYSTTLWHLQKDVALSVLSKDLTDMDKNSPEAWCAAGNCFSLQREHDIAIKFFQRAIQVDPNYAYAYTLLGHEFVLTEELDKALACFRNAIRVNPRHYNAWYGLGMIYYKQEKFSLAEMHFQKALDINPQSSVLLCHIGVVQHALKKSEKALDTLNKAIVIDPKNPLCKFHRASVLFANEKYKSALQELEELKQIVPKESLVYFLIGKVYKKLGQTHLALMNFSWAMDLDPKGANNQIKEAIDKRYLPDDEEPITQEEQIMGTDESQESSMTDADDTQLHAAESDEF

SEQ ID NO: 21939 - protein, 95 aa, Artificial Sequence
  Synthetic polypeptide
QVRWLMPVIPAPWEAKAGRSPEVRSSRTAWPTCFGILPLETPSPGDGSYLQNYTNTPPVIDVPSTGAPSKKVWFRNDLLQARKIQPCRNAFPKSA

SEQ ID NO: 21940 - protein, 17 aa, Artificial Sequence
  Synthetic polypeptide
GQEFKNSLANMFWDFAI

SEQ ID NO: 21941 - protein, 39 aa, Artificial Sequence
  Synthetic polypeptide
QVRWLMPVIPAPWEAKAGRSPEVRSSRTAWPTCFGILPL

SEQ ID NO: 21942 - protein, 840 aa, Artificial Sequence
  Synthetic polypeptide
QLTLEQHRLELCGSIYIQTLFNKIYTECACPSCLSFHLHLLFHLCHPRTARPTLPPPQPTQPEDKEDEGLEDYPLPLTRPNICTTRGVSSCQQCLAVSPMCAWCSDEALPLGSPRCDLKENLLKDNCAPESIEFPVSEARVLEDRPLSDKGSGDSSQVTQVSPQRIALRLRPDDSKNFSIQVRQVEDYPVDIYYLMDLSYSMKDDLWSIQNLGTKLATQMRKLTSNLRIGFGAFVDKPVSPYMYISPPEALENPCYDMKTTCLPMFGYKHVLTLTDQVTRFNEEVKKQSVSRNRDAPEGGFDAIMQATVCDEKIGWRNDASHLLVFTTDAKTHIALDGRLAGIVQPNDGQCHVGSDNHYSASTTMDYPSLGLMTEKLSQKNINLIFAVTENVVNLYQNYSELIPGTTVGVLSMDSSNVLQLIVDAYGKIRSKVELEVRDLPEELSLSFNATCLNNEVIPGLKSCMGLKIGDTVSFSIEAKVRGCPQEKEKSFTIKPVGFKDSLIVQVTFDCDCACQAQAEPNSHRCNNGNGTFECGVCRCGPGWLGSQCECSEEDYRPSQQDECSPREGQPVCSQRGECLCGQCVCHSSDFGKITGKYCECDDFSCVRYKGEMCSGHGQCSCGDCLCDSDWTGYYCNCTTRTDTCMSSNGLLCSGRGKCECGSCVCIQPGSYGDTCEKCPTCPDACTFKKECVECKKFDRGALHDENTCNRYCRDEIESVKELKDTGKDAVNCTYKNEDDCVVRFQYYEDSSGKSILYVVEEPECPKGPDILVVLLSVMGAILLIGLAALLIWKLLITIHDRKEFAKFEEERARAKWDTANNPLYKEATSTFTNITYRGT

SEQ ID NO: 21943 - protein, 85 aa, Artificial Sequence
  Synthetic polypeptide
PLNNIGLNCVDPFIYRHFSIKFTLNVPVPPASPFTSTSSSTSATLGPQDQPFLLLSLLNLKTRKMKALKIIHFHLLGPTSVPREV

SEQ ID NO: 21944 - protein, 495 aa, Artificial Sequence
  Synthetic polypeptide
QLTLEQHRLELCGSIYIQTLFNKIYTECACPSCLSFHLHLLFHLCHPRTARPTLPPPQPTQPEDKEDEGLEDYPLPLTRPNICTTRGVSSCQQCLAVSPMCAWCSDEALPLGSPRCDLKENLLKDNCAPESIEFPVSEARVLEDRPLSDKGSGDSSQVTQVSPQRIALRLRPDDSKNFSIQVRQVEDYPVDIYYLMDLSYSMKDDLWSIQNLGTKLATQMRKLTSNLRIGFGAFVDKPVSPYMYISPPEALENPCYDMKTTCLPMFGYKHVLTLTDQVTRFNEEVKKQSVSRNRDAPEGGFDAIMQATVCDEKIGWRNDASHLLVFTTDAKTHIALDGRLAGIVQPNDGQCHVGSDNHYSASTTMDYPSLGLMTEKLSQKNINLIFAVTENVVNLYQNYSELIPGTTVGVLSMDSSNVLQLIVDAYGKIRSKVELEVRDLPEELSLSFNATCLNNEVIPGLKSCMGLKIGDTVRWAGQGLCPGASVGTQPPFFLL

SEQ ID NO: 21945 - protein, 850 aa, Artificial Sequence
  Synthetic polypeptide
QLTLEQHRLELCGSIYIQTLFNKIYTECACPSCLSFHLHLLFHLCHPRTARPTLPPPQPTQPEDKEDEGLEDYPLPLTRPNICTTRGVSSCQQCLAVSPMCAWCSDEALPLGSPRCDLKENLLKDNCAPESIEFPVSEARVLEDRPLSDKGSGDSSQVTQVSPQRIALRLRPDDSKNFSIQVRQVEDYPVDIYYLMDLSYSMKDDLWSIQNLGTKLATQMRKLTSNLRIGFGAFVDKPVSPYMYISPPEALENPCYDMKTTCLPMFGYKHVLTLTDQVTRFNEEVKKQSVSRNRDAPEGGFDAIMQATVCDEKIGWRNDASHLLVFTTDAKTHIALDGRLAGIVQPNDGQCHVGSDNHYSASTTMDYPSLGLMTEKLSQKNINLIFAVTENVVNLYQNYSELIPGTTVGVLSMDSSNVLQLIVDAYGKIRSKVELEVRDLPEELSLSFNATCLNNEVIPGLKSCMGLKIGDTVSFSIEAKVRGCPQEKEKSFTIKPVGFKDSLIVQVTFDCDCACQAQAEPNSHRCNNGNGTFECGVCRCGPGWLGSQCECSEEDYRPSQQDECSPREGQPVCSQRGECLCGQCVCHSSDFGKITGKYCECDDFSCVRYKGEMCSGHGQCSCGDCLCDSDWTGYYCNCTTRTDTCMSSNGLLCSGRGKCECGSCVCIQPGSYGDTCEKCPTCPDACTFKKECVECKKFDRGALHDENTCNRYCRDEIESVKELKDTGKDAVNCTYKNEDDCVVRFQYYEDSSGKSILYVVEEPECPKGPDILVVLLSVMGAILLIGLAALLIWKLLITIHDRKEFAKFEEERARAKWDTEILLYYCSFILVHQSLESLRTEFTSKQKDGN

SEQ ID NO: 21946 - protein, 13 aa, Artificial Sequence
  Synthetic polypeptide
GDPPPGNRPSEKR

SEQ ID NO: 21947 - protein, 362 aa, Artificial Sequence
  Synthetic polypeptide
GAPLPGRDPIWEVRSVSARPPRLRSEETLRLATARLRKGDKVQFEEFAKVVRNMRDAARLEELQEVVLAADLLEGDMIAGKNLEDFLRNVGIKSPKEEVEKILQSDFVSEDNMVNIKDCMRALRDTQKFSNYIDFRKEASNLKLPKVNEIKEAANILSHVDNGKIGIPDLEHALKCLNVNLTEEDFNEALNCCNVSDNMEVDLKDFLMKMKESPHFQKSKATQILLATTQILQNDLVDVSDLKTLLMDKDLHTANAILTVMLRHVPEHESGKVSIQEFMTKLSDILTIPKAAGKFYLICTYCPDLERQAVVYMLKTIQDSIVKAQVSKKQYNMNIKQHKISLHNFCLNSKANIAKLNPNSKF

SEQ ID NO: 21948 - protein, 13 aa, Artificial Sequence
  Synthetic polypeptide
EKVTKYNLKNLQK

SEQ ID NO: 21949 - protein, 269 aa, Artificial Sequence
  Synthetic polypeptide
GAPLPGRDPIWEVRSVSARPPRLRSEETLRLATARLRKGDKVQFEEFAKVVRNMRDAARLEELQEVVLAADLLEGDMIAGKNLEDFLRNVGIKSPKEEVEKILQSDFVSEDNMVNIKDCMRALRDTQKFSNYIDFRKEASNLKLPKVNEIKEAANILSHVDNGKIGIPDLEHALKCLNVNLTEEDFNEALNCCNVSDNMEVDLKDFLMKMKESPHFQKSKATQILLATTQILQNDLVDVSDLKTLLMDKDLHTANAILTVMLRHVPEHG

SEQ ID NO: 21950 - protein, 339 aa, Artificial Sequence
  Synthetic polypeptide
EVKSPSTRQSPRLGKGDKVQFEEFAKVVRNMRDAARLEELQEVVLAADLLEGDMIAGKNLEDFLRNVGIKSPKEEVEKILQSDFVSEDNMVNIKDCMRALRDTQKFSNYIDFRKEASNLKLPKVNEIKEAANILSHVDNGKIGIPDLEHALKCLNVNLTEEDFNEALNCCNVSDNMEVDLKDFLMKMKESPHFQKSKATQILLATTQILQNDLVDVSDLKTLLMDKDLHTANAILTVMLRHVPEHESGKVSIQEFMTKLSDILTIPKAAGKFYLICTYCPDLERQAVVYMLKTIQDSIVKAQVSKKQYNMNIKQHKISLHNFCLNSKANIAKLNPNSKF

SEQ ID NO: 21951 - protein, 24 aa, Artificial Sequence
  Synthetic polypeptide
RAPPPGSHPVWEKVTKYNLKNLQK

SEQ ID NO: 21952 - protein, 29 aa, Artificial Sequence
  Synthetic polypeptide
EVRSPSARQLPRLRSEEPLHPAVTPSGKR

SEQ ID NO: 21953 - protein, 246 aa, Artificial Sequence
  Synthetic polypeptide
EVKSPSTRQSPRLGKGDKVQFEEFAKVVRNMRDAARLEELQEVVLAADLLEGDMIAGKNLEDFLRNVGIKSPKEEVEKILQSDFVSEDNMVNIKDCMRALRDTQKFSNYIDFRKEASNLKLPKVNEIKEAANILSHVDNGKIGIPDLEHALKCLNVNLTEEDFNEALNCCNVSDNMEVDLKDFLMKMKESPHFQKSKATQILLATTQILQNDLVDVSDLKTLLMDKDLHTANAILTVMLRHVPEHG

SEQ ID NO: 21954 - protein, 41 aa, Artificial Sequence
  Synthetic polypeptide
EVKSPSTRQSPRLGSEERLHPAATPSGREKVTKYNLKNLQK

SEQ ID NO: 21955 - protein, 28 aa, Artificial Sequence
  Synthetic polypeptide
RAPPPGSHPVWEVRSVSTQQPPHPGGRR

SEQ ID NO: 21956 - protein, 338 aa, Artificial Sequence
  Synthetic polypeptide
GASPPSSHPIREGEGDKVQFEEFAKVVRNMRDAARLEELQEVVLAADLLEGDMIAGKNLEDFLRNVGIKSPKEEVEKILQSDFVSEDNMVNIKDCMRALRDTQKFSNYIDFRKEASNLKLPKVNEIKEAANILSHVDNGKIGIPDLEHALKCLNVNLTEEDFNEALNCCNVSDNMEVDLKDFLMKMKESPHFQKSKATQILLATTQILQNDLVDVSDLKTLLMDKDLHTANAILTVMLRHVPEHESGKVSIQEFMTKLSDILTIPKAAGKFYLICTYCPDLERQAVVYMLKTIQDSIVKAQVSKKQYNMNIKQHKISLHNFCLNSKANIAKLNPNSKF

SEQ ID NO: 21957 - protein, 245 aa, Artificial Sequence
  Synthetic polypeptide
GASPPSSHPIREGEGDKVQFEEFAKVVRNMRDAARLEELQEVVLAADLLEGDMIAGKNLEDFLRNVGIKSPKEEVEKILQSDFVSEDNMVNIKDCMRALRDTQKFSNYIDFRKEASNLKLPKVNEIKEAANILSHVDNGKIGIPDLEHALKCLNVNLTEEDFNEALNCCNVSDNMEVDLKDFLMKMKESPHFQKSKATQILLATTQILQNDLVDVSDLKTLLMDKDLHTANAILTVMLRHVPEHG

SEQ ID NO: 21958 - protein, 151 aa, Artificial Sequence
  Synthetic polypeptide
GWARWLMPVIPALWEAEAGALEVRQATNQIVMNCADIDIITASYAPEGDEEIHATGFNYQNEDEKVTLSFPSTLQTGTGTLKIDFVGELNDKMKGFYRSKYTTPSGEVRYAAVTQFEATDARRAFPCWDEPAIKATFDISLVVPKDRVALS

SEQ ID NO: 21959 - protein, 13 aa, Artificial Sequence
  Synthetic polypeptide
SQHFGRLRRAHLR

SEQ ID NO: 21960 - protein, 856 aa, Artificial Sequence
  Synthetic polypeptide
GWARWLMPVIPALWEAEAGALEVRQATNQIVMNCADIDIITASYAPEGDEEIHATGFNYQNEDEKVTLSFPSTLQTGTGTLKIDFVGELNDKMKGFYRSKYTTPSGEVRYAAVTQFEATDARRAFPCWDEPAIKATFDISLVVPKDRVALSNMNVIDRKPYPDDENLVEVKFARTPVMSTYLVAFVVGEYDFVETRSKDGVCVRVYTPVGKAEQGKFALEVAAKTLPFYKDYFNVPYPLPKIDLIAIADFAAGAMENWGLVTYRETALLIDPKNSCSSSRQWVALVVGHELAHQWFGNLVTMEWWTHLWLNEGFASWIEYLCVDHCFPEYDIWTQFVSADYTRAQELDALDNSHPIEVSVGHPSEVDEIFDAISYSKGASVIRMLHDYIGDKDFKKGMNMYLTKFQQKNAATEDLWESLENASGKPIAAVMNTWTKQMGFPLIYVEAEQVEDDRLLRLSQKKFCAGGSYVGEDCPQWMVPITISTSEDPNQAKLKILMDKPEMNVVLKNVKPDQWVKLNLGTVGFYRTQYSSAMLESLLPGIRDLSLPPVDRLGLQNDLFSLARAGIISTVEVLKVMEAFVNEPNYTVWSDLSCNLGILSTLLSHTDFYEEIQEFVKDVFSPIGERLGWDPKPGEGHLDALLRGLVLGKLGKAGHKATLEEARRRFKDHVEGKQILSADLRSPVYLTVLKHGDGTTLDIMLKLHKQADMQEEKNRIERVLGATLLPDLIQKVLTFALSEEVRPQDTVSVIGGVAGGSKHGRKAAWKFIKDNWEELYNRYQGGFLISRLIKLSVEGFAVDKMAGEVKAFFESHPAPSAERTIQQCCENILLNAAWLKRDAESIHQYLLQRKASPPTV

SEQ ID NO: 21961 - protein, 75 aa, Artificial Sequence
  Synthetic polypeptide
GWARWLMPVIPALWEAEAGALEVRQATNQIVMNCADIDIITASYAPEGDEVSGLQMFRSLITFHLWTAFLLVHLS

SEQ ID NO: 21962 - protein, 119 aa, Artificial Sequence
  Synthetic polypeptide
GWARWLMPVIPALWEAEAGALEVRQATNQIVMNCADIDIITASYAPEGDEEIHATGFNYQNEDEKVTLSFPSTLQTGNNSFQYFVFCLVCHFLEVVTVNILLWFDGLGDLKPSKSVREP

SEQ ID NO: 21963 - protein, 100 aa, Artificial Sequence
  Synthetic polypeptide
GWARWLMPVIPALWEAEAGALEVRQATNQIVMNCADIDIITASYAPEGDEEIHATGFNYQNEDEKVTLSFPSTLQTGTGTLKIDFVGELNDKMKGFYRSY

SEQ ID NO: 21964 - protein, 820 aa, Artificial Sequence
  Synthetic polypeptide
GWARWLMPVIPALWEAEAGALEVRQATNQIVMNCADIDIITASYAPEGDEEIHATGFNYQNEDEKVTLSFPSTLQTGTGTLKIDFVGELNDKMKGFYRSKYTTPSGEVRYAAVTQFENVIDRKPYPDDENLVEVKFARTPVMSTYLVAFVVGEYDFVETRSKDGVCVRVYTPVGKAEQGKFALEVAAKTLPFYKDYFNVPYPLPKIDLIAIADFAAGAMENWGLVTYRETALLIDPKNSCSSSRQWVALVVGHELAHQWFGNLVTMEWWTHLWLNEGFASWIEYLCVDHCFPEYDIWTQFVSADYTRAQELDALDNSHPIEVSVGHPSEVDEIFDAISYSKGASVIRMLHDYIGDKDFKKGMNMYLTKFQQKNAATEDLWESLENASGKPIAAVMNTWTKQMGFPLIYVEAEQVEDDRLLRLSQKKFCAGGSYVGEDCPQWMVPITISTSEDPNQAKLKILMDKPEMNVVLKNVKPDQWVKLNLGTVGFYRTQYSSAMLESLLPGIRDLSLPPVDRLGLQNDLFSLARAGIISTVEVLKVMEAFVNEPNYTVWSDLSCNLGILSTLLSHTDFYEEIQEFVKDVFSPIGERLGWDPKPGEGHLDALLRGLVLGKLGKAGHKATLEEARRRFKDHVEGKQILSADLRSPVYLTVLKHGDGTTLDIMLKLHKQADMQEEKNRIERVLGATLLPDLIQKVLTFALSEEVRPQDTVSVIGGVAGGSKHGRKAAWKFIKDNWEELYNRYQGGFLISRLIKLSVEGFAVDKMAGEVKAFFESHPAPSAERTIQQCCENILLNAAWLKRDAESIHQYLLQRKASPPTV

SEQ ID NO: 21965 - protein, 107 aa, Artificial Sequence
  Synthetic polypeptide
GWARWLMPVIPALWEAEAGALEVRQATNQIVMNCADIDIITASYAPEGDEEIHATGFNYQNEDEKVTLSFPSTLQTGTGTLKIDFVGELNDKMKGFYRINAWLVAWH

SEQ ID NO: 21966 - protein, 3 aa, Artificial Sequence
  Synthetic polypeptide
PTW

SEQ ID NO: 21967 - protein, 28 aa, Artificial Sequence
  Synthetic polypeptide
SQHFGRLRRAHLRSGVRDQPDQHGEAGD

SEQ ID NO: 21968 - protein, 140 aa, Artificial Sequence
  Synthetic polypeptide
GQEFGTSLTNMVRQATNQIVMNCADIDIITASYAPEGDEEIHATGFNYQNEDEKVTLSFPSTLQTGTGTLKIDFVGELNDKMKGFYRSKYTTPSGEVRYAAVTQFEATDARRAFPCWDEPAIKATFDISLVVPKDRVALS

SEQ ID NO: 21969 - protein, 845 aa, Artificial Sequence
  Synthetic polypeptide
GQEFGTSLTNMVRQATNQIVMNCADIDIITASYAPEGDEEIHATGFNYQNEDEKVTLSFPSTLQTGTGTLKIDFVGELNDKMKGFYRSKYTTPSGEVRYAAVTQFEATDARRAFPCWDEPAIKATFDISLVVPKDRVALSNMNVIDRKPYPDDENLVEVKFARTPVMSTYLVAFVVGEYDFVETRSKDGVCVRVYTPVGKAEQGKFALEVAAKTLPFYKDYFNVPYPLPKIDLIAIADFAAGAMENWGLVTYRETALLIDPKNSCSSSRQWVALVVGHELAHQWFGNLVTMEWWTHLWLNEGFASWIEYLCVDHCFPEYDIWTQFVSADYTRAQELDALDNSHPIEVSVGHPSEVDEIFDAISYSKGASVIRMLHDYIGDKDFKKGMNMYLTKFQQKNAATEDLWESLENASGKPIAAVMNTWTKQMGFPLIYVEAEQVEDDRLLRLSQKKFCAGGSYVGEDCPQWMVPITISTSEDPNQAKLKILMDKPEMNVVLKNVKPDQWVKLNLGTVGFYRTQYSSAMLESLLPGIRDLSLPPVDRLGLQNDLFSLARAGIISTVEVLKVMEAFVNEPNYTVWSDLSCNLGILSTLLSHTDFYEEIQEFVKDVFSPIGERLGWDPKPGEGHLDALLRGLVLGKLGKAGHKATLEEARRRFKDHVEGKQILSADLRSPVYLTVLKHGDGTTLDIMLKLHKQADMQEEKNRIERVLGATLLPDLIQKVLTFALSEEVRPQDTVSVIGGVAGGSKHGRKAAWKFIKDNWEELYNRYQGGFLISRLIKLSVEGFAVDKMAGEVKAFFESHPAPSAERTIQQCCENILLNAAWLKRDAESIHQYLLQRKASPPTV

SEQ ID NO: 21970 - protein, 64 aa, Artificial Sequence
  Synthetic polypeptide
GQEFGTSLTNMVRQATNQIVMNCADIDIITASYAPEGDEVSGLQMFRSLITFHLWTAFLLVHLS

SEQ ID NO: 21971 - protein, 108 aa, Artificial Sequence
  Synthetic polypeptide
GQEFGTSLTNMVRQATNQIVMNCADIDIITASYAPEGDEEIHATGFNYQNEDEKVTLSFPSTLQTGNNSFQYFVFCLVCHFLEVVTVNILLWFDGLGDLKPSKSVREP

SEQ ID NO: 21972 - protein, 89 aa, Artificial Sequence
  Synthetic polypeptide
GQEFGTSLTNMVRQATNQIVMNCADIDIITASYAPEGDEEIHATGFNYQNEDEKVTLSFPSTLQTGTGTLKIDFVGELNDKMKGFYRSY

SEQ ID NO: 21973 - protein, 809 aa, Artificial Sequence
  Synthetic polypeptide
GQEFGTSLTNMVRQATNQIVMNCADIDIITASYAPEGDEEIHATGFNYQNEDEKVTLSFPSTLQTGTGTLKIDFVGELNDKMKGFYRSKYTTPSGEVRYAAVTQFENVIDRKPYPDDENLVEVKFARTPVMSTYLVAFVVGEYDFVETRSKDGVCVRVYTPVGKAEQGKFALEVAAKTLPFYKDYFNVPYPLPKIDLIAIADFAAGAMENWGLVTYRETALLIDPKNSCSSSRQWVALVVGHELAHQWFGNLVTMEWWTHLWLNEGFASWIEYLCVDHCFPEYDIWTQFVSADYTRAQELDALDNSHPIEVSVGHPSEVDEIFDAISYSKGASVIRMLHDYIGDKDFKKGMNMYLTKFQQKNAATEDLWESLENASGKPIAAVMNTWTKQMGFPLIYVEAEQVEDDRLLRLSQKKFCAGGSYVGEDCPQWMVPITISTSEDPNQAKLKILMDKPEMNVVLKNVKPDQWVKLNLGTVGFYRTQYSSAMLESLLPGIRDLSLPPVDRLGLQNDLFSLARAGIISTVEVLKVMEAFVNEPNYTVWSDLSCNLGILSTLLSHTDFYEEIQEFVKDVFSPIGERLGWDPKPGEGHLDALLRGLVLGKLGKAGHKATLEEARRRFKDHVEGKQILSADLRSPVYLTVLKHGDGTTLDIMLKLHKQADMQEEKNRIERVLGATLLPDLIQKVLTFALSEEVRPQDTVSVIGGVAGGSKHGRKAAWKFIKDNWEELYNRYQGGFLISRLIKLSVEGFAVDKMAGEVKAFFESHPAPSAERTIQQCCENILLNAAWLKRDAESIHQYLLQRKASPPTV

SEQ ID NO: 21974 - protein, 96 aa, Artificial Sequence
  Synthetic polypeptide
GQEFGTSLTNMVRQATNQIVMNCADIDIITASYAPEGDEEIHATGFNYQNEDEKVTLSFPSTLQTGTGTLKIDFVGELNDKMKGFYRINAWLVAWH

SEQ ID NO: 21975 - protein, 81 aa, Artificial Sequence
  Synthetic polypeptide
DWLWWLTPIIPALWETEARGSLEPRSWRPVWATWRNSMSTKISCTSGCFTESGEDNVLILSVHGDIYGSCSFCNHNRSNEK

SEQ ID NO: 21976 - protein, 678 aa, Artificial Sequence
  Synthetic polypeptide
YQHFGRPRPEDHLSPGVGDQSGQHGETPCPQRLAVRVAALQNLVKIMSLYYQYMETYMGPALFAITIEAMKSDIDEVALQGIEFWSNVCDEEMDLAIEASEAAEQGRPPEHTSKFYAKGALQYLVPILTQTLTKQDENDDDDDWNPCKAAGVCLMLLATCCEDDIVPHVLPFIKEHIKNPDWRYRDAAVMAFGCILEGPEPSQLKPLVIQAMPTLIELMKDPSVVVRDTAAWTVGRICELLPEAAINDVYLAPLLQCLIEGLSAEPRVASNVCWAFSSLAEAAYEAADVADDQEEPATYCLSSSFELIVQKLLETTDRPDGHQNNLRSSAYESLMEIVKNSAKDCYPAVQKTTLVIMERLQQVLQMESHIQSTSDRIQFNDLQSLLCATLQNVLRKVQHQDALQISDVVMASLLRMFQSTAGSGGVQEDALMAVSTLVEVLGGEFLKYMEAFKPFLGIGLKNYAEYQVCLAAVGLVGDLCRALQSNIIPFCDEVMQLLLENLGNENVHRSVKPQILSVFGDIALAIGGEFKKYLEVVLNTLQQASQAQVDKSDYDMVDYLNELRESCLEAYTGIVQGLKGDQENVHPDVMLVQPRVEFILSFIDHIAGDEDHTDGVVACAAGLIGDLCTAFGKDVLKLVEARPMIHELLTEGRRSKTNKAKTLATWATKELRKLKNQA

SEQ ID NO: 21977 - protein, 76 aa, Artificial Sequence
  Synthetic polypeptide
DWLWWLTPIIPALWETEARGSLEPRSWRPVWATWRNSMSTKISCTSGCFTESGEDNVLILSVHGDIYGSCSFCRRK

SEQ ID NO: 21978 - protein, 607 aa, Artificial Sequence
  Synthetic polypeptide
YQHFGRPRPEDHLSPGVGDQSGQHGETPCPQRLAVRVAALQNLVKIMSLYYQYMETYMGPALFADENDDDDDWNPCKAAGVCLMLLATCCEDDIVPHVLPFIKEHIKNPDWRYRDAAVMAFGCILEGPEPSQLKPLVIQAMPTLIELMKDPSVVVRDTAAWTVGRICELLPEAAINDVYLAPLLQCLIEGLSAEPRVASNVCWAFSSLAEAAYEAADVADDQEEPATYCLSSSFELIVQKLLETTDRPDGHQNNLRSSAYESLMEIVKNSAKDCYPAVQKTTLVIMERLQQVLQMESHIQSTSDRIQFNDLQSLLCATLQNVLRKVQHQDALQISDVVMASLLRMFQSTAGSGGVQEDALMAVSTLVEVLGGEFLKYMEAFKPFLGIGLKNYAEYQVCLAAVGLVGDLCRALQSNIIPFCDEVMQLLLENLGNENVHRSVKPQILSVFGDIALAIGGEFKKYLEVVLNTLQQASQAQVDKSDYDMVDYLNELRESCLEAYTGIVQGLKGDQENVHPDVMLVQPRVEFILSFIDHIAGDEDHTDGVVACAAGLIGDLCTAFGKDVLKLVEARPMIHELLTEGRRSKTNKAKTLATWATKELRKLKNQA

SEQ ID NO: 21979 - protein, 647 aa, Artificial Sequence
  Synthetic polypeptide
VAEVRVAALQNLVKIMSLYYQYMETYMGPALFAITIEAMKSDIDEVALQGIEFWSNVCDEEMDLAIEASEAAEQGRPPEHTSKFYAKGALQYLVPILTQTLTKQDENDDDDDWNPCKAAGVCLMLLATCCEDDIVPHVLPFIKEHIKNPDWRYRDAAVMAFGCILEGPEPSQLKPLVIQAMPTLIELMKDPSVVVRDTAAWTVGRICELLPEAAINDVYLAPLLQCLIEGLSAEPRVASNVCWAFSSLAEAAYEAADVADDQEEPATYCLSSSFELIVQKLLETTDRPDGHQNNLRSSAYESLMEIVKNSAKDCYPAVQKTTLVIMERLQQVLQMESHIQSTSDRIQFNDLQSLLCATLQNVLRKVQHQDALQISDVVMASLLRMFQSTAGSGGVQEDALMAVSTLVEVLGGEFLKYMEAFKPFLGIGLKNYAEYQVCLAAVGLVGDLCRALQSNIIPFCDEVMQLLLENLGNENVHRSVKPQILSVFGDIALAIGGEFKKYLEVVLNTLQQASQAQVDKSDYDMVDYLNELRESCLEAYTGIVQGLKGDQENVHPDVMLVQPRVEFILSFIDHIAGDEDHTDGVVACAAGLIGDLCTAFGKDVLKLVEARPMIHELLTEGRRSKTNKAKTLATWATKELRKLKNQA

SEQ ID NO: 21980 - protein, 15 aa, Artificial Sequence
  Synthetic polypeptide
HFRWPRYEWLLYRIW

SEQ ID NO: 21981 - protein, 54 aa, Artificial Sequence
  Synthetic polypeptide
PGAVAHTFNPSTLGGRGTSGCFTESGEDNVLILSVHGDIYGSCSFCNHNRSNEK

SEQ ID NO: 21982 - protein, 576 aa, Artificial Sequence
  Synthetic polypeptide
VAEVRVAALQNLVKIMSLYYQYMETYMGPALFADENDDDDDWNPCKAAGVCLMLLATCCEDDIVPHVLPFIKEHIKNPDWRYRDAAVMAFGCILEGPEPSQLKPLVIQAMPTLIELMKDPSVVVRDTAAWTVGRICELLPEAAINDVYLAPLLQCLIEGLSAEPRVASNVCWAFSSLAEAAYEAADVADDQEEPATYCLSSSFELIVQKLLETTDRPDGHQNNLRSSAYESLMEIVKNSAKDCYPAVQKTTLVIMERLQQVLQMESHIQSTSDRIQFNDLQSLLCATLQNVLRKVQHQDALQISDVVMASLLRMFQSTAGSGGVQEDALMAVSTLVEVLGGEFLKYMEAFKPFLGIGLKNYAEYQVCLAAVGLVGDLCRALQSNIIPFCDEVMQLLLENLGNENVHRSVKPQILSVFGDIALAIGGEFKKYLEVVLNTLQQASQAQVDKSDYDMVDYLNELRESCLEAYTGIVQGLKGDQENVHPDVMLVQPRVEFILSFIDHIAGDEDHTDGVVACAAGLIGDLCTAFGKDVLKLVEARPMIHELLTEGRRSKTNKAKTLATWATKELRKLKNQA

SEQ ID NO: 21983 - protein, 49 aa, Artificial Sequence
  Synthetic polypeptide
PGAVAHTFNPSTLGGRGTSGCFTESGEDNVLILSVHGDIYGSCSFCRRK

SEQ ID NO: 21984 - protein, 787 aa, Artificial Sequence
  Synthetic polypeptide
MCDLGQVTSLGHSFLTSNGRAPSPRCRAVMITKGKLHGSIDVRLSVMSINKKAQRIDLDTEDNIYHLKIKSQDLFQSWVAQLRAHRLAHRLDMPRGSLPSTAHRKVPGAQLPTAATASALPGLGPREKVSSWLRDSDGLDRCSHELSECQGKLQELHRLLQSLESLHRIPSAPVIPTHQASVTTERPKKGKRTSRMWCTQSFAKDDTIGRVGRLHGSVPNLSRYLESRDSSGTRGLPPTDYAHLQRSFWALAQKVHSSLSSVLAALTMERDQLRDMHQGSELSRMGVSEASTGQRRLHSLSTSSDTTADSFSSLNPEEQEALYMKGRELTPQLSQTSILSLADSHTEFFDACEVLLSASSSENEGSEEEESCTSEITTSLSEEMLDLRGAERCQKGGCVPGRPMGPPRRRCLPAASGPGADVSLWNILRNNIGKDLSKVSMPVQLNEPLNTLQRLCEELEYSSLLDQASRIADPCERMVYIAAFAVSAYSSTYHRAGCKPFNPVLGETYECERPDRGFRFISEQVSHHPPISACHAESENFAFWQDMKWKNKFWGKSLEIVPVGTVNVSLPRFGDHFEWNKVTSCIHNVLSGQRWIEHYGEVLIRNTQDSSCHCKITFCKAKYWSSNVHEVQGAVLSRSGRVLHRLFGKWHEGLYRGPTPGGQCIWKPNSMPPDHERNFGFTQFALELNELTAELKRSLPSTDTRLRPDQRYLEEGNIQAAEAQKRRIEQLQRDRRKVMEENNIVHQARFFRRQTDSSGKEWWVTNNTYWRLRAEPGYGNMDGAVLW

SEQ ID NO: 21985 - protein, 38 aa, Artificial Sequence
  Synthetic polypeptide
WESTIPQVQSCHDHQGEAPWLHRCPAVGHVHQQKGPAH

SEQ ID NO: 21986 - protein, 365 aa, Artificial Sequence
  Synthetic polypeptide
MCDLGQVTSLGHSFLTSNGRAPSPRCRAVMITKGKLHGSIDVRLSVMSINKKAQRIDLDTEDNIYHLKIKSQDLFQSWVAQLRAHRLAHRLDMPRGSLPSTAHRKVPGAQLPTAATASALPGLGPREKVSSWLRDSDGLDRCSHELSECQGKLQELHRLLQSLESLHRIPSAPVIPTHQASVTTERPKKGKRTSRMWCTQSFAKDDTIGRVGRLHGSVPNLSRYLESRDSSGTRGLPPTDYAHLQRSFWALAQKVHSSLSSVLAALTMERDQLRDMHQGSELSRMGVSEASTGQRRLHSLSTSSDTTADSFSSLNPEEQEALYMKGRELTPQLSQTSILSLADSHTEFFDACEVLLSASSSENEG

SEQ ID NO: 21987 - protein, 44 aa, Artificial Sequence
  Synthetic polypeptide
GWARWLTLVIPALWEAEAEGTPEAGCLPSRLSAMAPRLLPATVV

SEQ ID NO: 21988 - protein, 47 aa, Artificial Sequence
  Synthetic polypeptide
SQHFGRLRRREHLRPAAYPPDCPLWLQGCYPPPSCDALSAAEADGCD

SEQ ID NO: 21989 - protein, 85 aa, Artificial Sequence
  Synthetic polypeptide
PQLDRWPPYPVQFLVTRLVITATTSRCCLSPAFLLPGPLLAQTFALCLHLNVPAAYPPDCPLWLQGCYPPPSCDALSAAEADGCD

SEQ ID NO: 21990 - protein, 276 aa, Artificial Sequence
  Synthetic polypeptide
SQQQRPDVVCLQRFFCLDHSSPRPLHYVSILMCRLPTLQTVRYGSKAVTRHRRVMHFQRQKLMAVTEYIPPKPAIHPSCLPSPPSPPQEEIGLIRLLRREIAAVFQDNRMIAVCQNVALSAEDKLLMRHQLRKHKILMKVFPNQVLKPFLEDSKYQNLLPLFVGHNMLLVSEEPKVKEMVRILRTVPFLPLLGGCIDDTILSRQGFINYSKLPSLPLVQGELVGGLTCLTAQTHSLLQHQPLQLTTLLDQYIREQREKDSVMSANGKPDPDTVPDS

SEQ ID NO: 21991 - protein, 22 aa, Artificial Sequence
  Synthetic polypeptide
CAGCLPSRLSAMAPRLLPATVV

SEQ ID NO: 21992 - protein, 115 aa, Artificial Sequence
  Synthetic polypeptide
RNGDGKPSARMLLLKGFGKDGFRFFTNFESRKGKELDSNPFASLVFYWEPLNRQVRVEGPVKKLPEEEAECYFHSRPKSSQIGAVVSHQSSVIPDREYLRKKNEELEQLYQDQEV

SEQ ID NO: 21993 - protein, 13 aa, Artificial Sequence
  Synthetic polypeptide
VMEMENPLLACCC

SEQ ID NO: 21994 - protein, 24 aa, Artificial Sequence
  Synthetic polypeptide
WRWKTLCSHVAAEGLRERWLPLLH

SEQ ID NO: 21995 - protein, 158 aa, Artificial Sequence
  Synthetic polypeptide
RNGDGKPSARMLLLKGFGKDGFRFFTNFESRKGKELVRVEGPVKKLPEEEAECYFHSRPKSSQIGAVVSHQSSVIPDREYLRKKNEELEQLYQDQEVPKPKSWGGYVLYPQVMEFWQGQTNRLHDRIVFRRGLPTGDSPLGPMTHRGEEDWLYERLAP

SEQ ID NO: 21996 - protein, 133 aa, Artificial Sequence
  Synthetic polypeptide
RNGDGKPSARMLLLKGFGKDGFRFFTNFESRKGKELDSNPFASLVFYWEPLNRQYLRKKNEELEQLYQDQEVPKPKSWGGYVLYPQVMEFWQGQTNRLHDRIVFRRGLPTGDSPLGPMTHRGEEDWLYERLAP

SEQ ID NO: 21997 - protein, 176 aa, Artificial Sequence
  Synthetic polypeptide
RNGDGKPSARMLLLKGFGKDGFRFFTNFESRKGKELDSNPFASLVFYWEPLNRQVRVEGPVKKLPEEEAECYFHSRPKSSQIGAVVSHQSSVIPDREYLRKKNEELEQLYQDQEVPKPKSWGGYVLYPQVMEFWQGQTNRLHDRIVFRRGLPTGDSPLGPMTHRGEEDWLYERLAP

SEQ ID NO: 21998 - protein, 26 aa, Artificial Sequence
  Synthetic polypeptide
RNGDGKPSARMLLLKGFGKDGFRFFT

SEQ ID NO: 21999 - protein, 408 aa, Artificial Sequence
  Synthetic polypeptide
SWLSCFLAVLLWTRNLGELIDRFVADFKAQGPPKPNTDEGGAVLPSCADLFVYYKKCMVQCSQLSTGEPMIALTTIFQKYLREYAWKILSGNLPKTTTSSGGLTISSLLKEKEGSEVAKFTLEELCLICNILSTAEYCLATTQQLEEKLKEKVDVSLIERINLTGEMDTFSTVISSSIQLLVQDLDAACDPALTAMSKMQWQNVEHVGDQSPYVTSVILHIKQNVPIIRDNLASTRKYFTQFCVKFANSFIPKFITHLFKCKPISMVGAEQLLLDTHSLKMVLLDLPSISSQVVRKAPASYTKIVVKGMTRAEMILKVVMAPHEPLVVFVDNYIKLLTDCNTETFQKILDMKGLKRSEQSSMLELLRQRLPAPPSGAESSGSLSLTAPTPEQESSRIRKLEKLIKKRL

SEQ ID NO: 22000 - protein, 28 aa, Artificial Sequence
  Synthetic polypeptide
SLEPGCLVFNRGSPVFLLYYSGQGTSES

SEQ ID NO: 22001 - protein, 27 aa, Artificial Sequence
  Synthetic polypeptide
FLIVALLFSCCITLDKEPRRADRSVCG

SEQ ID NO: 22002 - protein, 275 aa, Artificial Sequence
  Synthetic polypeptide
SWLSCFLAVLLWTRNLGELIDRFVADFKAQGPPKPNTDEGGAVLPSCADLFVYYKKCMVQCSQLSTGEPMIALTTIFQKYLREYAWKILSGNLPKTTTSSGGLTISSLLKEKEGSEVAKFTLEELCLICNILSTAEYCLATTQQLEEKLKEKVDVSLIERINLTGEMDTFSTVISSSIQLLVQDLDAACDPALTAMSKMQWQNVEHVGDQSPYVTSVILHIKQNVPIIRDNLASTRKYFTQFCVKFANSFIPKFITHLFKCKPISMVGAEQVRWT

SEQ ID NO: 22003 - protein, 171 aa, Artificial Sequence
  Synthetic polypeptide
SWLSCFLAVLLWTRNLGELIDRFVADFKAQGPPKPNTDEGGAVLPSCADLFVYYKKCMVQCSQLSTGEPMIALTTIFQKYLREYAWKILSGNLPKTTTSSGGLTISSLLKEKEGSEVAKFTLEELCLICNILSTAEYCLATTQQLEEKLKEKVDRHLQQYSAAGSGSGCCL

SEQ ID NO: 22004 - protein, 85 aa, Artificial Sequence
  Synthetic polypeptide
VGTDRKRGRQTYTRYQTLELEKEFHYNRYLTRRRRIEIAHTLCLTERQIKIWFQNRRMKWKKENKTAGPGTTGQDRAEAEEEEEE

SEQ ID NO: 22005 - protein, 29 aa, Artificial Sequence
  Synthetic polypeptide
MELTANEAARPTPATRPWSWRKNFTTIAT

SEQ ID NO: 22006 - protein, 34 aa, Artificial Sequence
  Synthetic polypeptide
DHAITLQPGRDIQETAKTIMNVSGTRPSELQSVT

SEQ ID NO: 22007 - protein, 20 aa, Artificial Sequence
  Synthetic polypeptide
AEITPLHSSLGETSRRQQKL

SEQ ID NO: 22008 - protein, 152 aa, Artificial Sequence
  Synthetic polypeptide
KKLAGCDHLNPGGRGCSELRSRHYTPAWERHPGDSKNYNECIRHETIRVAVCDMMEGKCPCPEPLRGVMEKSFLEYYDFYEVACKDRLHLQGQTMQDPFGEKRGHFDYQSLLMRLGLIRQKVLERLHNENAEMDSDSSSSGTETDLHGSLRV

SEQ ID NO: 22009 - protein, 65 aa, Artificial Sequence
  Synthetic polypeptide
KKLAGCDHLNPGGRGCSELRSRHYTPAWERHPGDSKNYNECIRHETIRVAVCDMMEGKCPCPEPL

SEQ ID NO: 22010 - protein, 38 aa, Artificial Sequence
  Synthetic polypeptide
TLKHYAKEPENSNPKYSTPAPMGSTGQPAGSVWYSREL

SEQ ID NO: 22011 - protein, 503 aa, Artificial Sequence
  Synthetic polypeptide
STMQRSRKIQIRNIPPQLRWEVLDSLLAQYGTVENCEQVNTESETAVVNVTYSNREQTRQAIMKLNGHQLENHALKVSYIPDEQIAQGPENGRRGGFGSRGQPRQGSPVAAGAPAKQQQVDIPLRLLVPTQYVGAIIGKEGATIRNITKQTQSKIDVHRKENAGAAEKAISVHSTPEGCSSACKMILEIMHKEAKDTKTADEVPLKILAHNNFVGRLIGKEGRNLKKVEQDTETKITISSLQDLTLYNPERTITVKGAIENCCRAEQEIMKKVREAYENDVAAMSLQSHLIPGLNLAAVGLFPASSSAVPPPPSSVTGAAPYSSFMQAPEQEMVQVFIPAQAVGAIIGKKGQHIKQLSRFASASIKIAPPETPDSKVRMVIITGPPEAQFKAQGRIYGKLKEENFFGPKEEVKLETHIRVPASAAGRVIGKGGKTVNELQNLTAAEVVVPRDQTPDENDQVIVKIIGHFYASQMAQRKIRDILAQVKQQHQKGQSNQAQARRK

SEQ ID NO: 22012 - protein, 57 aa, Artificial Sequence
  Synthetic polypeptide
EAQLSLLWWFQVHSVGKKKYFVNSKALCKGAGKFKSEIFHPSSDGKYWTACWLSMVQ

SEQ ID NO: 22013 - protein, 364 aa, Artificial Sequence
  Synthetic polypeptide
STMQRSRKIQIRNIPPQLRWEVLDSLLAQYGTVENCEQVNTESETAVVNVTYSNREQTRQADEVPLKILAHNNFVGRLIGKEGRNLKKVEQDTETKITISSLQDLTLYNPERTITVKGAIENCCRAEQEIMKKVREAYENDVAAMSLQSHLIPGLNLAAVGLFPASSSAVPPPPSSVTGAAPYSSFMQAPEQEMVQVFIPAQAVGAIIGKKGQHIKQLSRFASASIKIAPPETPDSKVRMVIITGPPEAQFKAQGRIYGKLKEENFFGPKEEVKLETHIRVPASAAGRVIGKGGKTVNELQNLTAAEVVVPRDQTPDENDQVIVKIIGHFYASQMAQRKIRDILAQVKQQHQKGQSNQAQARRK

SEQ ID NO: 22014 - protein, 56 aa, Artificial Sequence
  Synthetic polypeptide
GQARWLTPIIPALWKAKAGGSQGLAISGPLVSRDSGELHPQCLPAHHQGEPALPLH

SEQ ID NO: 22015 - protein, 341 aa, Artificial Sequence
  Synthetic polypeptide
SQHFGRPRQADHKVLRSVDRWSAGTLENSILNAYLHTIRESQHFLYIENQFFISCSDGRTVLNKVGDEIVDRILKAHKQGWCYRVYVLLPLLPGFEGDISTGGGNSIQAILHFTYRTLCRGEYSILHRLKAAMGTAWRDYISICGLRTHGELGGHPVSELIYIHSKVLIADDRTVIIGSANINDRSLLGKRDSELAVLIEDTETEPSLMNGAEYQAGRFALSLRKHCFGVILGANTRPDLDLRDPICDDFFQLWQDMAESNANIYEQIFRCLPSNATRSLRTLREYVAVEPLATVSPPLARSELTQVQGHLVHFPLKFLEDESLLPPLGSKEGMIPLEVWT

SEQ ID NO: 22016 - protein, 70 aa, Artificial Sequence
  Synthetic polypeptide
PGTVAHAYNPSTLEGQGRRITRSCDQWTAGQQGLWRTPSSMPTCTPSGRASTSSTLRISSSLAAQMGGRF

SEQ ID NO: 22017 - protein, 330 aa, Artificial Sequence
  Synthetic polypeptide
SQHFGRPRQADHKVLRSVDRWSAGTLENSILNAYLHTIRESQHFLYIENQFFISCSDGRTVLNKVGDEIVDRILKAHKQGWCYRVYVLLPLLPGFEGDISTGGGNSIQAILHFTYRTLCRGEYSILHRLKAAMGTAWRDYISICGLRTHGELGGHPVSELIYIHSKVLIADDRTVIIGSANINDRSLLGKRDSELAVLIEDTETEPSLMNGAEYQAGSVILGANTRPDLDLRDPICDDFFQLWQDMAESNANIYEQIFRCLPSNATRSLRTLREYVAVEPLATVSPPLARSELTQVQGHLVHFPLKFLEDESLLPPLGSKEGMIPLEVWT

SEQ ID NO: 22018 - protein, 361 aa, Artificial Sequence
  Synthetic polypeptide
GQARWLTPIIPALWKAKAGGSQGPEIETILANMVLRSVDRWSAGTLENSILNAYLHTIRESQHFLYIENQFFISCSDGRTVLNKVGDEIVDRILKAHKQGWCYRVYVLLPLLPGFEGDISTGGGNSIQAILHFTYRTLCRGEYSILHRLKAAMGTAWRDYISICGLRTHGELGGHPVSELIYIHSKVLIADDRTVIIGSANINDRSLLGKRDSELAVLIEDTETEPSLMNGAEYQAGRFALSLRKHCFGVILGANTRPDLDLRDPICDDFFQLWQDMAESNANIYEQIFRCLPSNATRSLRTLREYVAVEPLATVSPPLARSELTQVQGHLVHFPLKFLEDESLLPPLGSKEGMIPLEVWT

SEQ ID NO: 22019 - protein, 72 aa, Artificial Sequence
  Synthetic polypeptide
SQHFGRPRQADHKVRRSRPSWLTWSCDQWTAGQQGLWRTPSSMPTCTPSGRASTSSTLRISSSLAAQMGGRF

SEQ ID NO: 22020 - protein, 35 aa, Artificial Sequence
  Synthetic polypeptide
HGLAISGPLVSRDSGELHPQCLPAHHQGEPALPLH

SEQ ID NO: 22021 - protein, 350 aa, Artificial Sequence
  Synthetic polypeptide
GQARWLTPIIPALWKAKAGGSQGPEIETILANMVLRSVDRWSAGTLENSILNAYLHTIRESQHFLYIENQFFISCSDGRTVLNKVGDEIVDRILKAHKQGWCYRVYVLLPLLPGFEGDISTGGGNSIQAILHFTYRTLCRGEYSILHRLKAAMGTAWRDYISICGLRTHGELGGHPVSELIYIHSKVLIADDRTVIIGSANINDRSLLGKRDSELAVLIEDTETEPSLMNGAEYQAGSVILGANTRPDLDLRDPICDDFFQLWQDMAESNANIYEQIFRCLPSNATRSLRTLREYVAVEPLATVSPPLARSELTQVQGHLVHFPLKFLEDESLLPPLGSKEGMIPLEVWT

SEQ ID NO: 22022 - protein, 67 aa, Artificial Sequence
  Synthetic polypeptide
LSQKWACYKIKFGPLCSVALSCTLLPSCLLLGDDAARRPTPDEGALILDFPASRTTESCSVTRAGVQ

SEQ ID NO: 22023 - protein, 52 aa, Artificial Sequence
  Synthetic polypeptide
YWISQPPELQSLALSLGLEYSDTITVHCSLDLPATQEAEAQESLEPRRQRLQ

SEQ ID NO: 22024 - protein, 56 aa, Artificial Sequence
  Synthetic polypeptide
GRLDIGFPSLQNYRVLLCHSGWSTVTQSRFTAAWTSQLLRRLRHKNRLNPGGRGCS

SEQ ID NO: 22025 - protein, 62 aa, Artificial Sequence
  Synthetic polypeptide
YSCAACVLLNNIHLRERDVLRRGERDRAVQAVHRVRGAPEHVGAVRGGRRRRVPLRLRLLPG

SEQ ID NO: 22026 - protein, 359 aa, Artificial Sequence
  Synthetic polypeptide
ESVTFSDVVSATEPCKPCTECVGLQSMSAPCVEADDAVCRCAYGYYQDETTGRCEACRVCEAGSGLVFSCQDKQNTVCEECPDGTYSDEANHVDPCLPCTVCEDTERQLRECTRWADAECEEIPGRWITRSTPPEGSDSTAPSTQEPEAPPEQDLIASTVAGVVTTVMGSSQPVVTRGTTDNLIPVYCSILAAVVVGLVAYIAFKRWNSCKQNKQGANSRPVNQTPPPEGEKLHSDSGISVDSQSLHDQQPHTQTASGQALKGDGGLYSSLPPAKREEVEKLLNGSAGDTWRHLAGELGYQPEHIDSFTHEACPVRALLASWATQDSATLDALLAALRRIQRADLVESLCSESTATSPV

SEQ ID NO: 22027 - protein, 15 aa, Artificial Sequence
  Synthetic polypeptide
LCSLCTAQQYPSERA

SEQ ID NO: 22028 - protein, 4 aa, Artificial Sequence
  Synthetic polypeptide
KLAR

SEQ ID NO: 22029 - protein, 23 aa, Artificial Sequence
  Synthetic polypeptide
PGECCARFCQHFWPEYHEHGKGS

SEQ ID NO: 22030 - protein, 226 aa, Artificial Sequence
  Synthetic polypeptide
DPVSTKKLKISQVSVVQDSVNISGQNTMNMVKVPECRLADELGGLWENSRFTDCCLCVAGQEFQAHKAILAARSPVFSAMFEHEMEESKKNRVEINDVEPEVFKEMMCFIYTGKAPNLDKMADDLLAAADKYALERLKVMCEDALCSNLSVENAAEILILADLHSADQLKTQAVDFINYHASDVLETSGWKSMVVSHPHLVAEAYRSLASAQCPFLGPPRKRLKQS

SEQ ID NO: 22031 - protein, 114 aa, Artificial Sequence
  Synthetic polypeptide
DPVSTKKLKISQVSVVQDSVNISGQNTMNMVKVPECRLADELGGLWENSRFTDCCLCVAGQEFQAHKAILAARSPVFSAMFEHEMEESKKNRVEINDVEPEVFKEMMCFIYTGK

SEQ ID NO: 22032 - protein, 90 aa, Artificial Sequence
  Synthetic polypeptide
DPVSTKKLKISQVSVVQDSVNISGQNTMNMVKVPECRLADELGGLWENSRFTDCCLCVAGQEFQAHKAILAARSPVFSAMFEHEMEESKK

SEQ ID NO: 22033 - protein, 37 aa, Artificial Sequence
  Synthetic polypeptide
DPVSTKKLKISQVSVVQDSVNISGQNTMNMVKVPECR

SEQ ID NO: 22034 - protein, 35 aa, Artificial Sequence
  Synthetic polypeptide
LTITCNPSTFGGQGECCARFCQHFWPEYHEHGKGS

SEQ ID NO: 22035 - protein, 224 aa, Artificial Sequence
  Synthetic polypeptide
PVIPALSEAKVSVVQDSVNISGQNTMNMVKVPECRLADELGGLWENSRFTDCCLCVAGQEFQAHKAILAARSPVFSAMFEHEMEESKKNRVEINDVEPEVFKEMMCFIYTGKAPNLDKMADDLLAAADKYALERLKVMCEDALCSNLSVENAAEILILADLHSADQLKTQAVDFINYHASDVLETSGWKSMVVSHPHLVAEAYRSLASAQCPFLGPPRKRLKQS

SEQ ID NO: 22036 - protein, 8 aa, Artificial Sequence
  Synthetic polypeptide
SQHFRRPR

SEQ ID NO: 22037 - protein, 112 aa, Artificial Sequence
  Synthetic polypeptide
PVIPALSEAKVSVVQDSVNISGQNTMNMVKVPECRLADELGGLWENSRFTDCCLCVAGQEFQAHKAILAARSPVFSAMFEHEMEESKKNRVEINDVEPEVFKEMMCFIYTGK

SEQ ID NO: 22038 - protein, 88 aa, Artificial Sequence
  Synthetic polypeptide
PVIPALSEAKVSVVQDSVNISGQNTMNMVKVPECRLADELGGLWENSRFTDCCLCVAGQEFQAHKAILAARSPVFSAMFEHEMEESKK

SEQ ID NO: 22039 - protein, 35 aa, Artificial Sequence
  Synthetic polypeptide
PVIPALSEAKVSVVQDSVNISGQNTMNMVKVPECR

SEQ ID NO: 22040 - protein, 161 aa, Artificial Sequence
  Synthetic polypeptide
DQPGPTWQDPVSTKNTKLDRCGGRHLLSQLLRRLRQENRLNLGGRGCSEPRSRHRTPAWATESPGPDLAFLTSCPDKNKVHFNPTGSAFCPVNLMKPLFPGMGFIFRNCPSNPGSPLPPASPRPPPRKDPEASKASPLPFEPWQRTPPSEEPVLFQSSLMV

SEQ ID NO: 22041 - protein, 30 aa, Artificial Sequence
  Synthetic polypeptide
TWEAEVAVSRDHATALQPGQQSLQVLTWPS

SEQ ID NO: 22042 - protein, 17 aa, Artificial Sequence
  Synthetic polypeptide
AEITPPHSSLGNRVSRS

SEQ ID NO: 22043 - protein, 141 aa, Artificial Sequence
  Synthetic polypeptide
CPPYLPFHFLQFQLPVVNCGPKIGYLLSKVEEKVGSPERPLSDLGLISYRSYWKEVLLRYLHNFQGKEISIKEISQETAVNPVDIVSTLQALQMLKYWKGKHLVLKRQDLIDEWIAKEAKRSNSNKTMDPSCLKWTPPKGT

SEQ ID NO: 22044 - protein, 63 aa, Artificial Sequence
  Synthetic polypeptide
VVPSLSAISLSAVSITCSQLRSKNRLFAFQSRRKSWLPRTSTLRSGAYKLSQLLERSTSPLPA

SEQ ID NO: 22045 - protein, 75 aa, Artificial Sequence
  Synthetic polypeptide
HRLLAGAPRELAVPDGYTNRTGAVYLCPLTAHKDDCERMNITVKNDPGHHIIEDMWLGVTVASQGPAGRVLETAT

SEQ ID NO: 22046 - protein, 40 aa, Artificial Sequence
  Synthetic polypeptide
DNIGSWLVPPGSSLCPMATPTGLVLCTCAHSLPTRMTVSG

SEQ ID NO: 22047 - protein, 984 aa, Artificial Sequence
  Synthetic polypeptide
HRLLAGAPRELAVPDGYTNRTGAVYLCPLTAHKDDCERMNITVKNDPGHHIIEDMWLGVTVASQGPAGRVLVCAHRYTQVLWSGSEDQRRMVGKCYVRGNDLELDSSDDWQTYHNEMCNSNTDYLETGMCQLGTSGGFTQNTVYFGAPGAYNWKGNSYMIQRKEWDLSEYSYKDPEDQGNLYIGYTMQVGSFILHPKNITIVTGAPRHRHMGAVFLLSQEAGGDLRRRQVLEGSQVGAYFGSAIALADLNNDGWQDLLVGAPYYFERKEEVGGAIYVFMNQAGTSFPAHPSLLLHGPSGSAFGLSVASIGDINQDGFQDIAVGAPFEGLGKVYIYHSSSKGLLRQPQQVIHGEKLGLPGLATFGYSLSGQMDVDENFYPDLLVGSLSDHIVLLRARPVINIVHKTLVPRPAVLDPALCTATSCVQVELCFAYNQSAGNPNYRRNITLAYTLEADRDRRPPRLRFAGSESAVFHGFFSMPEMRCQKLELLLMDNLRDKLRPIIISMNYSLPLRMPDRPRLGLRSLDAYPILNQAQALENHTEVQFQKECGPDNKCESNLQMRAAFVSEQQQKLSRLQYSRDVRKLLLSINVTNTRTSERSGEDAHEALLTLVVPPALLLSSVRPPGACQANETIFCELGNPFKRNQRMELLIAFEVIGVTLHTRDLQVQLQLSTSSHQDNLWPMILTLLVDYTLQTSLSMVNHRLQSFFGGTVMGESGMKTVEDVGSPLKYEFQVGPMGEGLVGLGTLVLGLEWPYEVSNGKWLLYPTEITVHGNGSWPCRPPGDLINPLNLTLSDPGDRPSSPQRRRRQLDPGGGQGPPPVTLAAAKKAKSETVLTCATGRAHCVWLECPIPDAPVVTNVTVKARVWNSTFIEDYRDFDRVRVNGWATLFLRTSIPTINMENKTTWFSVDIDSELVEELPAEIELWLVLVAVGAGLLLLGLIILLLWKCGFFKRARTRALYEAKRQKAEMKSQPSETERLTDDY

SEQ ID NO: 22048 - protein, 999 aa, Artificial Sequence
  Synthetic polypeptide
HRLLAGAPRELAVPDGYTNRTGAVYLCPLTAHKDDCERMNITVKNDPGHHIIEDMWLGVTVASQGPAGRVLVCAHRYTQVLWSGSEDQRRMVGKCYVRGNDLELDSSDDWQTYHNEMCNSNTDYLETGMCQLGTSGGFTQNTVYFGAPGAYNWKGNSYMIQRKEWDLSEYSYKDPEDQGNLYIGYTMQVGSFILHPKNITIVTGAPRHRHMGAVFLLSQEAGGDLRRRQVLEGSQVGAYFGSAIALADLNNDGWQDLLVGAPYYFERKEEVGGAIYVFMNQAGTSFPAHPSLLLHGPSGSAFGLSVASIGDINQDGFQDIAVGAPFEGLGKVYIYHSSSKGLLRQPQQVIHGEKLGLPGLATFGYSLSGQMDVDENFYPDLLVGSLSDHIVLLRARPVINIVHKTLVPRPAVLDPALCTATSCVQVELCFAYNQSAGNPNYRRNITLAYTLEADRDRRPPRLRFAGSESAVFHGFFSMPEMRCQKLELLLMDNLRDKLRPIIISMNYSLPLRMPDRPRLGLRSLDAYPILNQAQALENHTEVQFQKECGPDNKCESNLQMRAAFVSEQQQKLSRLQYSRDVRKLLLSINVTNTRTSERSGEDAHEALLTLVVPPALLLSSVRPPGACQANETIFCELGNPFKRNQRMELLIAFEVIGVTLHTRDLQVQLQLSTSSHQDNLWPMILTLLVDYTLQTSLSMVNHRLQSFFGGTVMGESGMKTVEDVGSPLKYEFQVGPMGEGLVGLGTLVLGLEWPYEVSNGKWLLYPTEITVHGNGSWPCRPPGDLINPLNLTLSDPGDRPSSPQRRRRQLDPGGGQGPPPVTLAAAKKAKSETVLTCATGRAHCVWLECPIPDAPVVTNVTVKARVWNSTFIEDYRDFDRVRVNGWATLFLRTSIPTINMENKTTWFSVDIDSELVEELPAEIELWLVLVAVGAGLLLLGLIILLLWKCDFFKRTRYYQIMPKYHAVRIREEERYPPPGSTLPTKKHWVTSWQTRDQYY

SEQ ID NO: 22049 - protein, 23 aa, Artificial Sequence
  Synthetic polypeptide
LRTKRKAKEPLKTQNRYCCGSSV

SEQ ID NO: 22050 - protein, 138 aa, Artificial Sequence
  Synthetic polypeptide
RPKIDIAVGAPFEGLGKVYIYHSSSKGLLRQPQQVIHGEKLGLPGLATFGYSLSGQMDVDENFYPDLLVGSLSDHIVLLRARPVINIVHKTLVPRPAVLDPALCTATSCVQVELCFAYNQSAGNPNYRRNISECWGAA

SEQ ID NO: 22051 - protein, 670 aa, Artificial Sequence
  Synthetic polypeptide
RPKIDIAVGAPFEGLGKVYIYHSSSKGLLRQPQQVIHGEKLGLPGLATFGYSLSGQMDVDENFYPDLLVGSLSDHIVLLRARPVINIVHKTLVPRPAVLDPALCTATSCVQVELCFAYNQSAGNPNYRRNITLAYTLEADRDRRPPRLRFAGSESAVFHGFFSMPEMRCQKLELLLMDNLRDKLRPIIISMNYSLPLRMPDRPRLGLRSLDAYPILNQAQALENHTEVQFQKECGPDNKCESNLQMRAAFVSEQQQKLSRLQYSRDVRKLLLSINVTNTRTSERSGEDAHEALLTLVVPPALLLSSVRPPGACQANETIFCELGNPFKRNQRMELLIAFEVIGVTLHTRDLQVQLQLSTSSHQDNLWPMILTLLVDYTLQTSLSMVNHRLQSFFGGTVMGESGMKTVEDVGSPLKYEFQVGPMGEGLVGLGTLVLGLEWPYEVSNGKWLLYPTEITVHGNGSWPCRPPGDLINPLNLTLSDPGDRPSSPQRRRRQLDPGGGQGPPPVTLAAAKKAKSETVLTCATGRAHCVWLECPIPDAPVVTNVTVKARVWNSTFIEDYRDFDRVRVNGWATLFLRTSIPTINMENKTTWFSVDIDSELVEELPAEIELWLVLVAVGAGLLLLGLIILLLWKCGFFKRARTRALYEAKRQKAEMKSQPSETERLTDDY

SEQ ID NO: 22052 - protein, 685 aa, Artificial Sequence
  Synthetic polypeptide
RPKIDIAVGAPFEGLGKVYIYHSSSKGLLRQPQQVIHGEKLGLPGLATFGYSLSGQMDVDENFYPDLLVGSLSDHIVLLRARPVINIVHKTLVPRPAVLDPALCTATSCVQVELCFAYNQSAGNPNYRRNITLAYTLEADRDRRPPRLRFAGSESAVFHGFFSMPEMRCQKLELLLMDNLRDKLRPIIISMNYSLPLRMPDRPRLGLRSLDAYPILNQAQALENHTEVQFQKECGPDNKCESNLQMRAAFVSEQQQKLSRLQYSRDVRKLLLSINVTNTRTSERSGEDAHEALLTLVVPPALLLSSVRPPGACQANETIFCELGNPFKRNQRMELLIAFEVIGVTLHTRDLQVQLQLSTSSHQDNLWPMILTLLVDYTLQTSLSMVNHRLQSFFGGTVMGESGMKTVEDVGSPLKYEFQVGPMGEGLVGLGTLVLGLEWPYEVSNGKWLLYPTEITVHGNGSWPCRPPGDLINPLNLTLSDPGDRPSSPQRRRRQLDPGGGQGPPPVTLAAAKKAKSETVLTCATGRAHCVWLECPIPDAPVVTNVTVKARVWNSTFIEDYRDFDRVRVNGWATLFLRTSIPTINMENKTTWFSVDIDSELVEELPAEIELWLVLVAVGAGLLLLGLIILLLWKCDFFKRTRYYQIMPKYHAVRIREEERYPPPGSTLPTKKHWVTSWQTRDQYY

SEQ ID NO: 22053 - protein, 102 aa, Artificial Sequence
  Synthetic polypeptide
RPKIDIAVGAPFEGLGKVYIYHSSSKGLLRQPQQVIHGEKLGLPGLATFGYSLSGQMDVDENFYPDLLVGSLSDHIVLLRARPVINIVHKTLVPRPAVLDPA

SEQ ID NO: 22054 - protein, 80 aa, Artificial Sequence
  Synthetic polypeptide
RPKIDIAVGAPFEGLGKVYIYHSSSKGLLRQPQQVIHGEKLGLPGLATFGYSLSGQMDVDENFYPDLLVGSLSDHIVLLR

SEQ ID NO: 22055 - protein, 15 aa, Artificial Sequence
  Synthetic polypeptide
SKAANWKEYCCGSSV

SEQ ID NO: 22056 - protein, 145 aa, Artificial Sequence
  Synthetic polypeptide
ALSDPKLQTGKNIAVGAPFEGLGKVYIYHSSSKGLLRQPQQVIHGEKLGLPGLATFGYSLSGQMDVDENFYPDLLVGSLSDHIVLLRARPVINIVHKTLVPRPAVLDPALCTATSCVQVELCFAYNQSAGNPNYRRNISECWGAA

SEQ ID NO: 22057 - protein, 44 aa, Artificial Sequence
  Synthetic polypeptide
FPRPYLIQSCKLERILLWELRLKAWAKCTSITVALRGSLDSPSR

SEQ ID NO: 22058 - protein, 677 aa, Artificial Sequence
  Synthetic polypeptide
ALSDPKLQTGKNIAVGAPFEGLGKVYIYHSSSKGLLRQPQQVIHGEKLGLPGLATFGYSLSGQMDVDENFYPDLLVGSLSDHIVLLRARPVINIVHKTLVPRPAVLDPALCTATSCVQVELCFAYNQSAGNPNYRRNITLAYTLEADRDRRPPRLRFAGSESAVFHGFFSMPEMRCQKLELLLMDNLRDKLRPIIISMNYSLPLRMPDRPRLGLRSLDAYPILNQAQALENHTEVQFQKECGPDNKCESNLQMRAAFVSEQQQKLSRLQYSRDVRKLLLSINVTNTRTSERSGEDAHEALLTLVVPPALLLSSVRPPGACQANETIFCELGNPFKRNQRMELLIAFEVIGVTLHTRDLQVQLQLSTSSHQDNLWPMILTLLVDYTLQTSLSMVNHRLQSFFGGTVMGESGMKTVEDVGSPLKYEFQVGPMGEGLVGLGTLVLGLEWPYEVSNGKWLLYPTEITVHGNGSWPCRPPGDLINPLNLTLSDPGDRPSSPQRRRRQLDPGGGQGPPPVTLAAAKKAKSETVLTCATGRAHCVWLECPIPDAPVVTNVTVKARVWNSTFIEDYRDFDRVRVNGWATLFLRTSIPTINMENKTTWFSVDIDSELVEELPAEIELWLVLVAVGAGLLLLGLIILLLWKCGFFKRARTRALYEAKRQKAEMKSQPSETERLTDDY

SEQ ID NO: 22059 - protein, 692 aa, Artificial Sequence
  Synthetic polypeptide
ALSDPKLQTGKNIAVGAPFEGLGKVYIYHSSSKGLLRQPQQVIHGEKLGLPGLATFGYSLSGQMDVDENFYPDLLVGSLSDHIVLLRARPVINIVHKTLVPRPAVLDPALCTATSCVQVELCFAYNQSAGNPNYRRNITLAYTLEADRDRRPPRLRFAGSESAVFHGFFSMPEMRCQKLELLLMDNLRDKLRPIIISMNYSLPLRMPDRPRLGLRSLDAYPILNQAQALENHTEVQFQKECGPDNKCESNLQMRAAFVSEQQQKLSRLQYSRDVRKLLLSINVTNTRTSERSGEDAHEALLTLVVPPALLLSSVRPPGACQANETIFCELGNPFKRNQRMELLIAFEVIGVTLHTRDLQVQLQLSTSSHQDNLWPMILTLLVDYTLQTSLSMVNHRLQSFFGGTVMGESGMKTVEDVGSPLKYEFQVGPMGEGLVGLGTLVLGLEWPYEVSNGKWLLYPTEITVHGNGSWPCRPPGDLINPLNLTLSDPGDRPSSPQRRRRQLDPGGGQGPPPVTLAAAKKAKSETVLTCATGRAHCVWLECPIPDAPVVTNVTVKARVWNSTFIEDYRDFDRVRVNGWATLFLRTSIPTINMENKTTWFSVDIDSELVEELPAEIELWLVLVAVGAGLLLLGLIILLLWKCDFFKRTRYYQIMPKYHAVRIREEERYPPPGSTLPTKKHWVTSWQTRDQYY

SEQ ID NO: 22060 - protein, 109 aa, Artificial Sequence
  Synthetic polypeptide
ALSDPKLQTGKNIAVGAPFEGLGKVYIYHSSSKGLLRQPQQVIHGEKLGLPGLATFGYSLSGQMDVDENFYPDLLVGSLSDHIVLLRARPVINIVHKTLVPRPAVLDPA

SEQ ID NO: 22061 - protein, 87 aa, Artificial Sequence
  Synthetic polypeptide
ALSDPKLQTGKNIAVGAPFEGLGKVYIYHSSSKGLLRQPQQVIHGEKLGLPGLATFGYSLSGQMDVDENFYPDLLVGSLSDHIVLLR

SEQ ID NO: 22062 - protein, 42 aa, Artificial Sequence
  Synthetic polypeptide
SQHFGRPSSLWTLTRSWWRSCRPKSSCGWCWWPWVQGCCCWG

SEQ ID NO: 22063 - protein, 21 aa, Artificial Sequence
  Synthetic polypeptide
PGMVAHACNPSTLGGRVLCGH

SEQ ID NO: 22064 - protein, 94 aa, Artificial Sequence
  Synthetic polypeptide
RAWWLTPVIPALWEAEFSVDIDSELVEELPAEIELWLVLVAVGAGLLLLGLIILLLWKCGFFKRARTRALYEAKRQKAEMKSQPSETERLTDDY

SEQ ID NO: 22065 - protein, 109 aa, Artificial Sequence
  Synthetic polypeptide
RAWWLTPVIPALWEAEFSVDIDSELVEELPAEIELWLVLVAVGAGLLLLGLIILLLWKCDFFKRTRYYQIMPKYHAVRIREEERYPPPGSTLPTKKHWVTSWQTRDQYY

SEQ ID NO: 22066 - protein, 82 aa, Artificial Sequence
  Synthetic polypeptide
PGVMFSVDIDSELVEELPAEIELWLVLVAVGAGLLLLGLIILLLWKCGFFKRARTRALYEAKRQKAEMKSQPSETERLTDDY

SEQ ID NO: 22067 - protein, 19 aa, Artificial Sequence
  Synthetic polypeptide
NLISTKNTKLARRDVLCGH

SEQ ID NO: 22068 - protein, 97 aa, Artificial Sequence
  Synthetic polypeptide
PGVMFSVDIDSELVEELPAEIELWLVLVAVGAGLLLLGLIILLLWKCDFFKRTRYYQIMPKYHAVRIREEERYPPPGSTLPTKKHWVTSWQTRDQYY

SEQ ID NO: 22069 - protein, 43 aa, Artificial Sequence
  Synthetic polypeptide
TTYIQMVHHCTIHGNTEELRQMAASREVPRPLSTLPMFNVHTG

SEQ ID NO: 22070 - protein, 65 aa, Artificial Sequence
  Synthetic polypeptide
SQHFGRQRQEGPLRPGVQDQPEQHTSRWSTTAPSTGTQRSCGRWRPAARCPGHSPPCPCSMCTQV

SEQ ID NO: 22071 - protein, 51 aa, Artificial Sequence
  Synthetic polypeptide
GQEFKTSLNNIHPDGPPLHHPREHRGAAADGGQPRGAPATLHPAHVQCAHR

SEQ ID NO: 22072 - protein, 62 aa, Artificial Sequence
  Synthetic polypeptide
TTYIQMVHHCTIHGNTEELRQMAASREVPRPLSTLPMFNVHTGERLPPRVDSAQVPLILDQH

SEQ ID NO: 22073 - protein, 84 aa, Artificial Sequence
  Synthetic polypeptide
SQHFGRQRQEGPLRPGVQDQPEQHTSRWSTTAPSTGTQRSCGRWRPAARCPGHSPPCPCSMCTQVSGCLPAWTAPRCPSFWTST

SEQ ID NO: 22074 - protein, 88 aa, Artificial Sequence
  Synthetic polypeptide
TTYIQMVHHCTIHGNTEELRQMAASREVPRPLSTLPMFNVHTVVPGPALTSSSLLCPHHEWHIPPADSSSWPSWNPGSKQAGRGGGVG

SEQ ID NO: 22075 - protein, 70 aa, Artificial Sequence
  Synthetic polypeptide
SQHFGRQRQEGPLRPGVQDQPEQHTSRWSTTAPSTGTQRSCGRWRPAARCPGHSPPCPCSMCTQWFQVQP

SEQ ID NO: 22076 - protein, 74 aa, Artificial Sequence
  Synthetic polypeptide
GQEFKTSLNNIHPDGPPLHHPREHRGAAADGGQPRGAPATLHPAHVQCAHSGSRSSPDFILPSLSTPRVAHPTC

SEQ ID NO: 22077 - protein, 37 aa, Artificial Sequence
  Synthetic polypeptide
LISLLHISHLKSGVGNNTSFTRWVLGRINVCMPWKRG

SEQ ID NO: 22078 - protein, 17 aa, Artificial Sequence
  Synthetic polypeptide
KVALEIIPLSLGGCWEE

SEQ ID NO: 22079 - protein, 31 aa, Artificial Sequence
  Synthetic polypeptide
SQHFGRPSYILAKPHSGYSSCCQIRIQEVGW

SEQ ID NO: 22080 - protein, 151 aa, Artificial Sequence
  Synthetic polypeptide
RGVMAHACSPNTLGGLVTSLLSPTPATALAVRYASKKSGGSSKNLGGKSSGRRQGIKKMEGHYVHAGNIIATQRHFRWHPGAHVGVGKNKCLYALEEGIVRYTKEVYVPHPRNTEAVDLITRLPKGAVLYKTFVHVVPAKPEGTFKLVAML

SEQ ID NO: 22081 - protein, 87 aa, Artificial Sequence
  Synthetic polypeptide
RGVMAHACSPNTLGGLVTSLLSPTPATALAVRYASKKSGGSSKNLGGKSSGRRQGIKKMEGHYVHAGNIIATQRHFRWHPGAHWRWK

SEQ ID NO: 22082 - protein, 97 aa, Artificial Sequence
  Synthetic polypeptide
RGVMAHACSPNTLGGLVTSLLSPTPATALAVRYASKKSGGSSKNLGGKSSGRRQGIKKMEGHYVHAGNIIATQRHFRWHPGAHVSCSVAAPLFPFLG

SEQ ID NO: 22083 - protein, 597 aa, Artificial Sequence
  Synthetic polypeptide
GQEFETSLANMVKPHLYQKIQKLASSREVDRMVSTPIGGLSYVQGCTKKHLNSKTVGQCLETTAQRVPEREALVVLHEDVRLTFAQLKEEVDKAASGLLSIGLCKGDRLGMWGPNSYAWVLMQLATAQAGIILVSVNPAYQAMELEYVLKKVGCKALVFPKQFKTQQYYNVLKQICPEVENAQPGALKSQRLPDLTTVISVDAPLPGTLLLDEVVAAGSTRQHLDQLQYNQQFLSCHDPINIQFTSGTTGSPKGATLSHYNIVNNSNILGERLKLHEKTPEQLRMILPNPLYHCLGSVAGTMMCLMYGATLILASPIFNGKKALEAISRERGTFLYGTPTMFVDILNQPDFSSYDISTMCGGVIAGSPAPPELIRAIINKINMKDLVVAYGTTENSPVTFAHFPEDTVEQKAESVGRIMPHTEARIMNMEAGTLAKLNTPGELCIRGYCVMLGYWGEPQKTEEAVDQDKWYWTGDVATMNEQGFCKIVGRSKDMIIRGGENIYPAELEDFFHTHPKVQEVQVVGVKDDRMGEEICACIRLKDGEETTVEEIKAFCKGKISHFKIPKYIVFVTNYPLTISGKIQKFKLREQMERHLNL

SEQ ID NO: 22084 - protein, 58 aa, Artificial Sequence
  Synthetic polypeptide
PVPERWIAWSPRPSEASATFRGAPKSILTARLWASAWRPQHRGSQNERPWSSSMKTSG

SEQ ID NO: 22085 - protein, 46 aa, Artificial Sequence
  Synthetic polypeptide
DQPGQHGETPSLPKNTKISQFQRGGSHGLHAHRRPQLRSGVHQKAS

SEQ ID NO: 22086 - protein, 165 aa, Artificial Sequence
  Synthetic polypeptide
GQEFETSLANMVKPHLYQKIQKLASSREVDRMVSTPIGGLSYVQGCTKKHLNSKTVGQCLETTAQRVPEREALVVLHEDVRLTFAQLKEEVDKAASGLLSIGLCKGVCEPSLPGYGTGVCPQEGGLQGPCVPQAIQDPAILQRPEADLSRSGECPARGLEESEAP

SEQ ID NO: 22087 - protein, 554 aa, Artificial Sequence
  Synthetic polypeptide
GQEFETSLANMVKPHLYQKIQKLASSREVDRMVSTPIGGLSYVQGCTKKHLNSKTVGQCLETTAQRVPEREALVVLHEDVRLTFAQLKEEVSVNPAYQAMELEYVLKKVGCKALVFPKQFKTQQYYNVLKQICPEVENAQPGALKSQRLPDLTTVISVDAPLPGTLLLDEVVAAGSTRQHLDQLQYNQQFLSCHDPINIQFTSGTTGSPKGATLSHYNIVNNSNILGERLKLHEKTPEQLRMILPNPLYHCLGSVAGTMMCLMYGATLILASPIFNGKKALEAISRERGTFLYGTPTMFVDILNQPDFSSYDISTMCGGVIAGSPAPPELIRAIINKINMKDLVVAYGTTENSPVTFAHFPEDTVEQKAESVGRIMPHTEARIMNMEAGTLAKLNTPGELCIRGYCVMLGYWGEPQKTEEAVDQDKWYWTGDVATMNEQGFCKIVGRSKDMIIRGGENIYPAELEDFFHTHPKVQEVQVVGVKDDRMGEEICACIRLKDGEETTVEEIKAFCKGKISHFKIPKYIVFVTNYPLTISGKIQKFKLREQMERHLNL

SEQ ID NO: 22088 - protein, 584 aa, Artificial Sequence
  Synthetic polypeptide
GQEFETSLANMVKPHLYQKIQKLASSREVDRMVSTPIGGLSYVQGCTKKHLNSKTVGQCLETTAQRVPEREALVVLHEDVRLTFAQLKEEVDKAASGLLSIGLCKGDRLGMWGPNSYAWVLMQLATAQAMELEYVLKKVGCKALVFPKQFKTQQYYNVLKQICPEVENAQPGALKSQRLPDLTTVISVDAPLPGTLLLDEVVAAGSTRQHLDQLQYNQQFLSCHDPINIQFTSGTTGSPKGATLSHYNIVNNSNILGERLKLHEKTPEQLRMILPNPLYHCLGSVAGTMMCLMYGATLILASPIFNGKKALEAISRERGTFLYGTPTMFVDILNQPDFSSYDISTMCGGVIAGSPAPPELIRAIINKINMKDLVVAYGTTENSPVTFAHFPEDTVEQKAESVGRIMPHTEARIMNMEAGTLAKLNTPGELCIRGYCVMLGYWGEPQKTEEAVDQDKWYWTGDVATMNEQGFCKIVGRSKDMIIRGGENIYPAELEDFFHTHPKVQEVQVVGVKDDRMGEEICACIRLKDGEETTVEEIKAFCKGKISHFKIPKYIVFVTNYPLTISGKIQKFKLREQMERHLNL

SEQ ID NO: 22089 - protein, 42 aa, Artificial Sequence
  Synthetic polypeptide
DQVRWLVPVIPALWEAKVGRLPELRSSRPAWATWSVGCWTPW

SEQ ID NO: 22090 - protein, 34 aa, Artificial Sequence
  Synthetic polypeptide
SQHFGRPRWADCLSSGVQDQPGQHGPWAAGHPGD

SEQ ID NO: 22091 - protein, 44 aa, Artificial Sequence
  Synthetic polypeptide
AQEFKTSLGNMVRGLLDTLVTDLMVLADELSPIKNVEEALRLCR

SEQ ID NO: 22092 - protein, 33 aa, Artificial Sequence
  Synthetic polypeptide
SQHFGRPRWADCLSSGVQDQPGQHGPWAAGHPG

SEQ ID NO: 22093 - protein, 20 aa, Artificial Sequence
  Synthetic polypeptide
AQEFKTSLGNMVRGLLDTLV

SEQ ID NO: 22094 - protein, 24 aa, Artificial Sequence
  Synthetic polypeptide
IDEHAKLQVPAEFPMWNPRMQLLC

SEQ ID NO: 22095 - protein, 32 aa, Artificial Sequence
  Synthetic polypeptide
MSMQSSKCLLNSPCGTQGCSCSANTAAHPSRL

SEQ ID NO: 22096 - protein, 624 aa, Artificial Sequence
  Synthetic polypeptide
IPHVEPKDAAALLTRQPILQDCDLATVALSPPPPAGARATHLQVSSHDDLRTPAPGEEHRAQLLRGRNQVAFTEVMGMLWRRLNDSGKNWRHVYKALTLLDYLLKTGSERVAHQCRENLYTIQTLKDFQYIDRDGKDQGVNVREKVKQVMALLKDEERLRQERTHALKTKERMALEGIGIGSGQLGFSRRYGEDYSRSRGSPSSYNSSSSSPRYTSDLEQARPQTSGEEELQLQLALAMSREEAEKEVRSWQGDGSPMANGAGAVVHHQRDREPEREERKEEEKLKTSQSSILDLADIFVPALAPPSTHCSADPWDIPGFRPNTEASGSSWGPSADPWSPIPSGTVLSRSQPWDLTPMLSSSEPWGRTPVLPAGPPTTDPWALNSPHHKLPSTGADPWGASLETSDTPGGASTFDPFAKPPESTETKEGLEQALPSGKPSSPVELDLFGDPSPSSKQNGTKEPDALDLGILGEALTQPSKEARACRTPESFLGPSASSLVNLDSLVKAPQVAKTRNPFLTGLSAPSPTNPFGAGEPGRPTLNQMRTGSPALGLAGGPVGAPLGSMTYSASLPLPLSSVPAGLTLPASVSVFPQAGAFAPQPLLPTPSSAGPRPPPPQTGTNPFL

SEQ ID NO: 22097 - protein, 79 aa, Artificial Sequence
  Synthetic polypeptide
WTPVLALPGACSTHPAGASWRTTPSWCGACWTCMRPHRRVRGSSGLCGCRTHRTSSFGTPRVAATSAVRLSWGLACPCV

SEQ ID NO: 22098 - protein, 33 aa, Artificial Sequence
  Synthetic polypeptide
GLQSWLCQVLAQPTLLGLPGGLRLRGAGPAGPV

SEQ ID NO: 22099 - protein, 231 aa, Artificial Sequence
  Synthetic polypeptide
DSSPGSARCLLNPPCWGFLEDYAFVVRGLLDLYEASQESAWLEWALRLQDTQDKLFWDSQGGGYFCSEAELGAGLPLRLKDDQDGAEPSANSVSAHNLLRLHGFTGHKDWMDKCVCLLTAFSERMRRVPVALPEMVRALSAQQQTLKQIVICGDRQAKDTKALVQCVHSVYIPNKVLILADGDPSSFLSRQLPFLSTLRRLEDQATAYVCENQACSVPITDPCELRKLLHP

SEQ ID NO: 22100 - protein, 205 aa, Artificial Sequence
  Synthetic polypeptide
AHACNPKTLGGQGGQITRSRDREHPGQHEQAARLKKLQEQEKQQKVEFRKRMEKEVSDFIQDSGQIKKKFQPMNKIERSILHDVVEVAGLTSFSFGEDDDCRYVMIFKKEFAPSDEELDSYRRGEEWDPQKAEEKRKLKELAQRQEEEAAQQGPVVVSPASDYKDKYSHLIGKGAAKDAAHMLQANKTYGCGEATVRLGVAGRGA

SEQ ID NO: 22101 - protein, 33 aa, Artificial Sequence
  Synthetic polypeptide
LTPVIPKLWEAKAGRSRDQEIESILANMNRPPA

SEQ ID NO: 22102 - protein, 227 aa, Artificial Sequence
  Synthetic polypeptide
AHACNPKTLGGQGGQITRSRDREHPGQHEQAARLKKLQEQEKQQKVEFRKRMEKEVSDFIQDSGQIKKKFQPMNKIERSILHDVVEVAGLTSFSFGEDDDCRYVMIFKKEFAPSDEELDSYRRGEEWDPQKAEEKRKLKELAQRQEEEAAQQGPVVVSPASDYKDKYSHLIGKGAAKDAAHMLQANKTYGCVPVANKRDTRSIEEAMNEIRAKKRLRQSGEELPPTS

SEQ ID NO: 22103 - protein, 98 aa, Artificial Sequence
  Synthetic polypeptide
AHACNPKTLGGQGGQITRSRDREHPGQHEQAARLKKLQEQEKQQKVEFRKRMEKEVSDFIQDSGQIKKKFQPMNKIERSILLIPPPRPRNEMKHLYGL

SEQ ID NO: 22104 - protein, 35 aa, Artificial Sequence
  Synthetic polypeptide
SQLLWSLRQENPLNPGGRGCGKANEIEGLAHQADE

SEQ ID NO: 22105 - protein, 102 aa, Artificial Sequence
  Synthetic polypeptide
IQEAEVAVKQMKLKDSRIKLMSEILNGIKVLKLYAWEPSFLKQVEGIRQGELQLLRTAAYLHTTTTFTWMCSPFLVRLGTGLGPCLQGSGCPGMARAHWTLP

SEQ ID NO: 22106 - protein, 34 aa, Artificial Sequence
  Synthetic polypeptide
KYKISRAWWHMPVIPATLESEAGESLESRRQRLR

SEQ ID NO: 22107 - protein, 1057 aa, Artificial Sequence
  Synthetic polypeptide
IQEAEVAVKQMKLKDSRIKLMSEILNGIKVLKLYAWEPSFLKQVEGIRQGELQLLRTAAYLHTTTTFTWMCSPFLVTLITLWVYVYVDPNNVLDAEKAFVSVSLFNILRLPLNMLPQLISNLTQASVSLKRIQQFLSQEELDPQSVERKTISPGYAITIHSGTFTWAQDLPPTLHSLDIQVPKGALVAVVGPVGCGKSSLVSALLGEMEKLEGKVHMKGSVAYVPQQAWIQNCTLQENVLFGKALNPKRYQQTLEACALLADLEMLPGGDQTEIGEKGINLSGGQRQRVSLARAVYSDADIFLLDDPLSAVDSHVAKHIFDHVIGPEGVLAGKTRVLVTHGISFLPQTDFIIVLADGQVSEMGPYPALLQRNGSFANFLCNYAPDEDQGHLEDSWTALEGAEDKEALLIEDTLSNHTDLTDNDPVTYVVQKQFMRQLSALSSDGEGQGRPVPRRHLGPSEKVQVTEAKADGALTQEEKAAIGTVELSVFWDYAKAVGLCTTLAICLLYVGQSAAAIGANVWLSAWTNDAMADSRQNNTSLRLGVYAALGILQGFLVMLAAMAMAAGGIQAARVLHQALLHNKIRSPQSFFDTTPSGRILNCFSKDIYVVDEVLAPVILMLLNSFFNAISTLVVIMASTPLFTVVILPLAVLYTLVQRFYAATSRQLKRLESVSRSPIYSHFSETVTGASVIRAYNRSRDFEIISDTKVDANQRSCYPYIISNRWLSIGVEFVGNCVVLFAALFAVIGRSSLNPGLVGLSVSYSLQVTFALNWMIRMMSDLESNIVAVERVKEYSKTETEAPWVVEGSRPPEGWPPRGEVEFRNYSVRYRPGLDLVLRDLSLHVHGGEKVGIVGRTGAGKSSMTLCLFRILEAAKGEIRIDGLNVADIGLHDLRSQLTIIPQDPILFSGTLRMNLDPFGSYSEEDIWWALELSHLHTFVSSQPAGLDFQCSEGGENLSVGQRQLVCLARALLRKSRILVLDEATAAIDLETDNLIQATIRTQFDTCTVLTIAHRLNTIMDYTRVLVLDKGVVAEFDSPANLIAARGIFYGMARDAGLA

SEQ ID NO: 22108 - protein, 22 aa, Artificial Sequence
  Synthetic polypeptide
IQEAEVAVKQMKLKDSRIKLMS

SEQ ID NO: 22109 - protein, 768 aa, Artificial Sequence
  Synthetic polypeptide
IQEAEVAVKQMKLKDSRIKLMSEILNGIKVLKLYAWEPSFLKQVEGIRQGELQLLRTAAYLHTTTTFTWMCSPFLVTLITLWVYVYVDPNNVLDAEKAFVSVSLFNILRLPLNMLPQLISNLTQASVSLKRIQQFLSQEELDPQSVERKTISPGYAITIHSGTFTWAQDLPPTLHSLDIQVPKGALVAVVGPVGCGKSSLVSALLGEMEKLEGKVHMKGSVAYVPQQAWIQNCTLQENVLFGKALNPKRYQQTLEACALLADLEMLPGGDQTEIGEKGINLSGGQRQRVSLARAVYSDADIFLLDDPLSAVDSHVAKHIFDHVIGPEGVLAGKTRVLVTHGISFLPQTDFIIVLADGQVSEMGPYPALLQRNGSFANFLCNYAPDEDQGHLEDSWTALEGAEDKEALLIEDTLSNHTDLTDNDPVTYVVQKQFMRQLSALSSDGEGQGRPVPRRHLGPSEKVQVTEAKADGALTQEEKAAIGTVELSVFWDYAKAVGLCTTLAICLLYVGQSAAAIGANVWLSAWTNDAMADSRQNNTSLRLGVYAALGILQGFLVMLAAMAMAAGGIQAARVLHQALLHNKIRSPQSFFDTTPSGRILNCFSKDIYVVDEVLAPVILMLLNSFFNAISTLVVIMASTPLFTVVILPLAVLYTLVQRFYAATSRQLKRLESVSRSPIYSHFSETVTGASVIRAYNRSRDFEIISDTKVDANQRSCYPYIISNRSEAASLAPCSSRNSQQALWCSGSLSLLSPKQKTGPALPLPHFLLI

SEQ ID NO: 22110 - protein, 21 aa, Artificial Sequence
  Synthetic polypeptide
LPSLSLSKANEIEGLAHQADE

SEQ ID NO: 22111 - protein, 15 aa, Artificial Sequence
  Synthetic polypeptide
HFLQKSTLTAQSQSK

SEQ ID NO: 22112 - protein, 8 aa, Artificial Sequence
  Synthetic polypeptide
SQHFGRRR

SEQ ID NO: 22113 - protein, 33 aa, Artificial Sequence
  Synthetic polypeptide
DWVQWLTPNPSTLGGGGDICSELDDTNDVRFGI

SEQ ID NO: 22114 - protein, 308 aa, Artificial Sequence
  Synthetic polypeptide
TGCSGSHLIPALWEAEVTFALNWMIRMMSDLESNIVAVERVKEYSKTETEAPWVVEGSRPPEGWPPRGEVEFRNYSVRYRPGLDLVLRDLSLHVHGGEKVGIVGRTGAGKSSMTLCLFRILEAAKGEIRIDGLNVADIGLHDLRSQLTIIPQDPILFSGTLRMNLDPFGSYSEEDIWWALELSHLHTFVSSQPAGLDFQCSEGGENLSVGQRQLVCLARALLRKSRILVLDEATAAIDLETDNLIQATIRTQFDTCTVLTIAHRLNTIMDYTRVLVLDKGVVAEFDSPANLIAARGIFYGMARDAGLA

SEQ ID NO: 22115 - protein, 303 aa, Artificial Sequence
  Synthetic polypeptide
GQELQNSLANMVTFALNWMIRMMSDLESNIVAVERVKEYSKTETEAPWVVEGSRPPEGWPPRGEVEFRNYSVRYRPGLDLVLRDLSLHVHGGEKVGIVGRTGAGKSSMTLCLFRILEAAKGEIRIDGLNVADIGLHDLRSQLTIIPQDPILFSGTLRMNLDPFGSYSEEDIWWALELSHLHTFVSSQPAGLDFQCSEGGENLSVGQRQLVCLARALLRKSRILVLDEATAAIDLETDNLIQATIRTQFDTCTVLTIAHRLNTIMDYTRVLVLDKGVVAEFDSPANLIAARGIFYGMARDAGLA

SEQ ID NO: 22116 - protein, 33 aa, Artificial Sequence
  Synthetic polypeptide
TGCSGSHLIPALWEAEVGGSPEARSSRTAWPTW

SEQ ID NO: 22117 - protein, 41 aa, Artificial Sequence
  Synthetic polypeptide
SQHFGRRRWADHLRPGAPEQPGQHGDICSELDDTNDVRFGI

SEQ ID NO: 22118 - protein, 270 aa, Artificial Sequence
  Synthetic polypeptide
LMPVIPALWEAKAPWVVEGSRPPEGWPPRGEVEFRNYSVRYRPGLDLVLRDLSLHVHGGEKVGIVGRTGAGKSSMTLCLFRILEAAKGEIRIDGLNVADIGLHDLRSQLTIIPQDPILFSGTLRMNLDPFGSYSEEDIWWALELSHLHTFVSSQPAGLDFQCSEGGENLSVGQRQLVCLARALLRKSRILVLDEATAAIDLETDNLIQATIRTQFDTCTVLTIAHRLNTIMDYTRVLVLDKGVVAEFDSPANLIAARGIFYGMARDAGLA

SEQ ID NO: 22119 - protein, 40 aa, Artificial Sequence
  Synthetic polypeptide
SQHFGRPRRPGWWKAAALPKVGPHVGRWSSGIILCATGRA

SEQ ID NO: 22120 - protein, 92 aa, Artificial Sequence
  Synthetic polypeptide
RGTVTHACNPSTLGGQGALGGGRQPPSRRLAPTWGGGVPELFCALPAGPRPGAERPESACARWREGGDRGPHWGWQVFHDPLPVPHPGGGKG

SEQ ID NO: 22121 - protein, 63 aa, Artificial Sequence
  Synthetic polypeptide
SQLLGRLRQENHLNLGGGGCSKPRLHHCTPAWATEQDSTSKKKKRLVYTGHVNETMVRWSLTC

SEQ ID NO: 22122 - protein, 38 aa, Artificial Sequence
  Synthetic polypeptide
TWEAEVAVSQDCTTALQPGRQSKTLPQKKKKDLFTLGM

SEQ ID NO: 22123 - protein, 346 aa, Artificial Sequence
  Synthetic polypeptide
AKIAPLHSSLGDRARLYLKKKKKTCLHWACKRNHGQVVSYLLKSGADKEILTTKGEMPVQLTSRREIRKIMGVEEEDDDDDDDDNLPQLKKESELPFVPNYLANPAFPFIYTPTAEDSAQMQNGGPSTPPASPPADGSPPLLPPGEPPLLGTFPRDHTSLALVQNGDVSAPSAILRTPESTKPGPVCQPPVSQSRSLFSSVPSKPPMSLEPQNGTYAGPAPAFQPFFFTGAFPFNMQELVLKVRIQNPSLRENDFIEIELDRQELTYQELLRVCCCELGVNPDQVEKIRKLPNTLLRKDKDVARLQDFQELELVLMISENNFLFRNAASTLTERPCYNRRASKLTY

SEQ ID NO: 22124 - protein, 26 aa, Artificial Sequence
  Synthetic polypeptide
TTGLCLICVCREQCRARSWRSNHGQL

SEQ ID NO: 22125 - protein, 174 aa, Artificial Sequence
  Synthetic polypeptide
RQGCALFVSVESSAGHGVGALTMANCERTFIAIKPDGVQRGLVGEIIKRFEQKGFRLVGLKFMQASEDLLKEHYVDLKDRPFFAGLVKYMHSGPVVAMVWEGLNVVKTGRVMLGETNPADSKPGTIRGDFCIQVGRNIIHGSDSVESAEKEIGLWFHPEELVDYTSCAQNWIYE

SEQ ID NO: 22126 - protein, 136 aa, Artificial Sequence
  Synthetic polypeptide
RQGCALFVSVESSAGHGVGALTMANCERTFIAIKPDGVQRGLVGEIIKRFEQKGFRLVGLKFMQASEDLLKEHYVDLKDRPFFAGLVKYMHSGPVVAMVWEGLNVVKTGRVMLGETNPADSKPGTIRGDFCIQVGR

SEQ ID NO: 22127 - protein, 289 aa, Artificial Sequence
  Synthetic polypeptide
RQGCALFVSVESSAGHGVGALTMANCERTFIAIKPDGVQRGLVGEIIKRFEQKGFRLVGLKFMQASEDLLKEHYVDLKDRPFFAGLVKYMHSGPVVAMVWEGLNVVKTGRVMLGETNPADSKPGTIRGDFCIQVGRTMANLERTFIAIKPDGVQRGLVGEIIKRFEQKGFRLVAMKFLRASEEHLKQHYIDLKDRPFFPGLVKYMNSGPVVAMVWEGLNVVKTGRVMLGETNPADSKPGTIRGDFCIQVGRNIIHGSDSVKSAEKEISLWFKPEELVDYKSCAHDWVYE

SEQ ID NO: 22128 - protein, 57 aa, Artificial Sequence
  Synthetic polypeptide
RQGCALFVSVESSAGHGVGALTMANCERTFIAIKPDGVQRGLVGEIIKRFEQKGFRL

SEQ ID NO: 22129 - protein, 93 aa, Artificial Sequence
  Synthetic polypeptide
GWARWLTPVIPALWEAEVWEGLNVVKTGRVMLGETNPADSKPGTIRGDFCIQVGRNIIHGSDSVKSAEKEISLWFKPEELVDYKSCAHDWVYE

SEQ ID NO: 22130 - protein, 12 aa, Artificial Sequence
  Synthetic polypeptide
SQHFGRPRSGRG

SEQ ID NO: 22131 - protein, 60 aa, Artificial Sequence
  Synthetic polypeptide
MGEVAHTCNPSTLGGRGLGGAERGEDRPSDAWGDQSSRFKARHHSWGLLHSGWQEHHSWQ

SEQ ID NO: 22132 - protein, 30 aa, Artificial Sequence
  Synthetic polypeptide
NPVSTKNTKISWAWCDNTAAEGGVAGWRGL

SEQ ID NO: 22133 - protein, 71 aa, Artificial Sequence
  Synthetic polypeptide
GGRITRSRDQDHPGQHDETLSLLKIQKLAGRGVTTLQLKEELLDGEDYNFLQGASDQESNGSANFYIKQEP

SEQ ID NO: 22134 - protein, 44 aa, Artificial Sequence
  Synthetic polypeptide
LTPVIPALWEAEASGSFEVRSLRPAWPTWGWRSLCLGCELKEVP

SEQ ID NO: 22135 - protein, 161 aa, Artificial Sequence
  Synthetic polypeptide
DQPGQHGDGEVYVWDVNSRKCLNRFVDEGSLYGLSIATSRNGQYVACGSNCGVVNIYNQDSCLQETNPKPIKAIMNLVTGVTSLTFNPTTEILAIASEKMKEAVRLVHLPSCTVFSNFPVIKNKNISHVHTMDFSPRSGYFALGNEKGKALMYRLHHYSDF

SEQ ID NO: 22136 - protein, 20 aa, Artificial Sequence
  Synthetic polypeptide
GQEFKTSLANMGMEKFMFGM

SEQ ID NO: 22137 - protein, 72 aa, Artificial Sequence
  Synthetic polypeptide
DQPGQHGDGEVYVWDVNSRKCLNRFVDEGSLYGLSIATSRNGQYVACGLKLGKLLVYISLPPFANWSLGGKF

SEQ ID NO: 22138 - protein, 89 aa, Artificial Sequence
  Synthetic polypeptide
DQPGQHGDGEVYVWDVNSRKCLNRFVDEGSLYGLSIATSRNGQYVACGCYFSDLQSYYRNLGNCFRKNERSSQIGSSSFLYSIFKLPSH

SEQ ID NO: 22139 - protein, 119 aa, Artificial Sequence
  Synthetic polypeptide
DQPGQHGDGEVYVWDVNSRKCLNRFVDEGSLYGLSIATSRNGQYVACGSNCGVVNIYNQDSCLQETNPKPIKAIMNLVTGVTSLTFNPTTEILAIASEKMKEAVRLACCLNRTEAILGF

SEQ ID NO: 22140 - protein, 26 aa, Artificial Sequence
  Synthetic polypeptide
SQHFGRPRQDCLRPGVRDQPGQHKKA

SEQ ID NO: 22141 - protein, 471 aa, Artificial Sequence
  Synthetic polypeptide
DQEFETSLGNIKKLESPPPSTNPFLEDEPTPEMEELATEKGDLDQPKKPKAPDNPFHGIVSKCFEPHLYVYIESQDKNLGELIDRFVADFKAQGPPKPNTDEGGAVLPSCADLFVYYKKCMVQCSQLSTGEPMIALTTIFQKYLREYAWKILSGNLPKTTTSSGGLTISSLLKEKEGSEVAKFTLEELCLICNILSTAEYCLATTQQLEEKLKEKVDVSLIERINLTGEMDTFSTVISSSIQLLVQDLDAACDPALTAMSKMQWQNVEHVGDQSPYVTSVILHIKQNVPIIRDNLASTRKYFTQFCVKFANSFIPKFITHLFKCKPISMVGAEQLLLDTHSLKMVLLDLPSISSQVVRKAPASYTKIVVKGMTRAEMILKVVMAPHEPLVVFVDNYIKLLTDCNTETFQKILDMKGLKRSEQSSMLELLRQRLPAPPSGAESSGSLSLTAPTPEQESSRIRKLEKLIKKRL

SEQ ID NO: 22142 - protein, 338 aa, Artificial Sequence
  Synthetic polypeptide
DQEFETSLGNIKKLESPPPSTNPFLEDEPTPEMEELATEKGDLDQPKKPKAPDNPFHGIVSKCFEPHLYVYIESQDKNLGELIDRFVADFKAQGPPKPNTDEGGAVLPSCADLFVYYKKCMVQCSQLSTGEPMIALTTIFQKYLREYAWKILSGNLPKTTTSSGGLTISSLLKEKEGSEVAKFTLEELCLICNILSTAEYCLATTQQLEEKLKEKVDVSLIERINLTGEMDTFSTVISSSIQLLVQDLDAACDPALTAMSKMQWQNVEHVGDQSPYVTSVILHIKQNVPIIRDNLASTRKYFTQFCVKFANSFIPKFITHLFKCKPISMVGAEQVRWT

SEQ ID NO: 22143 - protein, 234 aa, Artificial Sequence
  Synthetic polypeptide
DQEFETSLGNIKKLESPPPSTNPFLEDEPTPEMEELATEKGDLDQPKKPKAPDNPFHGIVSKCFEPHLYVYIESQDKNLGELIDRFVADFKAQGPPKPNTDEGGAVLPSCADLFVYYKKCMVQCSQLSTGEPMIALTTIFQKYLREYAWKILSGNLPKTTTSSGGLTISSLLKEKEGSEVAKFTLEELCLICNILSTAEYCLATTQQLEEKLKEKVDRHLQQYSAAGSGSGCCL

SEQ ID NO: 22144 - protein, 105 aa, Artificial Sequence
  Synthetic polypeptide
DQEFETSLGNIKKLESPPPSTNPFLEDEPTPEMEELATEKGDLDQTPPKGRLAGRTSSEKPVTMYFAASPAFILSQHHKGRSQESRASRSSSEMMQSNVSGPLIK

SEQ ID NO: 22145 - protein, 226 aa, Artificial Sequence
  Synthetic polypeptide
KIQKTWSQGFPGGVDVSEVKEVYLDLVKKGVQFPPSEAEAETARQETAQISSNPPTSVPTAPALSSVIAPKNSTVTLVPEQIGKLHSELDMVKMNVRVMSAILMENTPGSENHEDIELLQKLYKTGREMQERIMDLLVVVENEDVTVELIQVNEDLNNAILGYERFTRNQQRILEQNKNQKEATNTTSEPSAPSQDLLDLSPSPRMPRATLGELNTMNNQLSGLSK

SEQ ID NO: 22146 - protein, 21 aa, Artificial Sequence
  Synthetic polypeptide
NPVSTKKYKKLGHRASQEVWM

SEQ ID NO: 22147 - protein, 66 aa, Artificial Sequence
  Synthetic polypeptide
MGAVAHACNPSTLGGRGGQITRSGVREQPGQHSETPSLLKNTKNLVTGLPRRCGCKRSQRSIPRPG

SEQ ID NO: 22148 - protein, 356 aa, Artificial Sequence
  Synthetic polypeptide
KIQKTWSQGFPGGVDVSEVKEVYLDLVKKGVQFPPSEAEAETARQETAQISSNPPTSVPTAPALSSVIAPKNSTVTLVPEQIGKLHSELDMVKMNVRVMSAILMENTPGSENHEDIELLQKLYKTGREMQERIMDLLVVVENEDVTVELIQVNEDLNNAILGYERFTRNQQRILEQNKNQKEATNTTSEPSAPSQDLLDLSPSPRMPRATLGELNTMNNQLSGLNFSLPSSDVTNNLKPSLHPQMNLLALENTEIPPFAQRTSQNLTSSHAYDNFLEHSNSVFLQPVSLQTIAAAPSNQSLPPLPSNHPAMTKSDLQPPNYYEVMEFDPLAPAVTTEAIYEEIDAHQHKGAQNDGD

SEQ ID NO: 22149 - protein, 345 aa, Artificial Sequence
  Synthetic polypeptide
KIQKTWSQGFPGGVDVSEVKEVYLDLVKKGVQFPPSEAEAETARQETAQISSNPPTSVPTAPALSSVIAPKNSTVTLVPEQIGKLHSELDMVKMNVRVMSAILMENTPGSENHEDIELLQKLYKTGREMQERIMDLLVVVENEDVTVELIQVNEDLNNAILGYERFTRNQQRILEQNKNQKEATNTTSEPSAPSQDLLDLSPSPRMPRATLGELNTMNNQLSGLNFSLPSSDVTNNLKPSLHPQMNLLALENTEIPPFAQRTSQNLTSSHAYDNPVSLQTIAAAPSNQSLPPLPSNHPAMTKSDLQPPNYYEVMEFDPLAPAVTTEAIYEEIDAHQHKGAQNDGD

SEQ ID NO: 22150 - protein, 140 aa, Artificial Sequence
  Synthetic polypeptide
KIQKTWSQGFPGGVDVSEVKEVYLDLVKKGVQFPPSEAEAETARQETAQISSNPPTSVPTAPALSSVIAPKNSTVTLVPEQIGKLHSELDMVKMNVRVMSAILMENTPGSENHEDIELLQVLYDFRDYQSKCLLKLFSKL

SEQ ID NO: 22151 - protein, 283 aa, Artificial Sequence
  Synthetic polypeptide
KIQKTWSQGFPGGVDVSEVKEVYLDLVKKGVQFPPSEAEAETARQETAQISSNPPTSVPTAPALSSVIAPKNSTVTLVPEQIGKLHSELDMVKMNVRVMSAILMENTPGSENHEDIELLQKLYKTGREMQERIMDLLVVVENEDVTVELIQVNEDLNNAILGYERFTRNQQRILEQNKNQKEATNTTSEPSAPSQDLLDLSPSPRMPRATLGELNTMNNQLSGLNFSLPSSDVTNNLKPSLHPQMNLLALENTEIPPRDLVLPCWPGCGLKLLTYGDLPTSAS

SEQ ID NO: 22152 - protein, 321 aa, Artificial Sequence
  Synthetic polypeptide
KIQKTWSQGFPGGVDVSEVKEVYLDLVKKGVQFPPSEAEAETARQEIGKLHSELDMVKMNVRVMSAILMENTPGSENHEDIELLQKLYKTGREMQERIMDLLVVVENEDVTVELIQVNEDLNNAILGYERFTRNQQRILEQNKNQKEATNTTSEPSAPSQDLLDLSPSPRMPRATLGELNTMNNQLSGLNFSLPSSDVTNNLKPSLHPQMNLLALENTEIPPFAQRTSQNLTSSHAYDNFLEHSNSVFLQPVSLQTIAAAPSNQSLPPLPSNHPAMTKSDLQPPNYYEVMEFDPLAPAVTTEAIYEEIDAHQHKGAQNDGD

SEQ ID NO: 22153 - protein, 63 aa, Artificial Sequence
  Synthetic polypeptide
KIQKTWSQGFPGGVDVSEVKEVYLDLVKKGVQFPPSEAEAETARQETAQISSNPPTSVPTAPA

SEQ ID NO: 22154 - protein, 80 aa, Artificial Sequence
  Synthetic polypeptide
KIQKTWSQGFPGGVDVSEVKEVYLDLVKKGVQFPPSEAEAETARQEIGKLHSELDMVKMNVRVMSAILMENTPGSENHED

SEQ ID NO: 22155 - protein, 185 aa, Artificial Sequence
  Synthetic polypeptide
KIQKTWSQGFPGGVDVSEVKEVYLDLVKKGVQFPPSEAEAETARQETAQISSNPPTSVPTAPALSSVIAPKNSTVTLVPEQIGKLHSELDMVKMNVRVMSAILMENTPGSENHEDIELLQKLYKTGREMQERIMDLLVVVENEDVTVELIQVNEDLNNAILGYERFTRNQQRILEQNKNQKEATN

SEQ ID NO: 22156 - protein, 37 aa, Artificial Sequence
  Synthetic polypeptide
KIQKTWSQGFPGGVDVSEVKEVYLDLVKKGVQFPPSE

SEQ ID NO: 22157 - protein, 119 aa, Artificial Sequence
  Synthetic polypeptide
KIQKTWSQGFPGGVDVSEVKEVYLDLVKKGVQFPPSEAEAETARQETAQISSNPPTSVPTAPALSSVIAPKNSTVTLVPEQIGKLHSELDMVKMNVRVMSAILMENTPGSENHEDIELL

SEQ ID NO: 22158 - protein, 37 aa, Artificial Sequence
  Synthetic polypeptide
QHSLLETNKGFWSKIRTRRKPPILPVSLLPHLKISST

SEQ ID NO: 22159 - protein, 13 aa, Artificial Sequence
  Synthetic polypeptide
AQEFQTSPDNIVY

SEQ ID NO: 22160 - protein, 22 aa, Artificial Sequence
  Synthetic polypeptide
QHSLLETNKGFWSKIRTRRKPP

SEQ ID NO: 22161 - protein, 18 aa, Artificial Sequence
  Synthetic polypeptide
WHVPVVPATQETENLLTT

SEQ ID NO: 22162 - protein, 551 aa, Artificial Sequence
  Synthetic polypeptide
SQLLRRLRIYSLREPQTPTNVIILSEAEEESLVLNKGRAYTASLGETAVAFDFGPLAAVPKTLFGQNGKDEVVAYPLYILYENGETFLTYISLLHSPGNIGKLLGPLPMHPAAEDNYGYDACAVLCLPCVPNILVIATESGMLYHCVVLEGEEEDDHTSEKSWDSRIDLIPSLYVFECVELELALKLASGEDDPFDSDFSCPVKLHRDPKCPSRYHCTHEAGVHSVGLTWIHKLHKFLGSDEEDKDSLQELSTEQKCFVEHILCTKPLPCRQPAPIRGFWIVPDILGPTMICITSTYECLIWPLLSTVHPASPPLLCTREDVEVAESPLRVLAETPDSFEKHIRSILQRSVANPAFLKASEKDIAPPPEECLQLLSRATQVFREQYILKQDLAKEEIQRRVKLLCDQKKKQLEDLSYCREERKSLREMAERLADKYEEAKEKQEDIMNRMKKLLHSFHSELPVLSDSERDMKKELQLIPDQLRHLGNAIKQVTMKKDYQQQKMEKVLSLPKPTIILSAYQRKCIQSILKEEGEHIREMVKQINDIRNHVNF

SEQ ID NO: 22163 - protein, 567 aa, Artificial Sequence
  Synthetic polypeptide
SQLLRRLRIYSLREPQTPTNVIILSEAEEESLVLNKGRAYTASLGETAVAFDFGPLAAVPKTLFGQNGKDEVVAYPLYILYENGETFLTYISLLHSPGNIGKLLGPLPMHPAAEDNYGYDACAVLCLPCVPNILVIATESGMLYHCVVLEGEEEDDHTSEKSWDSRIDLIPSLYVFECVELELALKLASGEDDPFDSDFSCPVKLHRDPKCPSRYHCTHEAGVHSVGLTWIHKLHKFLGSDEEDKDSLQELSTEQKCFVEHILCTKPLPCRQPAPIRGFWIVPDILGPTMICITSTYECLIWPLLSTVHPASPPLLCTREDVEVAESPLRVLAETPDSFEKHIRSILQRSVANPAFLNCFTQLRKIKVETLFLRASEKDIAPPPEECLQLLSRATQVFREQYILKQDLAKEEIQRRVKLLCDQKKKQLEDLSYCREERKSLREMAERLADKYEEAKEKQEDIMNRMKKLLHSFHSELPVLSDSERDMKKELQLIPDQLRHLGNAIKQVTMKKDYQQQKMEKVLSLPKPTIILSAYQRKCIQSILKEEGEHIREMVKQINDIRNHVNF

SEQ ID NO: 22164 - protein, 94 aa, Artificial Sequence
  Synthetic polypeptide
SQLLRRLRIYSLREPQTPTNVIILSEAEEESLVLNKGRAYTASLGETAVAFDFGPLAAVPKTLFGQNGKDEVVAYPLYILYENGETFLTYISLL

SEQ ID NO: 22165 - protein, 458 aa, Artificial Sequence
  Synthetic polypeptide
SLEWSMSEDFSPLAGEIIMDNLQTLRCTITGLTMGQQYFVQVSAYNMKGWGPAQTTTPACASPSNWKDYDDREPRHKGQSEVLEGLLQQVRALHQHYSCRESTKLQTTGRKQSVSRSLKHLFHSSNKFVKTLKRGLYIAVIFYYKDNILVTNEDQVPIVEIDDSHTSSITQDFLWFTKLSCMWEDIRWLRQSIPISSSSSTVLQTRQKMLAATAQLQNLLGTHNLGRVYYEPIKDRHGNILIVTIREVEMLYSFFNGKWMQISKLQSQRKSLSTPEEPTALDILLITIQDILSYHKRSHQRLFPGLYLGYLKLCSSVDQIKVLVTQKLPNILCHVKIRENNNISREEWEWIQKLSGSESMESVDHTSDCPMQLFFYELQMAVKALLQQINIPLHQARNFRLYTQEVLEMGHNVSFLLLLPASDDVCTAPGQNNPYTPHSGFLNLPLQMFELGIVACFT

SEQ ID NO: 22166 - protein, 104 aa, Artificial Sequence
  Synthetic polypeptide
SSGLHISPMSDASCPGTSDSKFFSFWTLGLIPVVCKGLLGLWPRTEGCTVSLPTFEVLELGPALLHLSLQMTYCGTSPYDHWNGVCPKTFLLWLEKSSWIICRL

SEQ ID NO: 22167 - protein, 28 aa, Artificial Sequence
  Synthetic polypeptide
PIVGLHLMIIGMEYVRRLFSFGWRNHHG

SEQ ID NO: 22168 - protein, 844 aa, Artificial Sequence
  Synthetic polypeptide
SLEWSMSEDFSPLAGEIIMDNLQTLRCTITGLTMGQQYFVQVSAYNMKGWGPAQTTTPACASPSNWKDYDDREPRHKGQSEVLEGLLQQVRALHQHYSCRESTKLQTTGRKQSVSRSLKHLFHSSNKFVKTLKRGLYIAVIFYYKDNILVTNEDQVPIVEIDDSHTSSITQDFLWFTKLSCMWEDIRWLRQSIPISSSSSTVLQTRQKMLAATAQLQNLLGTHNLGRVYYEPIKDRHGNILIVTIREVEMLYSFFNGKWMQISKLQSQRKSLSTPEEPTALDILLITIQDILSYHKRSHQRLFPGLYLGYLKLCSSVDQIKVLVTQKLPNILCHVKIRENNNISREEWEWIQKLSGSESMESVDHTSDCPMQLFFYELQMAVKALLQQINIPLHQARNFRLYTQEVLEMGHNVSFLLLLPASDDVCTAPGQNNPYTPHSGFLNLPLQMFELVHFCSYREKFISLYCRLSAVVELDSLNTQQSLREAISDSEVAAAKQRHQQVLDFIQQIDEVWREMRWIMDALQYARYKQPVSGLPITKLIDPSDEQSLKKINSTSSSHIDCLPSPPPSPEMHRRKTVSDSQPCSDEEACSEVFLPTNSDYDSSDALSPRDLDLVYLSSHDIAQQTLSGLSGSAPDVLQVHDVKTPLGPGQDPQGEGPNPDHSCAEFLHSLTLTGFTPKNHAKTVSGGRPPLGFLGKRKPGKHPHYGGFSRHHRWLRIHSETQSLSLSEGIYTQHLSQACGLAQEPKEAKRAGPALDDPRGLTLAHAASLPEERNSSLQDARPSVRRLYVEPYAAAVVAQDEKPWASLSPPSGGRITLPSPTGPDVSQEGPTASPMSEILSSML

SEQ ID NO: 22169 - protein, 61 aa, Artificial Sequence
  Synthetic polypeptide
TSTEEDIQMASKHVKHRTSLGKCNLKQRDATIHLLEWPKSGTWTTPNAGIHAPPARPGASR

SEQ ID NO: 22170 - protein, 51 aa, Artificial Sequence
  Synthetic polypeptide
NGQNLEHGQHQMLEYMHHLLALEHRAEEQFLEHWLNPHCKPHCDRNRIHPV

SEQ ID NO: 22171 - protein, 58 aa, Artificial Sequence
  Synthetic polypeptide
ACETSYIIREMQLKTTRCHYTPIRMAKIWNMDNTKCWNTCTTCSPWSIALRSSSWSTG

SEQ ID NO: 22172 - protein, 221 aa, Artificial Sequence
  Synthetic polypeptide
GTFVCLQLNMVEDAMLMFDKTTNRHRGFGFVTFENEDVVEKVCEIHFHEINNKMVECKKAQPKEVMFPPGTRGRARGLPYTMDAFMLGMGMLGYPNFVATYGRGYPGFAPSYGYQFPGFPAAAYGPVAAAAVAAARGSVLNSYSAQPNFGAPASPAGSNPARPGGFPGANSPGPVADLYGPASQDSGVGNYISAASPQPGSGFGHGIAGPLIATAFTNGYH

SEQ ID NO: 22173 - protein, 15 aa, Artificial Sequence
  Synthetic polypeptide
GLLSVYSSTWWKMQC

SEQ ID NO: 22174 - protein, 17 aa, Artificial Sequence
  Synthetic polypeptide
DFCLSTAQHGGRCNADV

SEQ ID NO: 22175 - protein, 203 aa, Artificial Sequence
  Synthetic polypeptide
GTFVCLQLNMVEDAMLMFDKTTNRHRGFGFVTFENEDVVEKVCEIHFHEINNKMVECKKAQPKEVMFPPGTRGRARGLPYTMDAFMLGMGMLGYPNFVATYGRGYPGFAPSYGYQFPGFPAAAYGPVAAAAVAAARGSGSNPARPGGFPGANSPGPVADLYGPASQDSGVGNYISAASPQPGSGFGHGIAGPLIATAFTNGYH

SEQ ID NO: 22176 - protein, 130 aa, Artificial Sequence
  Synthetic polypeptide
GTFVCLQLNMVEDAMLMFDKTTNRHRGFGFVTFENEDVVEKVCEIHFHEINNKMVECKKAQPKEVMFPPGTRGRARGLPYTMDAFMLGMGMLGYPNFVATYGRGYPGFAPSYGYQFPDYLPVSQDIIFIN

SEQ ID NO: 22177 - protein, 275 aa, Artificial Sequence
  Synthetic polypeptide
MILERTLEPDSSDEEPPPVYSPPAYHMHVFDRPYPLAPPTPPPRIDALGSGAPTSQRRYRNWNPPLLGNLPDDFLRILPQQLDSIQGNAGGPKPGSGEGCPPAMAGPGPGDQESRWKQYLEDERIALFLQNEEFMKELQRNRDFLLALERDRLKYESQKSKSSSVAVGNDFGFSSPVPGTGDANPAVSEDALFRDKLKHMGKSTRRKLFELARAFSEKTKMRKSKRKHLLKHQSLGAAASTANLLDDVEGHACDEDFRGRRQEAPKVEEGLREGQ

SEQ ID NO: 22178 - protein, 101 aa, Artificial Sequence
  Synthetic polypeptide
MILERTLEPDSSDEEPPPVYSPPAYHMHVFDRPYPLAPPTPPPRIDALGSGAPTSQRRYRNWNPPLLGNLPDDFLRILPQQLDSIQGNAGGPKPGSGEGCP

SEQ ID NO: 22179 - protein, 25 aa, Artificial Sequence
  Synthetic polypeptide
ALPSSSMRLSSLTGTTCPWCWGQRP

SEQ ID NO: 22180 - protein, 29 aa, Artificial Sequence
  Synthetic polypeptide
GYHHLPGLPAPGAGANGHEEVPAHVPFLQ

SEQ ID NO: 22181 - protein, 323 aa, Artificial Sequence
  Synthetic polypeptide
GTRDPDVSLQHPSCVTLGKFLTLLSLAFFIHEAIITYRDYLPLVLGPTAMRKYLPTYRSYNDSVDPRIANVFTNAFRYGHTLIQPFMFRLDNRYQPMEPNPRVPLSRVFFASWRVVLEGGIDPILRGLMATPAKLNRQNQIAVDEIRERLFEQVMRIGLDLPALNMQRSRDHGLPGYNAWRRFCGLPQPETVGQLGTVLRNLKLARKLMEQYGTPNNIDIWMGGVSEPLKRKGRVGPLLACIIGTQFRKLRDGDRFWWENEGVFSMQQRQALAQISLPRIICDNTGITTVSKNNIFMSNSYPRDFVNCSTLPALNLASWREAS

SEQ ID NO: 22182 - protein, 757 aa, Artificial Sequence
  Synthetic polypeptide
ILKVDKGDRGQVLSCMADGRMRCMVDLGPCWAGGLTAEMKLLLALAGLLAILATPQPSEGAAPAVLGEVDTSLVLSSMEEAKQLVDKAYKERRESIKQRLRSGSASPMELLSYFKQPVAATRTAVRAADYLHVALDLLERKLRSLWRRPFNVTDVLTPAQLNVLSKSSGCAYQDVGVTCPEQDKYRTITGMCNNRRSPTLGASNRAFVRWLPAEYEDGFSLPYGWTPGVKRNGFPVALARAVSNEIVRFPTDQLTPDQERSLMFMQWGQLLDHDLDFTPEPAARASFVTGVNCETSCVQQPPCFPLKIPPNDPRIKNQADCIPFFRSCPACPGSNITIRNQINALTSFVDASMVYGSEEPLARNLRNMSNQLGLLAVNQRFQDNGRALLPFDNLHDDPCLLTNRSARIPCFLAGDTRSSEMPELTSMHTLLLREHNRLATELKSLNPRWDGERLYQEARKIVGAMVQIITYRDYLPLVLGPTAMRKYLPTYRSYNDSVDPRIANVFTNAFRYGHTLIQPFMFRLDNRYQPMEPNPRVPLSRVFFASWRVVLEGGIDPILRGLMATPAKLNRQNQIAVDEIRERLFEQVMRIGLDLPALNMQRSRDHGLPGYNAWRRFCGLPQPETVGQLGTVLRNLKLARKLMEQYGTPNNIDIWMGGVSEPLKRKGRVGPLLACIIGTQFRKLRDGDRFWWENEGVFSMQQRQALAQISLPRIICDNTGITTVSKNNIFMSNSYPRDFVNCSTLPALNLASWREAS

SEQ ID NO: 22183 - protein, 40 aa, Artificial Sequence
  Synthetic polypeptide
WEDEMHGGLRTLLGWGSHCRDEAASGPSRAPGHSGHAPAL

SEQ ID NO: 22184 - protein, 789 aa, Artificial Sequence
  Synthetic polypeptide
ILKVDKGDRGQVLSCMADGRMRCMVDLGPCWAGGLTAEMKLLLALAGLLAILATPQPSEGAAPAVLGEVDTSLVLSSMEEAKQLVDKAYKERRESIKQRLRSGSASPMELLSYFKQPVAATRTAVRAADYLHVALDLLERKLRSLWRRPFNVTDVLTPAQLNVLSKSSGCAYQDVGVTCPEQDKYRTITGMCNNRCGWLGVAAGTGLREASRTPQASRCQRPVLPCRRSPTLGASNRAFVRWLPAEYEDGFSLPYGWTPGVKRNGFPVALARAVSNEIVRFPTDQLTPDQERSLMFMQWGQLLDHDLDFTPEPAARASFVTGVNCETSCVQQPPCFPLKIPPNDPRIKNQADCIPFFRSCPACPGSNITIRNQINALTSFVDASMVYGSEEPLARNLRNMSNQLGLLAVNQRFQDNGRALLPFDNLHDDPCLLTNRSARIPCFLAGDTRSSEMPELTSMHTLLLREHNRLATELKSLNPRWDGERLYQEARKIVGAMVQIITYRDYLPLVLGPTAMRKYLPTYRSYNDSVDPRIANVFTNAFRYGHTLIQPFMFRLDNRYQPMEPNPRVPLSRVFFASWRVVLEGGIDPILRGLMATPAKLNRQNQIAVDEIRERLFEQVMRIGLDLPALNMQRSRDHGLPGYNAWRRFCGLPQPETVGQLGTVLRNLKLARKLMEQYGTPNNIDIWMGGVSEPLKRKGRVGPLLACIIGTQFRKLRDGDRFWWENEGVFSMQQRQALAQISLPRIICDNTGITTVSKNNIFMSNSYPRDFVNCSTLPALNLASWREAS

SEQ ID NO: 22185 - protein, 1612 aa, Artificial Sequence
  Synthetic polypeptide
RDVHKEGPQWLHVRDFDRLLRESQREVLRLQRQIALRNQRETLPLPPSWPPGPALQARAGAPAPGAPGEATPQEDADNLPVILGEPEKEQRVQQLESELSKKRKKCESLEQEARKKQRRCEELELQLRQAQNENARLVEENSRLSGRATEKEQVEWENAELRGQLLGVTQERDSALRKSQGLQSKLESLEQVLKHMREVAQRRQQLEVEHEQARLSLREKQEEVRRLQQAQAEAQREHEGAVQLLESTLDSMQARVRELEEQCRSQTEQFSLLAQELQAFRLHPGPLDLLTSALDCGSLGDCPPPPCCCSIPQPCRGSGPKDLDLPPGSPGRCTPKSSEPAPATLTGVPRRTAKKAESLSNSSHSESIHNSPKSCPTPEVDTASEVEELEADSVSLLPAAPEGSRGGARIQVFLARYSYNPFEGPNENPEAELPLTAGEYIYIYGNMDEDGFFEGELMDGRRGLVPSNFVERVSDDDLLTSLPPELADLSHSSGPELSFLSVGGGGSSSGGQSSVGRSQPRPEEEDAGDELSLSPSPEGLGEPPAVPYPRRLVVLKQLAHSVVLAWEPPPEQVELHGFHICVNGELRQALGPGAPPKAVLENLDLWAGPLHISVQALTSRGSSDPLRCCLAVGARAGVVPSQLRVHRLTATSAEITWVPGNSNLAHAIYLNGEECPPASPSTYWATFCHLRPGTPYQAQVEAQLPPQGPWEPGWERLEQRAATLQFTTLPAGPPDAPLDVQIEPGPSPGILIISWLPVTIDAAGTSNGVRVTGYAIYADGQKIMEVASPTAGSVLVELSQLQLLQVCREVVVRTMSPHGESADSIPAPITPALAPASLPARVSCPSPHPSPEARAPLASASPGPGDPSSPLQHPAPLGTQEPPGAPPASPSREMAKGSHEDPPAPCSQEEAGAAVLGTSEERTASTSTLGEKDPGPAAPSLAKQEAEWTAGEACPASSSTQGARAQQAPNTEMCQGGDPGSGLRPRAEKEDTAELGVHLVNSLVDHGRNSDLSDIQEEEEEEEEEEEEELGSRTCSFQKQVAGNSIRENGAKSQPDPFCETDSDEEILEQILELPLQQFCSKKLFSIPEEEEEEEEDEEEEKSGAGCSSRDPGPPEPALLGLGCDSGQPRRPGQCPLSPESSRAGDCLEDMPGLVGGSSRRRGGGSPEKPPSRRRPPDPREHCSRLLSNNGPQASGRLGPTRERGGLPVIEGPRTGLEASGRGRLGPSRRCSRGRALEPGLASCLSPKCLEISIEYDSEDEQEAGSGGISITSSCYPGDGEAWGTATVGRPRGPPKANSGPKPYPRLPAWEKGEPERRGRSATGRAKEPLSRATETGEARGQDGSGRRGPQKRGVRVLRPSTAELVPARSPSETLAYQHLPVRIFVALFDYDPVSMSPNPDAGEEELPFREGQILKVFGDKDADGFYQGEGGGRTGYIPCNMVAEVAVDSPAGRQQLLQRGYLSPDILLEGSGNGPFVYSTAHTTGPPPKPRRSKKAESEGPAQPCPGPPKLVPSADLKAPHSMVAAFDYNPQESSPNMDVEAELPFRAGDVITVFGGMDDDGFYYGELNGQRGLVPSNFLEGPGPEAGGLDREPRTPQAESQRTRRRRVQC

SEQ ID NO: 22186 - protein, 81 aa, Artificial Sequence
  Synthetic polypeptide
EGMFTRRVPSGSTCGTSIGCCASPSGRCCGCRGRSRCATSGRRSRSRRPGPRALLSRPEQGRLLPGPRERPRPRRMRTTYP

SEQ ID NO: 22187 - protein, 120 aa, Artificial Sequence
  Synthetic polypeptide
KGCSQGGSPVAPRAGLRSAAARVPAGGAAAAEADRAAQPAGDAPAPAVLAPGPCSPGQSRGACSRGPGRGHAPGGCGQPTRDSRGARERAEGAAAGIGAQQEAEEMREPGAGSPEKAEAM

SEQ ID NO: 22188 - protein, 1662 aa, Artificial Sequence
  Synthetic polypeptide
RDVHKEGPQWLHVRDFDRLLRESQREVLRLQRQIALRNQRETLPLPPSWPPGPALQARAGAPAPGAPGEATPQEDADNLPVILGEPEKEQRVQQLESELSKKRKKCESLEQEARKKQRRCEELELQLRQAQNENARLVEENSRLSGRATEKEQVEWENAELRGQLLGVTQERDSALRKSQGLQSKLESLEQVLKHMREVAQRRQQLEVEHEQARLSLREKQEEVRRLQQAQAEAQREHEGAVQLLESTLDSMQARVRELEEQCRSQTEQFSLLAQELQAFRLHPGPLDLLTSALDCGSLGDCPPPPCCCSIPQPCRGSGPKDLDLPPGSPGRCTPKSSEPAPATLTGVPRRTAKKAESLSNSSHSESIHNSPKSCPTPEVDTASEVEELEADSVSLLPAAPEGSRGGARIQVFLARYSYNPFEGPNENPEAELPLTAGEYIYIYGNMDEDGFFEGELMDGRRGLVPSNFVERVSDDDLLTSLPPELADLSHSSGPELSFLSVGGGGSSSGGQSSVGRSQPRPEEEDAGDELSLSPSPEGLGEPPAVPYPRRLVVLKQLAHSVVLAWEPPPEQVELHGFHICVNGELRQALGPGAPPKAVLENLDLWAGPLHISVQALTSRGSSDPLRCCLAVGARAGVVPSQLRVHRLTATSAEITWVPGNSNLAHAIYLNGEECPPASPSTYWATFCHLRPGTPYQAQVEAQLPPQGPWEPGWERLEQRAATLQFTTLPAGPPDAPLDVQIEPGPSPGILIISWLPVTIDAAGTSNGVRVTGYAIYADGQKIMEVASPTAGSVLVELSQLQLLQVCREVVVRTMSPHGESADSIPAPITPALAPASLPARVSCPSPHPSPEARAPLASASPGPGDPSSPLQHPAPLGTQEPPGAPPASPSREMAKGSHEDPPAPCSQEEAGAAVLGTSEERTASTSTLGEKDPGPAAPSLAKQEAEWTAGEACPASSSTQGARAQQAPNTEMCQGGDPGSGLRPRAEKEDTAELGVHLVNSLVDHGRNSDLSDIQEEEEEEEEEEEEELGSRTCSFQKQVAGNSIRENGAKSQPDPFCETDSDEEILEQILELPLQQFCSKKLFSIPEEEEEEEEDEEEEKSGAGCSSRDPGPPEPALLGLGCDSGQPRRPGQCPLSPESSRAGDCLEDMPGLVGGSSRRRGGGSPEKPPSRRRPPDPREHCSRLLSNNGPQASGRLGPTRERGGLPVIEGPRTGLEASGRGRLGPSRRCSRGRALEPGLASCLSPKCLEISIEYDSEDEQEAGSGGISITSSCYPGDGEAWGTATVGRPRGPPKANSGPKPYPRLPAWEKGEPERRGRSATGRAKEPLSRATETGEARGQDGSGRRGPQKRGVRVLRPSTAELVPARSPSETLAYQHLPVRIFVALFDYDPVSMSPNPDAGEEELPFREGQILKVFGDKDADGFYQGEGGGRTGYIPCNMVAEVAVDSPAGRQQLLQRGYLSPDILLEGSGNGPFVYSTAHTTGPPPKPRRSKKAESEGPAQPCPGPPKLVPSADLKAPHSMVAAFDYNPQESSPNMDVEAELPFRAGDVITVFGGMDDDGFYYGELNGQRGLVPSNFLEGPGPEAGGLDREPRTPQAESQDWGCTTQGSPGPPGGPCTPSSGSAPRIERGEPQGRSEKVWGFFSKGKQLLRRLGSGKKE

SEQ ID NO: 22189 - protein, 115 aa, Artificial Sequence
  Synthetic polypeptide
GIISIVCFSRSISERVERWKPREGDICVLSREFMLMQLTPWAKQHFLLRRYWALGNSLMFWWIMDQIQITAALMGAPLSMQQHFRAISGSLANCWMQEVTCDSTMRGVKTRRLGL

SEQ ID NO: 22190 - protein, 18 aa, Artificial Sequence
  Synthetic polypeptide
NAGNREREIFVFSHENLC

SEQ ID NO: 22191 - protein, 1463 aa, Artificial Sequence
  Synthetic polypeptide
TCRTLETARGRYLCSLTRIYVDAVNSLGQTALFVAALLGLRKFVDVLVDYGSDPNHRCFDGSTPVHAAAFSGNQWILSKLLDAGGDLRLHDERGQNPKTWALTAGKERSTQIVEFMQRCASHMQAIIQGFSYDLLKKIDSPQRLVYSPSWCGGLVQGNPNGSPNRLLKAGVISAQNIYSFGFGKFYLTGATQMAYLGSLPVIGEKEVIQADDEPTFSFFSGPYMVMTNLVWNGSRVTVKELNLPTHPHCSRLRLADLLIAEQEHSSKLRHPYLLQLMAVCLSQDLEKTRLVYERITIGTLFSVLHERRSQFPVLHMEVIVHLLLQISDALRYLHFQGFIHRSLSSYAVHIISPGEARLTNLEYMLESEDRGVQRDLTRVPLPTQLYNWAAPEVILQKAATVKSDIYSFSMIMQEILTDDIPWKGLDGSVVKKAVVSGNYLEADVRLPKPYYDIVKSGIHVKQKDRTMNLQDIRYILKNDLKDFTGAQRTQPTESPRVQRYGLHPDVNVYLGLTSEHPRETPDMEIIELKEMGSQPHSPRVHSLFTEGTLDPQAPDPCLMARETQNQDAPCPAPFMAEEASSPSTGQPSLCSFEINEIYSGCLILEDDIEEPPGAASSLEADGPNQVDELKSMEEELDKMEREACCFGSEDESSSKAETEYSFDDWDWQNGSLSSLSLPESTREAKSNLNNMSTTEEYLISKCVLDLKIMQTIMHENDDRLRNIEQILDEVEMKQKEQEERMSLWATSREFTNAYKLPLAVGPPSLNYIPPVLQLSGGQKPDTSGNYPTLPRFPRMLPTLCDPGKQNTDEQFQCTQGAKDSLETSRIQNTSSQGRPRESTAQAKATQFNSALFTLSSHRQGPSASPSCHWDSTRMSVEPVSSEIYNAESRNKDDGKVHLKWKMEVKEMAKKAATGQLTVPPWHPQSSLTLESEAENEPDALLQPPIRSPENTDWQRVIEYHRENDEPRGNGKFDKTGNNDCDSDQHGRQPRLGSFTSIRHPSPRQKEQPEHSEAFQASSDTLVAVEKSYSHQSMQSTCSPESSEDITDEFLTPDGEYFYSSTAQENLALETSSPIEEDFEGIQGAFAQPQVSGEEKFQMRKILGKNAEILPRSQFQPVRSTEDEQEETSKESPKELKEKDISLTDIQDLSSISYEPDSSFKEASCKTPKINHAPTSVSTPLSPGSVSSAASQYKDCLESITFQVKTEFASCWNSQEFIQTLSDDFISVRERAKKLDSLLTSSETPPSRLTGLKRLSSFIGAGSPSLVKACDSSPPHATQRRSLPKVEAFSQHHIDELPPPSQELLDDIELLKQQQGSSTVLHENTASDGGGTANDQRHLEEQETDSKKEDSSMLLSKETEDLGEDTERAHSTLDEDLERWLQPPEESVELQDLPKGSERETNIKDQKVGEEKRKREDSITPERRKSEGVLGTSEEDELKSCFWKRLGWSESSRIIVLDQSDLSD

SEQ ID NO: 22192 - protein, 1469 aa, Artificial Sequence
  Synthetic polypeptide
TCRTLETARGRYLCSLTRIYVDAVNSLGQTALFVAALLGLRKFVDVLVDYGSDPNHRCFDGSTPVHAAAFSGNQWILSKLLDAGGDLRLHDERGQNPKTWALTAGKERSTQIVEFMQRCASHMQAIIQGFSYDLLKKIDSPQRLVYSPSWCGGLVQGNPNGSPNRLLKAGVISAQNIYSFGFGKAMPWFQFYLTGATQMAYLGSLPVIGEKEVIQADDEPTFSFFSGPYMVMTNLVWNGSRVTVKELNLPTHPHCSRLRLADLLIAEQEHSSKLRHPYLLQLMAVCLSQDLEKTRLVYERITIGTLFSVLHERRSQFPVLHMEVIVHLLLQISDALRYLHFQGFIHRSLSSYAVHIISPGEARLTNLEYMLESEDRGVQRDLTRVPLPTQLYNWAAPEVILQKAATVKSDIYSFSMIMQEILTDDIPWKGLDGSVVKKAVVSGNYLEADVRLPKPYYDIVKSGIHVKQKDRTMNLQDIRYILKNDLKDFTGAQRTQPTESPRVQRYGLHPDVNVYLGLTSEHPRETPDMEIIELKEMGSQPHSPRVHSLFTEGTLDPQAPDPCLMARETQNQDAPCPAPFMAEEASSPSTGQPSLCSFEINEIYSGCLILEDDIEEPPGAASSLEADGPNQVDELKSMEEELDKMEREACCFGSEDESSSKAETEYSFDDWDWQNGSLSSLSLPESTREAKSNLNNMSTTEEYLISKCVLDLKIMQTIMHENDDRLRNIEQILDEVEMKQKEQEERMSLWATSREFTNAYKLPLAVGPPSLNYIPPVLQLSGGQKPDTSGNYPTLPRFPRMLPTLCDPGKQNTDEQFQCTQGAKDSLETSRIQNTSSQGRPRESTAQAKATQFNSALFTLSSHRQGPSASPSCHWDSTRMSVEPVSSEIYNAESRNKDDGKVHLKWKMEVKEMAKKAATGQLTVPPWHPQSSLTLESEAENEPDALLQPPIRSPENTDWQRVIEYHRENDEPRGNGKFDKTGNNDCDSDQHGRQPRLGSFTSIRHPSPRQKEQPEHSEAFQASSDTLVAVEKSYSHQSMQSTCSPESSEDITDEFLTPDGEYFYSSTAQENLALETSSPIEEDFEGIQGAFAQPQVSGEEKFQMRKILGKNAEILPRSQFQPVRSTEDEQEETSKESPKELKEKDISLTDIQDLSSISYEPDSSFKEASCKTPKINHAPTSVSTPLSPGSVSSAASQYKDCLESITFQVKTEFASCWNSQEFIQTLSDDFISVRERAKKLDSLLTSSETPPSRLTGLKRLSSFIGAGSPSLVKACDSSPPHATQRRSLPKVEAFSQHHIDELPPPSQELLDDIELLKQQQGSSTVLHENTASDGGGTANDQRHLEEQETDSKKEDSSMLLSKETEDLGEDTERAHSTLDEDLERWLQPPEESVELQDLPKGSERETNIKDQKVGEEKRKREDSITPERRKSEGVLGTSEEDELKSCFWKRLGWSESSRIIVLDQSDLSD

SEQ ID NO: 22193 - protein, 1423 aa, Artificial Sequence
  Synthetic polypeptide
TCRTLETARGRYLCSLTRIYVDAVNSLGQTALFVAALLGLRKFVDVLVDYGSDPNHRCFDGSTPVHAAAFSGNQWILSKLLDAGGDLRLHDERGQNPKTWALTAGKERSTQIVEFMQRCASHMQAIIQGFSYDLLKKIDSPQRLVYSPSWCGGLVQGNPNGSPNRLLKAGVISAQNIYSFGFGKFYLTGATQMAYLGSLPVIGEKEVIQADDEPTFSFFSGPYMVMTNLVWNGSRVTVKELNLPTHPHCSRLRLADLLIAEQEHSSKLRHPYLLQLMAVCLSQDLEKTRLVYERITIGTLFSVLHERRSQFPVLHMEVIVHLLLQISDALRYLHFQGFIHRSLSSYAVHIISPGEARLTNLEYMLESEDRGVQRDLTRVPLPTQLYNWAAPEVILQKAATVKSDIYSFSMIMQEILTDDIPWKGLDGSVVKKAVVSGNYLEADVRLPKPYYDIVKSGIHVKQKDRTMNLQDIRYILKNDLKDFTGAQRTQPTESPRVQRYGLHPDVNVYLGLTSEHPRETPDMEIIELKEMGSQPHSPRVHSLFTEGTLDPQAPDPCLMARETQNQDAPCPAPFMAEEASSPSTGQPSLCSFEINEIYSGCLILEDDIEEPPGAASSLEADGPNQVDELKSMEEELDKMEREACCFGSEDESSSKAETEYSFDDWDWQNGSLSSLSLPESTREAKSNLNNMSTTEEYLISKCVLDLKIMQTIMHENDDRLRNIEQILDEVEMKQKEQEERMSLWATSREFTNAYKLPLAVGPPSLNYIPPVLQLSGGQKPDTSGNYPTLPRFPRMLPTLCDPGKQNTDEQFQCTQGAKDSLETSRIQNTSSQGRPRESTAQAKATQFNSALFTLSSHRQGPSASPSCHWDSTRMSVEPVSSEIYNAESRNKDDGKVHLKWKMEVKEMAKKAATGQLTVPPWHPQSSLTLESEAENEPDALLQPPIRSPENTDWQRVIEYHRENDEPRGNGKFDKTGNNDCDSDQHGRQPRLGSFTSIRHPSPRQKEQPEHSEAFQASSDTLVAVEKSYSTSSPIEEDFEGIQGAFAQPQVSGEEKFQMRKILGKNAEILPRSQFQPVRSTEDEQEETSKESPKELKEKDISLTDIQDLSSISYEPDSSFKEASCKTPKINHAPTSVSTPLSPGSVSSAASQYKDCLESITFQVKTEFASCWNSQEFIQTLSDDFISVRERAKKLDSLLTSSETPPSRLTGLKRLSSFIGAGSPSLVKACDSSPPHATQRRSLPKVEAFSQHHIDELPPPSQELLDDIELLKQQQGSSTVLHENTASDGGGTANDQRHLEEQETDSKKEDSSMLLSKETEDLGEDTERAHSTLDEDLERWLQPPEESVELQDLPKGSERETNIKDQKVGEEKRKREDSITPERRKSEGVLGTSEEDELKSCFWKRLGWSESSRIIVLDQSDLSD

SEQ ID NO: 22194 - protein, 42 aa, Artificial Sequence
  Synthetic polypeptide
GRMQWLTPVISSLWEAEVGNIVQVTQPEGMHSTVSNQSQYYL

SEQ ID NO: 22195 - protein, 32 aa, Artificial Sequence
  Synthetic polypeptide
SHHFGRLRLATLYKSPSQKECTVLFQIKVSII

SEQ ID NO: 22196 - protein, 41 aa, Artificial Sequence
  Synthetic polypeptide
GRMQWLTPVISSLWEAEVGNIVQVTQPEGMHSTVSNQTSGI

SEQ ID NO: 22197 - protein, 62 aa, Artificial Sequence
  Synthetic polypeptide
SHHFGRLRLATLYKSPSQKECTVLFQIKPQGFRDTVVTSACSLQTEGSLSTRKRSRDPEEEL

SEQ ID NO: 22198 - protein, 49 aa, Artificial Sequence
  Synthetic polypeptide
SHHFGRLRLATLYKSPSQKECTVLFQIKPQGFRDTVVTSACSLQTEGSL

SEQ ID NO: 22199 - protein, 25 aa, Artificial Sequence
  Synthetic polypeptide
QHYQCSTPATRTSKLSLGRRSNTTA

SEQ ID NO: 22200 - protein, 913 aa, Artificial Sequence
  Synthetic polypeptide
SIINAPLQLRELVNCRWAEEVTQQLDTLQLCSLTKHEENEKDKCENHHEKLSVFCWTCKKCICHQCALWGGMHGGHTFKPLAEIYEQHVTKVNEEVAKLRRRLMELISLVQEVERNVEAVRNAKDERVREIRNAVEMMIARLDTQLKNKLITLMGQKTSLTQETELLESLLQEVEHQLRSCSKSELISKSSEILMMFQQVHRKPMASFVTTPVPPDFTSELVPSYDSATFVLENFSTLRQRADPVYSPPLQVSGLCWRLKVYPDGNGVVRGYYLSVFLELSAGLPETSKYEYRVEMVHQSCNDPTKNIIREFASDFEVGECWGYNRFFRLDLLANEGYLNPQNDTVILRFQVRSPTFFQKSRDQHWYITQLEAAQTSYIQQINNLKERLTIELSRTQKSRDLSPPDNHLSPQNDDALETRAKKSACSDMLLEGGPTTASVREAKEDEEDEEKIQNEDYHHELSDGDLDLDLVYEDEVNQLDGSSSSASSTATSNTEENDIDEETMSGENDVEYNNMELEEGELMEDAAAAGPAGSSHGYVGSSSRISRRTHLCSAATSSLLDIDPLILIHLLDLKDRSSIENLWGLQPRPPASLLQPTASYSRKDKDQRKQQAMWRVPSDLKMLKRLKTQMAEVRCMKTDVKNTLSEIKSSSAASGDMQTSLFSADQAALAACGTENSGRLQDLGMELLAKSSVANCYIRNSTNKKSNSPKPARSSVAGSLSLRRAVDPGENSRSKGDCQTLSEGSPGSSQSGSRHSSPRALIHGSIGDILPKTEDRQCKALDSDAVVVAVFSGLPAVEKRRKMVTLGANAKGGHLEGLQMTDLENNSETGELQPVLPEGASAAPEEGMSSDSDIECDTENEEQEEHTSVGGFHDSFMVMTQPPDEDTHSSFPDGEQIGPEDLSFNTDENSGR

SEQ ID NO: 22201 - protein, 11 aa, Artificial Sequence
  Synthetic polypeptide
ALSMLHSSYEN

SEQ ID NO: 22202 - protein, 62 aa, Artificial Sequence
  Synthetic polypeptide
SIINAPLQLRELVNCRWAEEVTQQLDTLQLCSLTKHEENEKDNMADIPLNLWQKFMSNTSLK

SEQ ID NO: 22203 - protein, 52 aa, Artificial Sequence
  Synthetic polypeptide
SIINAPLQLRELVNCRWAEEVTQQLDTLQLCSLTKHEENEKDKYVLNFFVQY

SEQ ID NO: 22204 - protein, 273 aa, Artificial Sequence
  Synthetic polypeptide
ERHTENAYREEKQCDHRDRDWSDAATNQGVLTATRSQKRQGTDSSPETISESSSCPSCGQTCHMSGKLTNVPACVLITPGDSKAVLPPTLPQPASHFPPPPPPPPLPPPPPPLAPVLLRKPSLAKALQAGPLKKDGPMQITVKDLLTVKLKKTQSLDEKRKLIPSPKARNPLVTVSDLQHVTLKPNSKVLSTRVTNVLITPGKSQMDLRKLLRKVDVERSPGGTPLTNKENMETGTGLTPVMTQALRRKFQLAHPRSPTPTLPLSTSSFDEQN

SEQ ID NO: 22205 - protein, 32 aa, Artificial Sequence
  Synthetic polypeptide
QLLEAKRGKEPILPQRPSQKVLPVQAVVKHVT

SEQ ID NO: 22206 - protein, 31 aa, Artificial Sequence
  Synthetic polypeptide
KPKEARNRFFPRDHLRKFFLSKLWSNMSHEW

SEQ ID NO: 22207 - protein, 112 aa, Artificial Sequence
  Synthetic polypeptide
ERHTENAYREEKQCDHRDRDWSDAATNQGVLTATRSQKRQGTDSSPETISESSSCPSCGQTCHMSGKLTNVPACVLITPGDSKAVLPPTLPQPASHFPPPPPPPPLPPPPPP

SEQ ID NO: 22208 - protein, 351 aa, Artificial Sequence
  Synthetic polypeptide
RQSHCRSSMRNYAEYVIRKWFPYLDPPNERLILEALKQLYQCDAIDRSGHVTRLGLSMVEFPLPPHLTCAVIKAASLDCEDLLLPIAAMLSVENVFIRPVDPEYQKEAEQRHRELAAKAGGFNDFATLAVIFEQCKSSGAPASWCQKHWIHWRCLFSAFRVEAQLRELIRKLKQQSDFPKETFEGPKHEVLRRCLCAGYFKNVARRSVGRTFCTMDGRGSPVHIHPSSALHEQETKLEWIIFHEVLVTTKVYARIVCPIRYEWVRDLLPKLHEFNAHDLSSVARREVREDARRRWTNKENVKQLKDGISKDVLKKMQRRNDDKSISDARARFLERKQQRTQDHSDTRKETG

SEQ ID NO: 22209 - protein, 23 aa, Artificial Sequence
  Synthetic polypeptide
EIMQNTLSENGFPIWIHLMRDLF

SEQ ID NO: 22210 - protein, 21 aa, Artificial Sequence
  Synthetic polypeptide
VIYEKLCRIRYQKMVSLFGST

SEQ ID NO: 22211 - protein, 33 aa, Artificial Sequence
  Synthetic polypeptide
AWAVKTPLSCDHTTALQPGQQGSTYSLSYISCL

SEQ ID NO: 22212 - protein, 281 aa, Artificial Sequence
  Synthetic polypeptide
AVITLLPSSLGNRGPHIASVTLAAYECNSVNFPEPPYPDQIICPDEEGTEGTISLWSIISKVRIEACMWGIGTAIGELPPYFMARAARLSGAEPDDEEYQEFEEMLEHAESAQDFASRAKLAVQKLVQKVGFFGILACASIPNPLFDLAGITCGHFLVPFWTFFGATLIGKAIIKMHIQKIFVIITFSKHIVEQMVAFIGAVPGIGPSLQKPFQEYLEAQRQKLHHKSEMGTPQGENWLSWMFEKLVVVMVCYFILSIINSMAQSYAKRIQQRLNSEEKTK

SEQ ID NO: 22213 - protein, 14 aa, Artificial Sequence
  Synthetic polypeptide
SHYCPPAWATGVHI

SEQ ID NO: 22214 - protein, 25 aa, Artificial Sequence
  Synthetic polypeptide
AWAVKTPLSCDHTTALQPGQQGSTY

SEQ ID NO: 22215 - protein, 17 aa, Artificial Sequence
  Synthetic polypeptide
AVITLLPSSLGNRGPHI

SEQ ID NO: 22216 - protein, 7 aa, Artificial Sequence
  Synthetic polypeptide
SEVLSPA

SEQ ID NO: 22217 - protein, 47 aa, Artificial Sequence
  Synthetic polypeptide
ASLKCCPRHRSISAEAISGVPGGSTAEASPQKRNGHTTGRKLVVLDV

SEQ ID NO: 22218 - protein, 62 aa, Artificial Sequence
  Synthetic polypeptide
SQLLRRLRQEDHLSPGVHGFSRMVRTREQVWSASRTQLVYHLHAVVATVERICQIRCQPCGN

SEQ ID NO: 22219 - protein, 1233 aa, Artificial Sequence
  Synthetic polypeptide
AQEFTALVGWLERESRYGLQAGHNWFIISMQWWQQWKEYVKYDANPVVIEPSSVLNGGKYSFGTAAHPMEQVEDRIGSSLSYVNTTEEKFSDNISTASEASETAGSGFLYSATPGADVCFARQHNTSDNNNQCLLGANGNILLHLNPQKPGAIDNQPLVTQEPVKATSLTLEGGRLKRTPQLIHGRDYEMVPEPVWRALYHWYGANLALPRPVIKNSKTDIPELELFPRYLLFLRQQPATRTQQSNIWVNMGNVPSPNAPLKRVLAYTGCFSRMQTIKEIHEYLSQRLRIKEEDMRLWLYNSENYLTLLDDEDHKLEYLKIQDEQHLVIEVRNKDMSWPEEMSFIANSSKIDRHKVPTEKGATGLSNLGNTCFMNSSIQCVSNTQPLTQYFISGRHLYELNRTNPIGMKGHMAKCYGDLVQELWSGTQKNVAPLKLRWTIAKYAPRFNGFQQQDSQELLAFLLDGLHEDLNRVHEKPYVELKDSDGRPDWEVAAEAWDNHLRRNRSIVVDLFHGQLRSQVKCKTCGHISVRFDPFNFLSLPLPMDSYMHLEITVIKLDGTTPVRYGLRLNMDEKYTGLKKQLSDLCGLNSEQILLAEVHGSNIKNFPQDNQKVRLSVSGFLCAFEIPVPVSPISASSPTQTDFSSSPSTNEMFTLTTNGDLPRPIFIPNGMPNTVVPCGTEKNFTNGMVNGHMPSLPDSPFTGYIIAVHRKMMRTELYFLSSQKNRPSLFGMPLIVPCTVHTRKKDLYDAVWIQVSRLASPLPPQEASNHAQDCDDSMGYQYPFTLRVVQKDGNSCAWCPWYRFCRGCKIDCGEDRAFIGNAYIAVDWDPTALHLRYQTSQERVVDEHESVEQSRRAQAEPINLDSCLRAFTSEEELGENEMYYCSKCKTHCLATKKLDLWRLPPILIIHLKRFQFVNGRWIKSQKIVKFPRESFDPSAFLVPRDPALCQHKPLTPQGDELSEPRILAREVKKVDAQSSAGEEDVLLSKSPSSLSANIISSPKGSPSSSRKSGTSCPSSKNSSPNSSPRTLGRSKGRLRLPQIGSKNKLSSSKENLDASKENGAGQICELADALSRGHVLGGSQPELVTPQDHEVALANGFLYEHEACGNGYSNGQLGNHSEEDSTDDQREDTRIKPIYNLYAISCHSGILGGGHYVTYAKNPNCKWYCYNDSSCKELHPDEIDTDSAYILFYEQQGIDYAQFLPKTDGKKMADTSSMDEDFESDYKKYCVLQ

SEQ ID NO: 22220 - protein, 479 aa, Artificial Sequence
  Synthetic polypeptide
AQEFTALVGWLERESRYGLQAGHNWFIISMQWWQQWKEYVKYDANPVVIEPSSVLNGGKYSFGTAAHPMEQVEDRIGSSLSYVNTTEEKFSDNISTASEASETAGSGFLYSATPGADVCFARQHNTSDNNNQCLLGANGNILLHLNPQKPGAIDNQPLVTQEPVKATSLTLEGGRLKRTPQLIHGRDYEMVPEPVWRALYHWYGANLALPRPVIKNSKTDIPELELFPRYLLFLRQQPATRTQQSNIWVNMGNVPSPNAPLKRVLAYTGCFSRMQTIKEIHEYLSQRLRIKEEDMRLWLYNSENYLTLLDDEDHKLEYLKIQDEQHLVIEVRNKDMSWPEEMSFIANSSKIDRHKVPTEKGATGLSNLGNTCFMNSSIQCVSNTQPLTQYFISGRHLYELNRTNPIGMKGHMAKCYGDLVQELWSGTQKNVAPLKLRWTIAKYAPRFNGFQQQDSQELLAFLLDGLHEDLNRVHEKPYV

SEQ ID NO: 22221 - protein, 58 aa, Artificial Sequence
  Synthetic polypeptide
AQEFTALVGWLERESRYGLQAGHNWFIISMQWWQQWKEYVKYDANPVVIEPSSVLNGG

SEQ ID NO: 22222 - protein, 21 aa, Artificial Sequence
  Synthetic polypeptide
PQHLGRPRWVILLWKTIRSGV

SEQ ID NO: 22223 - protein, 35 aa, Artificial Sequence
  Synthetic polypeptide
CGGSHLCNPSTLGGQDGSSYSGRLSDLECEKCSCQ

SEQ ID NO: 22224 - protein, 1289 aa, Artificial Sequence
  Synthetic polypeptide
VVALTCVTPAPWEAKMGHLTLEDYQIWSVKNVLANEFLNLLFQVCHIVLGLRPATPEEEGQIIRGWLERESRYGLQAGHNWFIISMQWWQQWKEYVKYDANPVVIEPSSVLNGGKYSFGTAAHPMEQVEDRIGSSLSYVNTTEEKFSDNISTASEASETAGSGFLYSATPGADVCFARQHNTSDNNNQCLLGANGNILLHLNPQKPGAIDNQPLVTQEPVKATSLTLEGGRLKRTPQLIHGRDYEMVPEPVWRALYHWYGANLALPRPVIKNSKTDIPELELFPRYLLFLRQQPATRTQQSNIWVNMGNVPSPNAPLKRVLAYTGCFSRMQTIKEIHEYLSQRLRIKEEDMRLWLYNSENYLTLLDDEDHKLEYLKIQDEQHLVIEVRNKDMSWPEEMSFIANSSKIDRHKVPTEKGATGLSNLGNTCFMNSSIQCVSNTQPLTQYFISGRHLYELNRTNPIGMKGHMAKCYGDLVQELWSGTQKNVAPLKLRWTIAKYAPRFNGFQQQDSQELLAFLLDGLHEDLNRVHEKPYVELKDSDGRPDWEVAAEAWDNHLRRNRSIVVDLFHGQLRSQVKCKTCGHISVRFDPFNFLSLPLPMDSYMHLEITVIKLDGTTPVRYGLRLNMDEKYTGLKKQLSDLCGLNSEQILLAEVHGSNIKNFPQDNQKVRLSVSGFLCAFEIPVPVSPISASSPTQTDFSSSPSTNEMFTLTTNGDLPRPIFIPNGMPNTVVPCGTEKNFTNGMVNGHMPSLPDSPFTGYIIAVHRKMMRTELYFLSSQKNRPSLFGMPLIVPCTVHTRKKDLYDAVWIQVSRLASPLPPQEASNHAQDCDDSMGYQYPFTLRVVQKDGNSCAWCPWYRFCRGCKIDCGEDRAFIGNAYIAVDWDPTALHLRYQTSQERVVDEHESVEQSRRAQAEPINLDSCLRAFTSEEELGENEMYYCSKCKTHCLATKKLDLWRLPPILIIHLKRFQFVNGRWIKSQKIVKFPRESFDPSAFLVPRDPALCQHKPLTPQGDELSEPRILAREVKKVDAQSSAGEEDVLLSKSPSSLSANIISSPKGSPSSSRKSGTSCPSSKNSSPNSSPRTLGRSKGRLRLPQIGSKNKLSSSKENLDASKENGAGQICELADALSRGHVLGGSQPELVTPQDHEVALANGFLYEHEACGNGYSNGQLGNHSEEDSTDDQREDTRIKPIYNLYAISCHSGILGGGHYVTYAKNPNCKWYCYNDSSCKELHPDEIDTDSAYILFYEQQGIDYAQFLPKTDGKKMADTSSMDEDFESDYKKYCVLQ

SEQ ID NO: 22225 - protein, 535 aa, Artificial Sequence
  Synthetic polypeptide
VVALTCVTPAPWEAKMGHLTLEDYQIWSVKNVLANEFLNLLFQVCHIVLGLRPATPEEEGQIIRGWLERESRYGLQAGHNWFIISMQWWQQWKEYVKYDANPVVIEPSSVLNGGKYSFGTAAHPMEQVEDRIGSSLSYVNTTEEKFSDNISTASEASETAGSGFLYSATPGADVCFARQHNTSDNNNQCLLGANGNILLHLNPQKPGAIDNQPLVTQEPVKATSLTLEGGRLKRTPQLIHGRDYEMVPEPVWRALYHWYGANLALPRPVIKNSKTDIPELELFPRYLLFLRQQPATRTQQSNIWVNMGNVPSPNAPLKRVLAYTGCFSRMQTIKEIHEYLSQRLRIKEEDMRLWLYNSENYLTLLDDEDHKLEYLKIQDEQHLVIEVRNKDMSWPEEMSFIANSSKIDRHKVPTEKGATGLSNLGNTCFMNSSIQCVSNTQPLTQYFISGRHLYELNRTNPIGMKGHMAKCYGDLVQELWSGTQKNVAPLKLRWTIAKYAPRFNGFQQQDSQELLAFLLDGLHEDLNRVHEKPYV

SEQ ID NO: 22226 - protein, 75 aa, Artificial Sequence
  Synthetic polypeptide
VVALTCVTPAPWEAKMGHLTLEDYQIWSVKNVLANEFLNLLFQVCHIVLGLRPATPEEEGQIIRTLETDQIYTRN

SEQ ID NO: 22227 - protein, 1573 aa, Artificial Sequence
  Synthetic polypeptide
MNAVISGVSFLSQECHPYKGRIQPPSLSLLHVFSCSSAFRYGMMEEQEGPFAGCRCLDLGLLSLPNYIFSLFSSESGNYVIREEMERMLHVVDGKVPDTLRKCFSEGEKVNYEKFRNWLFLNKDAFTFSRWLLSGGVYVTLTDDSDTPTFYQTLAGVTHLEESDIIDLEKRYWLLKAQSRTGRFDLETFGPLVSPPIRPSLSEGLFNAFDENRDNHIDFKEISCGLSACCRGPLAERQKFCFKVFDVDRDGVLSRVELRDMVVALLEVWKDNRTDDIPELHMDLSDIVEGILNAHDTTKMGHLTLEDYQIWSVKNVLANEFLNLLFQVCHIVLGLRPATPEEEGQIIRGWLERESRYGLQAGHNWFIISMQWWQQWKEYVKYDANPVVIEPSSVLNGGKYSFGTAAHPMEQVEDRIGSSLSYVNTTEEKFSDNISTASEASETAGSGFLYSATPGADVCFARQHNTSDNNNQCLLGANGNILLHLNPQKPGAIDNQPLVTQEPVKATSLTLEGGRLKRTPQLIHGRDYEMVPEPVWRALYHWYGANLALPRPVIKNSKTDIPELELFPRYLLFLRQQPATRTQQSNIWVNMGNVPSPNAPLKRVLAYTGCFSRMQTIKEIHEYLSQRLRIKEEDMRLWLYNSENYLTLLDDEDHKLEYLKIQDEQHLVIEVRNKDMSWPEEMSFIANSSKIDRHKVPTEKGATGLSNLGNTCFMNSSIQCVSNTQPLTQYFISGRHLYELNRTNPIGMKGHMAKCYGDLVQELWSGTQKNVAPLKLRWTIAKYAPRFNGFQQQDSQELLAFLLDGLHEDLNRVHEKPYVELKDSDGRPDWEVAAEAWDNHLRRNRSIVVDLFHGQLRSQVKCKTCGHISVRFDPFNFLSLPLPMDSYMHLEITVIKLDGTTPVRYGLRLNMDEKYTGLKKQLSDLCGLNSEQILLAEVHGSNIKNFPQDNQKVRLSVSGFLCAFEIPVPVSPISASSPTQTDFSSSPSTNEMFTLTTNGDLPRPIFIPNGMPNTVVPCGTEKNFTNGMVNGHMPSLPDSPFTGYIIAVHRKMMRTELYFLSSQKNRPSLFGMPLIVPCTVHTRKKDLYDAVWIQVSRLASPLPPQEASNHAQDCDDSMGYQYPFTLRVVQKDGNSCAWCPWYRFCRGCKIDCGEDRAFIGNAYIAVDWDPTALHLRYQTSQERVVDEHESVEQSRRAQAEPINLDSCLRAFTSEEELGENEMYYCSKCKTHCLATKKLDLWRLPPILIIHLKRFQFVNGRWIKSQKIVKFPRESFDPSAFLVPRDPALCQHKPLTPQGDELSEPRILAREVKKVDAQSSAGEEDVLLSKSPSSLSANIISSPKGSPSSSRKSGTSCPSSKNSSPNSSPRTLGRSKGRLRLPQIGSKNKLSSSKENLDASKENGAGQICELADALSRGHVLGGSQPELVTPQDHEVALANGFLYEHEACGNGYSNGQLGNHSEEDSTDDQREDTRIKPIYNLYAISCHSGILGGGHYVTYAKNPNCKWYCYNDSSCKELHPDEIDTDSAYILFYEQQGIDYAQFLPKTDGKKMADTSSMDEDFESDYKKYCVLQ

SEQ ID NO: 22228 - protein, 66 aa, Artificial Sequence
  Synthetic polypeptide
WKSKKVLLPDAGALTLDFLASRITFLVFFQVNLGTMLYGKKWKECSTWWMVKSQIHSGSVSQRVKR

SEQ ID NO: 22229 - protein, 6 aa, Artificial Sequence
  Synthetic polypeptide
PPELHF

SEQ ID NO: 22230 - protein, 819 aa, Artificial Sequence
  Synthetic polypeptide
MNAVISGVSFLSQECHPYKGRIQPPSLSLLHVFSCSSAFRYGMMEEQEGPFAGCRCLDLGLLSLPNYIFSLFSSESGNYVIREEMERMLHVVDGKVPDTLRKCFSEGEKVNYEKFRNWLFLNKDAFTFSRWLLSGGVYVTLTDDSDTPTFYQTLAGVTHLEESDIIDLEKRYWLLKAQSRTGRFDLETFGPLVSPPIRPSLSEGLFNAFDENRDNHIDFKEISCGLSACCRGPLAERQKFCFKVFDVDRDGVLSRVELRDMVVALLEVWKDNRTDDIPELHMDLSDIVEGILNAHDTTKMGHLTLEDYQIWSVKNVLANEFLNLLFQVCHIVLGLRPATPEEEGQIIRGWLERESRYGLQAGHNWFIISMQWWQQWKEYVKYDANPVVIEPSSVLNGGKYSFGTAAHPMEQVEDRIGSSLSYVNTTEEKFSDNISTASEASETAGSGFLYSATPGADVCFARQHNTSDNNNQCLLGANGNILLHLNPQKPGAIDNQPLVTQEPVKATSLTLEGGRLKRTPQLIHGRDYEMVPEPVWRALYHWYGANLALPRPVIKNSKTDIPELELFPRYLLFLRQQPATRTQQSNIWVNMGNVPSPNAPLKRVLAYTGCFSRMQTIKEIHEYLSQRLRIKEEDMRLWLYNSENYLTLLDDEDHKLEYLKIQDEQHLVIEVRNKDMSWPEEMSFIANSSKIDRHKVPTEKGATGLSNLGNTCFMNSSIQCVSNTQPLTQYFISGRHLYELNRTNPIGMKGHMAKCYGDLVQELWSGTQKNVAPLKLRWTIAKYAPRFNGFQQQDSQELLAFLLDGLHEDLNRVHEKPYV

SEQ ID NO: 22231 - protein, 359 aa, Artificial Sequence
  Synthetic polypeptide
MNAVISGVSFLSQECHPYKGRIQPPSLSLLHVFSCSSAFRYGMMEEQEGPFAGCRCLDLGLLSLPNYIFSLFSSESGNYVIREEMERMLHVVDGKVPDTLRKCFSEGEKVNYEKFRNWLFLNKDAFTFSRWLLSGGVYVTLTDDSDTPTFYQTLAGVTHLEESDIIDLEKRYWLLKAQSRTGRFDLETFGPLVSPPIRPSLSEGLFNAFDENRDNHIDFKEISCGLSACCRGPLAERQKFCFKVFDVDRDGVLSRVELRDMVVALLEVWKDNRTDDIPELHMDLSDIVEGILNAHDTTKMGHLTLEDYQIWSVKNVLANEFLNLLFQVCHIVLGLRPATPEEEGQIIRTLETDQIYTRN

SEQ ID NO: 22232 - protein, 106 aa, Artificial Sequence
  Synthetic polypeptide
MNAVISGVSFLSQECHPYKGRIQPPSLSLLHVFSCSSAFRYGMMEEQEGPFAGCRCLDLGLLSLPNYIFSLFSSESGNYVIREEMERMLHVVDGKVPDTLRKCFSE

SEQ ID NO: 22233 - protein, 62 aa, Artificial Sequence
  Synthetic polypeptide
WKSKKVLLPDAGALTLDFLASRITFLVFFQVNLGTMLYGKKWKECSTWWMVKSQIHSGSVSQ

SEQ ID NO: 22234 - protein, 20 aa, Artificial Sequence
  Synthetic polypeptide
RLNTGDLLFFWWNIQRAALQ

SEQ ID NO: 22235 - protein, 1569 aa, Artificial Sequence
  Synthetic polypeptide
SLWALVSPSPKMRIPVFLVESSKGLILVIYCSFGGTSKGLHFNNLIVGLVLLTRGKDEEKAKYIFSLFSSESGNYVIREEMERMLHVVDGKVPDTLRKCFSEGEKVNYEKFRNWLFLNKDAFTFSRWLLSGGVYVTLTDDSDTPTFYQTLAGVTHLEESDIIDLEKRYWLLKAQSRTGRFDLETFGPLVSPPIRPSLSEGLFNAFDENRDNHIDFKEISCGLSACCRGPLAERQKFCFKVFDVDRDGVLSRVELRDMVVALLEVWKDNRTDDIPELHMDLSDIVEGILNAHDTTKMGHLTLEDYQIWSVKNVLANEFLNLLFQVCHIVLGLRPATPEEEGQIIRGWLERESRYGLQAGHNWFIISMQWWQQWKEYVKYDANPVVIEPSSVLNGGKYSFGTAAHPMEQVEDRIGSSLSYVNTTEEKFSDNISTASEASETAGSGFLYSATPGADVCFARQHNTSDNNNQCLLGANGNILLHLNPQKPGAIDNQPLVTQEPVKATSLTLEGGRLKRTPQLIHGRDYEMVPEPVWRALYHWYGANLALPRPVIKNSKTDIPELELFPRYLLFLRQQPATRTQQSNIWVNMGNVPSPNAPLKRVLAYTGCFSRMQTIKEIHEYLSQRLRIKEEDMRLWLYNSENYLTLLDDEDHKLEYLKIQDEQHLVIEVRNKDMSWPEEMSFIANSSKIDRHKVPTEKGATGLSNLGNTCFMNSSIQCVSNTQPLTQYFISGRHLYELNRTNPIGMKGHMAKCYGDLVQELWSGTQKNVAPLKLRWTIAKYAPRFNGFQQQDSQELLAFLLDGLHEDLNRVHEKPYVELKDSDGRPDWEVAAEAWDNHLRRNRSIVVDLFHGQLRSQVKCKTCGHISVRFDPFNFLSLPLPMDSYMHLEITVIKLDGTTPVRYGLRLNMDEKYTGLKKQLSDLCGLNSEQILLAEVHGSNIKNFPQDNQKVRLSVSGFLCAFEIPVPVSPISASSPTQTDFSSSPSTNEMFTLTTNGDLPRPIFIPNGMPNTVVPCGTEKNFTNGMVNGHMPSLPDSPFTGYIIAVHRKMMRTELYFLSSQKNRPSLFGMPLIVPCTVHTRKKDLYDAVWIQVSRLASPLPPQEASNHAQDCDDSMGYQYPFTLRVVQKDGNSCAWCPWYRFCRGCKIDCGEDRAFIGNAYIAVDWDPTALHLRYQTSQERVVDEHESVEQSRRAQAEPINLDSCLRAFTSEEELGENEMYYCSKCKTHCLATKKLDLWRLPPILIIHLKRFQFVNGRWIKSQKIVKFPRESFDPSAFLVPRDPALCQHKPLTPQGDELSEPRILAREVKKVDAQSSAGEEDVLLSKSPSSLSANIISSPKGSPSSSRKSGTSCPSSKNSSPNSSPRTLGRSKGRLRLPQIGSKNKLSSSKENLDASKENGAGQICELADALSRGHVLGGSQPELVTPQDHEVALANGFLYEHEACGNGYSNGQLGNHSEEDSTDDQREDTRIKPIYNLYAISCHSGILGGGHYVTYAKNPNCKWYCYNDSSCKELHPDEIDTDSAYILFYEQQGIDYAQFLPKTDGKKMADTSSMDEDFESDYKKYCVLQ

SEQ ID NO: 22236 - protein, 2 aa, Artificial Sequence
  Synthetic polypeptide
YW

SEQ ID NO: 22237 - protein, 815 aa, Artificial Sequence
  Synthetic polypeptide
SLWALVSPSPKMRIPVFLVESSKGLILVIYCSFGGTSKGLHFNNLIVGLVLLTRGKDEEKAKYIFSLFSSESGNYVIREEMERMLHVVDGKVPDTLRKCFSEGEKVNYEKFRNWLFLNKDAFTFSRWLLSGGVYVTLTDDSDTPTFYQTLAGVTHLEESDIIDLEKRYWLLKAQSRTGRFDLETFGPLVSPPIRPSLSEGLFNAFDENRDNHIDFKEISCGLSACCRGPLAERQKFCFKVFDVDRDGVLSRVELRDMVVALLEVWKDNRTDDIPELHMDLSDIVEGILNAHDTTKMGHLTLEDYQIWSVKNVLANEFLNLLFQVCHIVLGLRPATPEEEGQIIRGWLERESRYGLQAGHNWFIISMQWWQQWKEYVKYDANPVVIEPSSVLNGGKYSFGTAAHPMEQVEDRIGSSLSYVNTTEEKFSDNISTASEASETAGSGFLYSATPGADVCFARQHNTSDNNNQCLLGANGNILLHLNPQKPGAIDNQPLVTQEPVKATSLTLEGGRLKRTPQLIHGRDYEMVPEPVWRALYHWYGANLALPRPVIKNSKTDIPELELFPRYLLFLRQQPATRTQQSNIWVNMGNVPSPNAPLKRVLAYTGCFSRMQTIKEIHEYLSQRLRIKEEDMRLWLYNSENYLTLLDDEDHKLEYLKIQDEQHLVIEVRNKDMSWPEEMSFIANSSKIDRHKVPTEKGATGLSNLGNTCFMNSSIQCVSNTQPLTQYFISGRHLYELNRTNPIGMKGHMAKCYGDLVQELWSGTQKNVAPLKLRWTIAKYAPRFNGFQQQDSQELLAFLLDGLHEDLNRVHEKPYV

SEQ ID NO: 22238 - protein, 355 aa, Artificial Sequence
  Synthetic polypeptide
SLWALVSPSPKMRIPVFLVESSKGLILVIYCSFGGTSKGLHFNNLIVGLVLLTRGKDEEKAKYIFSLFSSESGNYVIREEMERMLHVVDGKVPDTLRKCFSEGEKVNYEKFRNWLFLNKDAFTFSRWLLSGGVYVTLTDDSDTPTFYQTLAGVTHLEESDIIDLEKRYWLLKAQSRTGRFDLETFGPLVSPPIRPSLSEGLFNAFDENRDNHIDFKEISCGLSACCRGPLAERQKFCFKVFDVDRDGVLSRVELRDMVVALLEVWKDNRTDDIPELHMDLSDIVEGILNAHDTTKMGHLTLEDYQIWSVKNVLANEFLNLLFQVCHIVLGLRPATPEEEGQIIRTLETDQIYTRN

SEQ ID NO: 22239 - protein, 102 aa, Artificial Sequence
  Synthetic polypeptide
SLWALVSPSPKMRIPVFLVESSKGLILVIYCSFGGTSKGLHFNNLIVGLVLLTRGKDEEKAKYIFSLFSSESGNYVIREEMERMLHVVDGKVPDTLRKCFSE

SEQ ID NO: 22240 - protein, 1573 aa, Artificial Sequence
  Synthetic polypeptide
EAEQMLVPCLYRLQNREPKKPLFFIKITQPQVIYCSFGGTSKGLHFNNLIVGLVLLTRGKDEEKAKYIFSLFSSESGNYVIREEMERMLHVVDGKVPDTLRKCFSEGEKVNYEKFRNWLFLNKDAFTFSRWLLSGGVYVTLTDDSDTPTFYQTLAGVTHLEESDIIDLEKRYWLLKAQSRTGRFDLETFGPLVSPPIRPSLSEGLFNAFDENRDNHIDFKEISCGLSACCRGPLAERQKFCFKVFDVDRDGVLSRVELRDMVVALLEVWKDNRTDDIPELHMDLSDIVEGILNAHDTTKMGHLTLEDYQIWSVKNVLANEFLNLLFQVCHIVLGLRPATPEEEGQIIRGWLERESRYGLQAGHNWFIISMQWWQQWKEYVKYDANPVVIEPSSVLNGGKYSFGTAAHPMEQVEDRIGSSLSYVNTTEEKFSDNISTASEASETAGSGFLYSATPGADVCFARQHNTSDNNNQCLLGANGNILLHLNPQKPGAIDNQPLVTQEPVKATSLTLEGGRLKRTPQLIHGRDYEMVPEPVWRALYHWYGANLALPRPVIKNSKTDIPELELFPRYLLFLRQQPATRTQQSNIWVNMGNVPSPNAPLKRVLAYTGCFSRMQTIKEIHEYLSQRLRIKEEDMRLWLYNSENYLTLLDDEDHKLEYLKIQDEQHLVIEVRNKDMSWPEEMSFIANSSKIDRHKVPTEKGATGLSNLGNTCFMNSSIQCVSNTQPLTQYFISGRHLYELNRTNPIGMKGHMAKCYGDLVQELWSGTQKNVAPLKLRWTIAKYAPRFNGFQQQDSQELLAFLLDGLHEDLNRVHEKPYVELKDSDGRPDWEVAAEAWDNHLRRNRSIVVDLFHGQLRSQVKCKTCGHISVRFDPFNFLSLPLPMDSYMHLEITVIKLDGTTPVRYGLRLNMDEKYTGLKKQLSDLCGLNSEQILLAEVHGSNIKNFPQDNQKVRLSVSGFLCAFEIPVPVSPISASSPTQTDFSSSPSTNEMFTLTTNGDLPRPIFIPNGMPNTVVPCGTEKNFTNGMVNGHMPSLPDSPFTGYIIAVHRKMMRTELYFLSSQKNRPSLFGMPLIVPCTVHTRKKDLYDAVWIQVSRLASPLPPQEASNHAQDCDDSMGYQYPFTLRVVQKDGNSCAWCPWYRFCRGCKIDCGEDRAFIGNAYIAVDWDPTALHLRYQTSQERVVDEHESVEQSRRAQAEPINLDSCLRAFTSEEELGENEMYYCSKCKTHCLATKKLDLWRLPPILIIHLKRFQFVNGRWIKSQKIVKFPRESFDPSAFLVPRDPALCQHKPLTPQGDELSEPRILAREVKKVDAQSSAGEEDVLLSKSPSSLSANIISSPKGSPSSSRKSGTSCPSSKNSSPNSSPRTLGRSKGRLRLPQIGSKNKLSSSKENLDASKENGAGQICELADALSRGHVLGGSQPELVTPQDHEVALANGFLYEHEACGNGYSNGQLGNHSEEDSTDDQREDTRIKPIYNLYAISCHSGILGGGHYVTYAKNPNCKWYCYNDSSCKELHPDEIDTDSAYILFYEQQGIDYAQFLPKTDGKKMADTSSMDEDFESDYKKYCVLQ

SEQ ID NO: 22241 - protein, 6 aa, Artificial Sequence
  Synthetic polypeptide
KLPSLR

SEQ ID NO: 22242 - protein, 30 aa, Artificial Sequence
  Synthetic polypeptide
AKKTSFLYKNYPASGDLLFFWWNIQRAALQ

SEQ ID NO: 22243 - protein, 819 aa, Artificial Sequence
  Synthetic polypeptide
EAEQMLVPCLYRLQNREPKKPLFFIKITQPQVIYCSFGGTSKGLHFNNLIVGLVLLTRGKDEEKAKYIFSLFSSESGNYVIREEMERMLHVVDGKVPDTLRKCFSEGEKVNYEKFRNWLFLNKDAFTFSRWLLSGGVYVTLTDDSDTPTFYQTLAGVTHLEESDIIDLEKRYWLLKAQSRTGRFDLETFGPLVSPPIRPSLSEGLFNAFDENRDNHIDFKEISCGLSACCRGPLAERQKFCFKVFDVDRDGVLSRVELRDMVVALLEVWKDNRTDDIPELHMDLSDIVEGILNAHDTTKMGHLTLEDYQIWSVKNVLANEFLNLLFQVCHIVLGLRPATPEEEGQIIRGWLERESRYGLQAGHNWFIISMQWWQQWKEYVKYDANPVVIEPSSVLNGGKYSFGTAAHPMEQVEDRIGSSLSYVNTTEEKFSDNISTASEASETAGSGFLYSATPGADVCFARQHNTSDNNNQCLLGANGNILLHLNPQKPGAIDNQPLVTQEPVKATSLTLEGGRLKRTPQLIHGRDYEMVPEPVWRALYHWYGANLALPRPVIKNSKTDIPELELFPRYLLFLRQQPATRTQQSNIWVNMGNVPSPNAPLKRVLAYTGCFSRMQTIKEIHEYLSQRLRIKEEDMRLWLYNSENYLTLLDDEDHKLEYLKIQDEQHLVIEVRNKDMSWPEEMSFIANSSKIDRHKVPTEKGATGLSNLGNTCFMNSSIQCVSNTQPLTQYFISGRHLYELNRTNPIGMKGHMAKCYGDLVQELWSGTQKNVAPLKLRWTIAKYAPRFNGFQQQDSQELLAFLLDGLHEDLNRVHEKPYV

SEQ ID NO: 22244 - protein, 359 aa, Artificial Sequence
  Synthetic polypeptide
EAEQMLVPCLYRLQNREPKKPLFFIKITQPQVIYCSFGGTSKGLHFNNLIVGLVLLTRGKDEEKAKYIFSLFSSESGNYVIREEMERMLHVVDGKVPDTLRKCFSEGEKVNYEKFRNWLFLNKDAFTFSRWLLSGGVYVTLTDDSDTPTFYQTLAGVTHLEESDIIDLEKRYWLLKAQSRTGRFDLETFGPLVSPPIRPSLSEGLFNAFDENRDNHIDFKEISCGLSACCRGPLAERQKFCFKVFDVDRDGVLSRVELRDMVVALLEVWKDNRTDDIPELHMDLSDIVEGILNAHDTTKMGHLTLEDYQIWSVKNVLANEFLNLLFQVCHIVLGLRPATPEEEGQIIRTLETDQIYTRN

SEQ ID NO: 22245 - protein, 106 aa, Artificial Sequence
  Synthetic polypeptide
EAEQMLVPCLYRLQNREPKKPLFFIKITQPQVIYCSFGGTSKGLHFNNLIVGLVLLTRGKDEEKAKYIFSLFSSESGNYVIREEMERMLHVVDGKVPDTLRKCFSE

SEQ ID NO: 22246 - protein, 31 aa, Artificial Sequence
  Synthetic polypeptide
EAEQMLVPCLYRLQNRDLLFFWWNIQRAALQ

SEQ ID NO: 22247 - protein, 1641 aa, Artificial Sequence
  Synthetic polypeptide
SPMLEVGPRGRCLDHGGRSPRVPGCFPHSNECAVTLLVHERAGCLKEPGTSSSLSCFLSHHVTCLFSAPPSLSVTSESFLRPHEKLSRCWCHAYTGCRTVIYCSFGGTSKGLHFNNLIVGLVLLTRGKDEEKAKYIFSLFSSESGNYVIREEMERMLHVVDGKVPDTLRKCFSEGEKVNYEKFRNWLFLNKDAFTFSRWLLSGGVYVTLTDDSDTPTFYQTLAGVTHLEESDIIDLEKRYWLLKAQSRTGRFDLETFGPLVSPPIRPSLSEGLFNAFDENRDNHIDFKEISCGLSACCRGPLAERQKFCFKVFDVDRDGVLSRVELRDMVVALLEVWKDNRTDDIPELHMDLSDIVEGILNAHDTTKMGHLTLEDYQIWSVKNVLANEFLNLLFQVCHIVLGLRPATPEEEGQIIRGWLERESRYGLQAGHNWFIISMQWWQQWKEYVKYDANPVVIEPSSVLNGGKYSFGTAAHPMEQVEDRIGSSLSYVNTTEEKFSDNISTASEASETAGSGFLYSATPGADVCFARQHNTSDNNNQCLLGANGNILLHLNPQKPGAIDNQPLVTQEPVKATSLTLEGGRLKRTPQLIHGRDYEMVPEPVWRALYHWYGANLALPRPVIKNSKTDIPELELFPRYLLFLRQQPATRTQQSNIWVNMGNVPSPNAPLKRVLAYTGCFSRMQTIKEIHEYLSQRLRIKEEDMRLWLYNSENYLTLLDDEDHKLEYLKIQDEQHLVIEVRNKDMSWPEEMSFIANSSKIDRHKVPTEKGATGLSNLGNTCFMNSSIQCVSNTQPLTQYFISGRHLYELNRTNPIGMKGHMAKCYGDLVQELWSGTQKNVAPLKLRWTIAKYAPRFNGFQQQDSQELLAFLLDGLHEDLNRVHEKPYVELKDSDGRPDWEVAAEAWDNHLRRNRSIVVDLFHGQLRSQVKCKTCGHISVRFDPFNFLSLPLPMDSYMHLEITVIKLDGTTPVRYGLRLNMDEKYTGLKKQLSDLCGLNSEQILLAEVHGSNIKNFPQDNQKVRLSVSGFLCAFEIPVPVSPISASSPTQTDFSSSPSTNEMFTLTTNGDLPRPIFIPNGMPNTVVPCGTEKNFTNGMVNGHMPSLPDSPFTGYIIAVHRKMMRTELYFLSSQKNRPSLFGMPLIVPCTVHTRKKDLYDAVWIQVSRLASPLPPQEASNHAQDCDDSMGYQYPFTLRVVQKDGNSCAWCPWYRFCRGCKIDCGEDRAFIGNAYIAVDWDPTALHLRYQTSQERVVDEHESVEQSRRAQAEPINLDSCLRAFTSEEELGENEMYYCSKCKTHCLATKKLDLWRLPPILIIHLKRFQFVNGRWIKSQKIVKFPRESFDPSAFLVPRDPALCQHKPLTPQGDELSEPRILAREVKKVDAQSSAGEEDVLLSKSPSSLSANIISSPKGSPSSSRKSGTSCPSSKNSSPNSSPRTLGRSKGRLRLPQIGSKNKLSSSKENLDASKENGAGQICELADALSRGHVLGGSQPELVTPQDHEVALANGFLYEHEACGNGYSNGQLGNHSEEDSTDDQREDTRIKPIYNLYAISCHSGILGGGHYVTYAKNPNCKWYCYNDSSCKELHPDEIDTDSAYILFYEQQGIDYAQFLPKTDGKKMADTSSMDEDFESDYKKYCVLQ

SEQ ID NO: 22248 - protein, 13 aa, Artificial Sequence
  Synthetic polypeptide
ADAGAMLIQAAEP

SEQ ID NO: 22249 - protein, 887 aa, Artificial Sequence
  Synthetic polypeptide
SPMLEVGPRGRCLDHGGRSPRVPGCFPHSNECAVTLLVHERAGCLKEPGTSSSLSCFLSHHVTCLFSAPPSLSVTSESFLRPHEKLSRCWCHAYTGCRTVIYCSFGGTSKGLHFNNLIVGLVLLTRGKDEEKAKYIFSLFSSESGNYVIREEMERMLHVVDGKVPDTLRKCFSEGEKVNYEKFRNWLFLNKDAFTFSRWLLSGGVYVTLTDDSDTPTFYQTLAGVTHLEESDIIDLEKRYWLLKAQSRTGRFDLETFGPLVSPPIRPSLSEGLFNAFDENRDNHIDFKEISCGLSACCRGPLAERQKFCFKVFDVDRDGVLSRVELRDMVVALLEVWKDNRTDDIPELHMDLSDIVEGILNAHDTTKMGHLTLEDYQIWSVKNVLANEFLNLLFQVCHIVLGLRPATPEEEGQIIRGWLERESRYGLQAGHNWFIISMQWWQQWKEYVKYDANPVVIEPSSVLNGGKYSFGTAAHPMEQVEDRIGSSLSYVNTTEEKFSDNISTASEASETAGSGFLYSATPGADVCFARQHNTSDNNNQCLLGANGNILLHLNPQKPGAIDNQPLVTQEPVKATSLTLEGGRLKRTPQLIHGRDYEMVPEPVWRALYHWYGANLALPRPVIKNSKTDIPELELFPRYLLFLRQQPATRTQQSNIWVNMGNVPSPNAPLKRVLAYTGCFSRMQTIKEIHEYLSQRLRIKEEDMRLWLYNSENYLTLLDDEDHKLEYLKIQDEQHLVIEVRNKDMSWPEEMSFIANSSKIDRHKVPTEKGATGLSNLGNTCFMNSSIQCVSNTQPLTQYFISGRHLYELNRTNPIGMKGHMAKCYGDLVQELWSGTQKNVAPLKLRWTIAKYAPRFNGFQQQDSQELLAFLLDGLHEDLNRVHEKPYV

SEQ ID NO: 22250 - protein, 427 aa, Artificial Sequence
  Synthetic polypeptide
SPMLEVGPRGRCLDHGGRSPRVPGCFPHSNECAVTLLVHERAGCLKEPGTSSSLSCFLSHHVTCLFSAPPSLSVTSESFLRPHEKLSRCWCHAYTGCRTVIYCSFGGTSKGLHFNNLIVGLVLLTRGKDEEKAKYIFSLFSSESGNYVIREEMERMLHVVDGKVPDTLRKCFSEGEKVNYEKFRNWLFLNKDAFTFSRWLLSGGVYVTLTDDSDTPTFYQTLAGVTHLEESDIIDLEKRYWLLKAQSRTGRFDLETFGPLVSPPIRPSLSEGLFNAFDENRDNHIDFKEISCGLSACCRGPLAERQKFCFKVFDVDRDGVLSRVELRDMVVALLEVWKDNRTDDIPELHMDLSDIVEGILNAHDTTKMGHLTLEDYQIWSVKNVLANEFLNLLFQVCHIVLGLRPATPEEEGQIIRTLETDQIYTRN

SEQ ID NO: 22251 - protein, 174 aa, Artificial Sequence
  Synthetic polypeptide
SPMLEVGPRGRCLDHGGRSPRVPGCFPHSNECAVTLLVHERAGCLKEPGTSSSLSCFLSHHVTCLFSAPPSLSVTSESFLRPHEKLSRCWCHAYTGCRTVIYCSFGGTSKGLHFNNLIVGLVLLTRGKDEEKAKYIFSLFSSESGNYVIREEMERMLHVVDGKVPDTLRKCFSE

SEQ ID NO: 22252 - protein, 18 aa, Artificial Sequence
  Synthetic polypeptide
KGFKVASCAKWKLQISFG

SEQ ID NO: 22253 - protein, 437 aa, Artificial Sequence
  Synthetic polypeptide
NQKWDLEHYYQPSTNEKDLRLLHVRNGNCKYHLGEETFKLAQTYMDKLSKHGQQANKAALYGELCALLFAKSHYDEAYKWCIEAMKEITAGLPVKVVVDVLRQASKACVVKREFKKAEQLIKHAVYLARDHFGSKHPKYSDTLLDYGFYLLNVDNICQSVAIYQAALDIRQSVFGGKNIHVATAHEDLAYSSYVHQYSSGKFDNALFHAERAIGIITHILPEDHLLLASSKRVKALILEEIAIDCHNKETEQRLLQEAHDLHLSSLQLAKKAFGEFNVQTAKHYGNLGRLYQSMRKFKEAEEMHIKAIQIKEQLLGQEDYEVALSVGHLASLYNYDMNQYENAEKLYLRSIAIGKKLFGEGYSGLEYDYRGLIKLYNSIGNYEKVFEYHNVLSNWNRLRDRQYSVTDALEDVSTSPQSTEEVVQSFLISQNVEGPSC

SEQ ID NO: 22254 - protein, 39 aa, Artificial Sequence
  Synthetic polypeptide
PGAGEKCKASGHAQPCSAEVCISAGSLRMLKFEKTQPLT

SEQ ID NO: 22255 - protein, 7 aa, Artificial Sequence
  Synthetic polypeptide
SLRRHSP

SEQ ID NO: 22256 - protein, 65 aa, Artificial Sequence
  Synthetic polypeptide
EDTALDVAVKTFPPERHVAVKCFGKKKGKKKQCQQPSVREQPNSNKACVRDGGRTSARGKHRDSE

SEQ ID NO: 22257 - protein, 72 aa, Artificial Sequence
  Synthetic polypeptide
EDTALDVAVKTFPPERHVAVKCFELQREGSIETLSNSSGSTSGSIPRNFDGYRSPLPTNESQPLSLFPTGFP

SEQ ID NO: 22258 - protein, 44 aa, Artificial Sequence
  Synthetic polypeptide
PGAGEKCKASGHAQPCSAEVCISAGSLRMLKFEKNFSEREASRL

SEQ ID NO: 22259 - protein, 15 aa, Artificial Sequence
  Synthetic polypeptide
SLRRTSARGKHRDSE

SEQ ID NO: 22260 - protein, 13 aa, Artificial Sequence
  Synthetic polypeptide
EELQREGSIETLS

SEQ ID NO: 22261 - protein, 50 aa, Artificial Sequence
  Synthetic polypeptide
EELQREGSIETLSNSSGSTSGSIPRNFDGYRSPLPTNESQPLSLFPTGFP

SEQ ID NO: 22262 - protein, 59 aa, Artificial Sequence
  Synthetic polypeptide
NQTARRQNLESGKREITHHIQNILQTRKQLIDMFKVLKENDCQPRILYLTKLSFRNKMY

SEQ ID NO: 22263 - protein, 426 aa, Artificial Sequence
  Synthetic polypeptide
QNCPSEIRCIRHRNDWGALILVDDRFRNNPSRYISGLSKWVRQQIQHHSTFESALESLAEFSKKHQKVLNVSIKDRTNIQDNESTLEVTSLKYSTSPYLLEAASHLSPENFVEDEAKICVQELQCPKIITKNSPLPSSIISRKEKNDPVFLEEAGKAEKIVISRSTSPTFNKQTKRVSWSSFNSLGQYFTGKIPKATPELGSSENSASSPPRFKTEKMESKTVLPFTDKCESSNLTVNTSFGSCPQSETIISSLKIDATLTRKNHSEHPLCSEEALDPDIELSLVSEEDKQSTSNRDFETEAEDESIYFTPELYDPEDTDEEKNDLAETDRGNRLANNSDCILAKDLFEIRTIKEVDSAREVKAEDCIDTKLNGILHIEESKIDDIDGNVKTTWINELELGKTHEIEIKNFKPSPSKNKGMFPGFK

SEQ ID NO: 22264 - protein, 171 aa, Artificial Sequence
  Synthetic polypeptide
QNCPSEIRCIRHRNDWGALILVDDRFRNNPSRYISGLSKWVRQQIQHHSTFESALESLAEFSKKHQKVLNVSIKDRTNIQDNESTLEVTSLKYSTSPYLLEAASHLSPENFVEDEAKICVQELQCPKIITKNSPLPSSIISRKEKSMKSSSHLPLIEKSFIIFSEMIFIWV

SEQ ID NO: 22265 - protein, 33 aa, Artificial Sequence
  Synthetic polypeptide
APGRRLKRLRKLSNNSLAKSKISKTKLKNQSKW

SEQ ID NO: 22266 - protein, 13 aa, Artificial Sequence
  Synthetic polypeptide
SHPFDVCKLLEGA

SEQ ID NO: 22267 - protein, 748 aa, Artificial Sequence
  Synthetic polypeptide
LIPLMFVSSWKALEEAQKAIQQLFGKIKDIKDKAEKSEQMVKEITRDIKQLDHAKRHLTTSITTLNHLHMLAGGVDSLEAMTRRRQYGEVANLLQGVMNVLEHFHKYMGIPQIRQLSERVKAAQTELGQQILADFEEAFPSQGTKRPGGPSNVLRDACLVANILDPRIKQEIIKKFIKQHLSEYLVLFQENQDVAWLDKIDRRYAWIKRQLVDYEEKYGRMFPREWCMAERIAVEFCHVTRAELAKIMRTRAKEIEVKLLLFAIQRTTNFEGFLAKRFSGCTLTDGTLKKLESPPPSTNPFLEDEPTPEMEELATEKGDLDQPKKPKAPDNPFHGIVSKCFEPHLYVYIESQDKNLGELIDRFVADFKAQGPPKPNTDEGGAVLPSCADLFVYYKKCMVQCSQLSTGEPMIALTTIFQKYLREYAWKILSGNLPKTTTSSGGLTISSLLKEKEGSEVAKFTLEELCLICNILSTAEYCLATTQQLEEKLKEKVDVSLIERINLTGEMDTFSTVISSSIQLLVQDLDAACDPALTAMSKMQWQNVEHVGDQSPYVTSVILHIKQNVPIIRDNLASTRKYFTQFCVKFANSFIPKFITHLFKCKPISMVGAEQLLLDTHSLKMVLLDLPSISSQVVRKAPASYTKIVVKGMTRAEMILKVVMAPHEPLVVFVDNYIKLLTDCNTETFQKILDMKGLKRSEQSSMLELLRQRLPAPPSGAESSGSLSLTAPTPEQESSRIRKLEKLIKKRL

SEQ ID NO: 22268 - protein, 132 aa, Artificial Sequence
  Synthetic polypeptide
LIPLMFVSSWKALEEAQKAIQQLFGKIKDIKDKAEKSEQMVKEITRDIKQLDHAKRHLTTSITTLNHLHMLAGGVDSLEAMTRRRQYGEVANLLQGVMNVLEHFHKYMGIPQIRQLSERKPKTLQLHGLNWT

SEQ ID NO: 22269 - protein, 615 aa, Artificial Sequence
  Synthetic polypeptide
LIPLMFVSSWKALEEAQKAIQQLFGKIKDIKDKAEKSEQMVKEITRDIKQLDHAKRHLTTSITTLNHLHMLAGGVDSLEAMTRRRQYGEVANLLQGVMNVLEHFHKYMGIPQIRQLSERVKAAQTELGQQILADFEEAFPSQGTKRPGGPSNVLRDACLVANILDPRIKQEIIKKFIKQHLSEYLVLFQENQDVAWLDKIDRRYAWIKRQLVDYEEKYGRMFPREWCMAERIAVEFCHVTRAELAKIMRTRAKEIEVKLLLFAIQRTTNFEGFLAKRFSGCTLTDGTLKKLESPPPSTNPFLEDEPTPEMEELATEKGDLDQPKKPKAPDNPFHGIVSKCFEPHLYVYIESQDKNLGELIDRFVADFKAQGPPKPNTDEGGAVLPSCADLFVYYKKCMVQCSQLSTGEPMIALTTIFQKYLREYAWKILSGNLPKTTTSSGGLTISSLLKEKEGSEVAKFTLEELCLICNILSTAEYCLATTQQLEEKLKEKVDVSLIERINLTGEMDTFSTVISSSIQLLVQDLDAACDPALTAMSKMQWQNVEHVGDQSPYVTSVILHIKQNVPIIRDNLASTRKYFTQFCVKFANSFIPKFITHLFKCKPISMVGAEQVRWT

SEQ ID NO: 22270 - protein, 463 aa, Artificial Sequence
  Synthetic polypeptide
LIPLMFVSSWKALEEAQKAIQQLFGKIKDIKDKAEKSEQMVKEITRDIKQLDHAKRHLTTSITTLNHLHMLAGGVDSLEAMTRRRQYGEVANLLQGVMNVLEHFHKYMGIPQIRQLSERVKAAQTELGQQILADFEEAFPSQGTKVAWLDKIDRRYAWIKRQLVDYEEKYGRMFPREWCMAERIAVEFCHVTRAELAKIMRTRAKEIEVKLLLFAIQRTTNFEGFLAKRFSGCTLTDGTLKKLESPPPSTNPFLEDEPTPEMEELATEKGDLDQPKKPKAPDNPFHGIVSKCFEPHLYVYIESQDKNLGELIDRFVADFKAQGPPKPNTDEGGAVLPSCADLFVYYKKCMVQCSQLSTGEPMIALTTIFQKYLREYAWKILSGNLPKTTTSSGGLTISSLLKEKEGSEVAKFTLEELCLICNILSTAEYCLATTQQLEEKLKEKVDRHLQQYSAAGSGSGCCL

SEQ ID NO: 22271 - protein, 106 aa, Artificial Sequence
  Synthetic polypeptide
EGRKKEGRKEGKGRRRKGGRKEGRRRKEGRADRHLPRMLPTAREHHTCLPQLPDTGQCDRGDLLGLLFPERVPLGHSQGLGMLLCLPYPPVQPAGCHGQLSMWPGP

SEQ ID NO: 22272 - protein, 362 aa, Artificial Sequence
  Synthetic polypeptide
KEGRKKEGRKEKEGEGREEGRKEGEGRKEGRTATYRGCFRLPENITHAFPSSLIQANVTVGTCSGFCSQKEFPLAILRGWECYCAYPTPRFNLRDAMDSSVCGQDPEAQRLAEYCEVYQTPVQDTRCTDRRFLPNKSKVFVALSSFPGAGNTWARHLIEHATGFYTGSYYFDGTLYNKGFKGEKDHWRSRRTICVKTHESGRREIEMFDSAILLIRNPYRSLVAEFNRKCAGHLGYAADRNWKSKEWPDFVNSYASWWSSHVLDWLKYGKRLLVVHYEELRRSLVPTLREMVAFLNVSVSEERLLCVENNKEGSFRRRGRRSHDPEPFTPEMKDLINGYIRTVDQALRDHNWTGLPREYVPR

SEQ ID NO: 22273 - protein, 52 aa, Artificial Sequence
  Synthetic polypeptide
RKEERRKEGRKRKEKEGRKEGRKEKEGRKGGPPPTADASDCQRTSHMPSPAP

SEQ ID NO: 22274 - protein, 15 aa, Artificial Sequence
  Synthetic polypeptide
GEIAPLHSSMDDRGA

SEQ ID NO: 22275 - protein, 772 aa, Artificial Sequence
  Synthetic polypeptide
SQLLRRLRHESHLNPGARGCSEARLHRCTPAWTTGALEEAQKAIQQLFGKIKDIKDKAEKSEQMVKEITRDIKQLDHAKRHLTTSITTLNHLHMLAGGVDSLEAMTRRRQYGEVANLLQGVMNVLEHFHKYMGIPQIRQLSERVKAAQTELGQQILADFEEAFPSQGTKRPGGPSNVLRDACLVANILDPRIKQEIIKKFIKQHLSEYLVLFQENQDVAWLDKIDRRYAWIKRQLVDYEEKYGRMFPREWCMAERIAVEFCHVTRAELAKIMRTRAKEIEVKLLLFAIQRTTNFEGFLAKRFSGCTLTDGTLKKLESPPPSTNPFLEDEPTPEMEELATEKGDLDQPKKPKAPDNPFHGIVSKCFEPHLYVYIESQDKNLGELIDRFVADFKAQGPPKPNTDEGGAVLPSCADLFVYYKKCMVQCSQLSTGEPMIALTTIFQKYLREYAWKILSGNLPKTTTSSGGLTISSLLKEKEGSEVAKFTLEELCLICNILSTAEYCLATTQQLEEKLKEKVDVSLIERINLTGEMDTFSTVISSSIQLLVQDLDAACDPALTAMSKMQWQNVEHVGDQSPYVTSVILHIKQNVPIIRDNLASTRKYFTQFCVKFANSFIPKFITHLFKCKPISMVGAEQLLLDTHSLKMVLLDLPSISSQVVRKAPASYTKIVVKGMTRAEMILKVVMAPHEPLVVFVDNYIKLLTDCNTETFQKILDMKGLKRSEQSSMLELLRQRLPAPPSGAESSGSLSLTAPTPEQESSRIRKLEKLIKKRL

SEQ ID NO: 22276 - protein, 51 aa, Artificial Sequence
  Synthetic polypeptide
TQEPEVAVRRDCTAALQHGRQGRLKRLRKLSNNSLAKSKISKTKLKNQSKW

SEQ ID NO: 22277 - protein, 156 aa, Artificial Sequence
  Synthetic polypeptide
SQLLRRLRHESHLNPGARGCSEARLHRCTPAWTTGALEEAQKAIQQLFGKIKDIKDKAEKSEQMVKEITRDIKQLDHAKRHLTTSITTLNHLHMLAGGVDSLEAMTRRRQYGEVANLLQGVMNVLEHFHKYMGIPQIRQLSERKPKTLQLHGLNWT

SEQ ID NO: 22278 - protein, 639 aa, Artificial Sequence
  Synthetic polypeptide
SQLLRRLRHESHLNPGARGCSEARLHRCTPAWTTGALEEAQKAIQQLFGKIKDIKDKAEKSEQMVKEITRDIKQLDHAKRHLTTSITTLNHLHMLAGGVDSLEAMTRRRQYGEVANLLQGVMNVLEHFHKYMGIPQIRQLSERVKAAQTELGQQILADFEEAFPSQGTKRPGGPSNVLRDACLVANILDPRIKQEIIKKFIKQHLSEYLVLFQENQDVAWLDKIDRRYAWIKRQLVDYEEKYGRMFPREWCMAERIAVEFCHVTRAELAKIMRTRAKEIEVKLLLFAIQRTTNFEGFLAKRFSGCTLTDGTLKKLESPPPSTNPFLEDEPTPEMEELATEKGDLDQPKKPKAPDNPFHGIVSKCFEPHLYVYIESQDKNLGELIDRFVADFKAQGPPKPNTDEGGAVLPSCADLFVYYKKCMVQCSQLSTGEPMIALTTIFQKYLREYAWKILSGNLPKTTTSSGGLTISSLLKEKEGSEVAKFTLEELCLICNILSTAEYCLATTQQLEEKLKEKVDVSLIERINLTGEMDTFSTVISSSIQLLVQDLDAACDPALTAMSKMQWQNVEHVGDQSPYVTSVILHIKQNVPIIRDNLASTRKYFTQFCVKFANSFIPKFITHLFKCKPISMVGAEQVRWT

SEQ ID NO: 22279 - protein, 487 aa, Artificial Sequence
  Synthetic polypeptide
SQLLRRLRHESHLNPGARGCSEARLHRCTPAWTTGALEEAQKAIQQLFGKIKDIKDKAEKSEQMVKEITRDIKQLDHAKRHLTTSITTLNHLHMLAGGVDSLEAMTRRRQYGEVANLLQGVMNVLEHFHKYMGIPQIRQLSERVKAAQTELGQQILADFEEAFPSQGTKVAWLDKIDRRYAWIKRQLVDYEEKYGRMFPREWCMAERIAVEFCHVTRAELAKIMRTRAKEIEVKLLLFAIQRTTNFEGFLAKRFSGCTLTDGTLKKLESPPPSTNPFLEDEPTPEMEELATEKGDLDQPKKPKAPDNPFHGIVSKCFEPHLYVYIESQDKNLGELIDRFVADFKAQGPPKPNTDEGGAVLPSCADLFVYYKKCMVQCSQLSTGEPMIALTTIFQKYLREYAWKILSGNLPKTTTSSGGLTISSLLKEKEGSEVAKFTLEELCLICNILSTAEYCLATTQQLEEKLKEKVDRHLQQYSAAGSGSGCCL

SEQ ID NO: 22280 - protein, 22 aa, Artificial Sequence
  Synthetic polypeptide
GQVRWLTPVIPALQKQRCSTPY

SEQ ID NO: 22281 - protein, 1427 aa, Artificial Sequence
  Synthetic polypeptide
SQHFRNRDAPRPTSHARPPSTSLIYDSDLAVSYTDLDNLFNSDEDELTPGSKKSANGSDDKASCKESKTGNLDPLSCISTADLHKMYPTPPSLEQHIMGFSPMNMNNKEYGSMDTTPGGTVLEGNSSSIGAQFKIEVDEGFCSPKPSEIKDFSYVYKPENCQILVGCSMFAPLKTLPSQYLPPIKLPEECIYRQSWTVGKLELLSSGPSMPFIKEGDGSNMDQEYGTAYTPQTHTSFGMPPSSAPPSNSGAGILPSPSTPRFPTPRTPRTPRTPRGAGGPASAQGSVKYENSDLYSPASTPSTCRPLNSVEPATVPSIPEAHSLYVNLILSESVMNLFKDCNFDSCCICVCNMNIKGADVGVYIPDPTQEAQYRCTCGFSAVMNRKFGNNSGLFLEDELDIIGRNTDCGKEAEKRFEALRATSAEHVNGGLKESEKLSDDLILLLQDQCTNLFSPFGAADQDPFPKSGVISNWVRVEERDCCNDCYLALEHGRQFMDNMSGGKVDEALVKSSCLHPWSKRNDVSMQCSQDILRMLLSLQPVLQDAIQKKRTVRPWGVQGPLTWQQFHKMAGRGSYGTDESPEPLPIPTFLLGYDYDYLVLSPFALPYWERLMLEPYGSQRDIAYVVLCPENEALLNGAKSFFRDLTAIYESCRLGQHRPVSRLLTDGIMRVGSTASKKLSEKLVAEWFSQAADGNNEAFSKLKLYAQVCRYDLGPYLASLPLDSSLLSQPNLVAPTSQSLITPPQMTNTGNANTPSATLASAASSTMTVTSGVAISTSVATANSTLTTASTSSSSSSNLNSGVSSNKLPSFPPFGSMNSNAAGSMSTQANTVQSGQLGGQQTSALQTAGISGESSSLPTQPHPDVSESTMDRDKVGIPTDGDSHAVTYPPAIVVYIIDPFTYENTDESTNSSSVWTLGLLRCFLEMVQTLPPHIKSTVSVQIIPCQYLLQPVKHEDREIYPQHLKSLAFSAFTQCRRPLPTSTNVKTLTGFGPGLAMETALRSPDRPECIRLYAPPFILAPVKDKQTELGETFGEAGQKYNVLFVGYCLSHDQRWILASCTDLYGELLETCIINIDVPNRARRKKSSARKFGLQKLWEWCLGLVQMSSLPWRVVIGRLGRIGHGELKDWSCLLSRRNLQSLSKRLKDMCRMCGISAADSPSILSACLVAMEPQGSFVIMPDSVSTGSVFGRSTTLNMQTSQLNTPQDTSCTHILVFPTSASVQVASATYTTENLDLAFNPNNDGADGMGIFDLLDTGDDLDPDIINILPASPTGSPVHSPGSHYPHGGDAGKGQSTDRLLSTEPHEEVPNILQQPLALGYFVSTAKAGPLPDWFWSACPQAQYQCPLFLKASLHLHVPSVQSDELLHSKHSHPLDSNQTSDVLRFVLEQYNALSWLTCDPATQDRRSCLPIHFVVLNQLYNFIMNML

SEQ ID NO: 22282 - protein, 31 aa, Artificial Sequence
  Synthetic polypeptide
PGEVAHTCNPSTSETEMLHALLVMPVLHQQV

SEQ ID NO: 22283 - protein, 1751 aa, Artificial Sequence
  Synthetic polypeptide
ASGIWHKNLKSRNAGQQGQAPSLGQQQQILPKHKTNEKQEKSEKPQKRPLTPFHHRVSVSDDVGMDADSASQRLVISAPDSQVRFSNIRTNDVAKTPQMHGTEMANSPQPPPLSPHPCDVVDEGVTKTPSTPQSQHFYQMPTPDPLVPSKPMEDRIDSLSQSFPPQYQEAVEPTVYVGTAVNLEEDEANIAWKYYKFPKKKDVEFLPPQLPSDKFKDDPVGPFGQESVTSVTELMVQCKKPLKVSDELVQQYQIKNQCLSAIASDAEQEPKIDPYAFVEGDEEFLFPDKKDRQNSEREAGKKHKVEDGTSSVTVLSHEEDAMSLFSPSIKQDAPRPTSHARPPSTSLIYDSDLAVSYTDLDNLFNSDEDELTPGSKKSANGSDDKASCKESKTGNLDPLSCISTADLHKMYPTPPSLEQHIMGFSPMNMNNKEYGSMDTTPGGTVLEGNSSSIGAQFKIEVDEGFCSPKPSEIKDFSYVYKPENCQILVGCSMFAPLKTLPSQYLPPIKLPEECIYRQSWTVGKLELLSSGPSMPFIKEGDGSNMDQEYGTAYTPQTHTSFGMPPSSAPPSNSGAGILPSPSTPRFPTPRTPRTPRTPRGAGGPASAQGSVKYENSDLYSPASTPSTCRPLNSVEPATVPSIPEAHSLYVNLILSESVMNLFKDCNFDSCCICVCNMNIKGADVGVYIPDPTQEAQYRCTCGFSAVMNRKFGNNSGLFLEDELDIIGRNTDCGKEAEKRFEALRATSAEHVNGGLKESEKLSDDLILLLQDQCTNLFSPFGAADQDPFPKSGVISNWVRVEERDCCNDCYLALEHGRQFMDNMSGGKVDEALVKSSCLHPWSKRNDVSMQCSQDILRMLLSLQPVLQDAIQKKRTVRPWGVQGPLTWQQFHKMAGRGSYGTDESPEPLPIPTFLLGYDYDYLVLSPFALPYWERLMLEPYGSQRDIAYVVLCPENEALLNGAKSFFRDLTAIYESCRLGQHRPVSRLLTDGIMRVGSTASKKLSEKLVAEWFSQAADGNNEAFSKLKLYAQVCRYDLGPYLASLPLDSSLLSQPNLVAPTSQSLITPPQMTNTGNANTPSATLASAASSTMTVTSGVAISTSVATANSTLTTASTSSSSSSNLNSGVSSNKLPSFPPFGSMNSNAAGSMSTQANTVQSGQLGGQQTSALQTAGISGESSSLPTQPHPDVSESTMDRDKVGIPTDGDSHAVTYPPAIVVYIIDPFTYENTDESTNSSSVWTLGLLRCFLEMVQTLPPHIKSTVSVQIIPCQYLLQPVKHEDREIYPQHLKSLAFSAFTQCRRPLPTSTNVKTLTGFGPGLAMETALRSPDRPECIRLYAPPFILAPVKDKQTELGETFGEAGQKYNVLFVGYCLSHDQRWILASCTDLYGELLETCIINIDVPNRARRKKSSARKFGLQKLWEWCLGLVQMSSLPWRVVIGRLGRIGHGELKDWSCLLSRRNLQSLSKRLKDMCRMCGISAADSPSILSACLVAMEPQGSFVIMPDSVSTGSVFGRSTTLNMQTSQLNTPQDTSCTHILVFPTSASVQVASATYTTENLDLAFNPNNDGADGMGIFDLLDTGDDLDPDIINILPASPTGSPVHSPGSHYPHGGDAGKGQSTDRLLSTEPHEEVPNILQQPLALGYFVSTAKAGPLPDWFWSACPQAQYQCPLFLKASLHLHVPSVQSDELLHSKHSHPLDSNQTSDVLRFVLEQYNALSWLTCDPATQDRRSCLPIHFVVLNQLYNFIMNML

SEQ ID NO: 22284 - protein, 26 aa, Artificial Sequence
  Synthetic polypeptide
HHPELLGYGTKISSQEMLDNKDRHHL

SEQ ID NO: 22285 - protein, 121 aa, Artificial Sequence
  Synthetic polypeptide
SLSNPFLLFLCSVLYCRELNFLDSFAFWSWLIGGTNRRLEGERREEARVFPQSLFEPTPAAAPLCPINTAPSSWSQLLLSRSCYGSSTILSFWDMAQKSQVKKCWTTRTGTIFRSATTNTS

SEQ ID NO: 22286 - protein, 244 aa, Artificial Sequence
  Synthetic polypeptide
ASGIWHKNLKSRNAGQQGQAPSLGQQQQILPKHKTNEKQEKSEKPQKRPLTPFHHRVSVSDDVGMDADSASQRLVISAPDSQVRFSNIRTNDVAKTPQMHGTEMANSPQPPPLSPHPCDVVDEGVTKTPSTPQSQHFYQMPTPDPLVPSKPMEDRIDSLSQSFPPQYQEAVEPTVYVGTAVNLEEDEANIAWKYYKFPKKKDVEFLPPQLPSDKFKDDPVGPFGQESVTSVTEYVFFLIVTIII

SEQ ID NO: 22287 - protein, 34 aa, Artificial Sequence
  Synthetic polypeptide
EALTEDWRAQKSQVKKCWTTRTGTIFRSATTNTS

SEQ ID NO: 22288 - protein, 1751 aa, Artificial Sequence
  Synthetic polypeptide
QKIGGHKNLKSRNAGQQGQAPSLGQQQQILPKHKTNEKQEKSEKPQKRPLTPFHHRVSVSDDVGMDADSASQRLVISAPDSQVRFSNIRTNDVAKTPQMHGTEMANSPQPPPLSPHPCDVVDEGVTKTPSTPQSQHFYQMPTPDPLVPSKPMEDRIDSLSQSFPPQYQEAVEPTVYVGTAVNLEEDEANIAWKYYKFPKKKDVEFLPPQLPSDKFKDDPVGPFGQESVTSVTELMVQCKKPLKVSDELVQQYQIKNQCLSAIASDAEQEPKIDPYAFVEGDEEFLFPDKKDRQNSEREAGKKHKVEDGTSSVTVLSHEEDAMSLFSPSIKQDAPRPTSHARPPSTSLIYDSDLAVSYTDLDNLFNSDEDELTPGSKKSANGSDDKASCKESKTGNLDPLSCISTADLHKMYPTPPSLEQHIMGFSPMNMNNKEYGSMDTTPGGTVLEGNSSSIGAQFKIEVDEGFCSPKPSEIKDFSYVYKPENCQILVGCSMFAPLKTLPSQYLPPIKLPEECIYRQSWTVGKLELLSSGPSMPFIKEGDGSNMDQEYGTAYTPQTHTSFGMPPSSAPPSNSGAGILPSPSTPRFPTPRTPRTPRTPRGAGGPASAQGSVKYENSDLYSPASTPSTCRPLNSVEPATVPSIPEAHSLYVNLILSESVMNLFKDCNFDSCCICVCNMNIKGADVGVYIPDPTQEAQYRCTCGFSAVMNRKFGNNSGLFLEDELDIIGRNTDCGKEAEKRFEALRATSAEHVNGGLKESEKLSDDLILLLQDQCTNLFSPFGAADQDPFPKSGVISNWVRVEERDCCNDCYLALEHGRQFMDNMSGGKVDEALVKSSCLHPWSKRNDVSMQCSQDILRMLLSLQPVLQDAIQKKRTVRPWGVQGPLTWQQFHKMAGRGSYGTDESPEPLPIPTFLLGYDYDYLVLSPFALPYWERLMLEPYGSQRDIAYVVLCPENEALLNGAKSFFRDLTAIYESCRLGQHRPVSRLLTDGIMRVGSTASKKLSEKLVAEWFSQAADGNNEAFSKLKLYAQVCRYDLGPYLASLPLDSSLLSQPNLVAPTSQSLITPPQMTNTGNANTPSATLASAASSTMTVTSGVAISTSVATANSTLTTASTSSSSSSNLNSGVSSNKLPSFPPFGSMNSNAAGSMSTQANTVQSGQLGGQQTSALQTAGISGESSSLPTQPHPDVSESTMDRDKVGIPTDGDSHAVTYPPAIVVYIIDPFTYENTDESTNSSSVWTLGLLRCFLEMVQTLPPHIKSTVSVQIIPCQYLLQPVKHEDREIYPQHLKSLAFSAFTQCRRPLPTSTNVKTLTGFGPGLAMETALRSPDRPECIRLYAPPFILAPVKDKQTELGETFGEAGQKYNVLFVGYCLSHDQRWILASCTDLYGELLETCIINIDVPNRARRKKSSARKFGLQKLWEWCLGLVQMSSLPWRVVIGRLGRIGHGELKDWSCLLSRRNLQSLSKRLKDMCRMCGISAADSPSILSACLVAMEPQGSFVIMPDSVSTGSVFGRSTTLNMQTSQLNTPQDTSCTHILVFPTSASVQVASATYTTENLDLAFNPNNDGADGMGIFDLLDTGDDLDPDIINILPASPTGSPVHSPGSHYPHGGDAGKGQSTDRLLSTEPHEEVPNILQQPLALGYFVSTAKAGPLPDWFWSACPQAQYQCPLFLKASLHLHVPSVQSDELLHSKHSHPLDSNQTSDVLRFVLEQYNALSWLTCDPATQDRRSCLPIHFVVLNQLYNFIMNML

SEQ ID NO: 22289 - protein, 58 aa, Artificial Sequence
  Synthetic polypeptide
SLSNPFLLFLCSVLYCRELNFLDSFAFWSWLIGGTNRRLEGTKISSQEMLDNKDRHHL

SEQ ID NO: 22290 - protein, 244 aa, Artificial Sequence
  Synthetic polypeptide
QKIGGHKNLKSRNAGQQGQAPSLGQQQQILPKHKTNEKQEKSEKPQKRPLTPFHHRVSVSDDVGMDADSASQRLVISAPDSQVRFSNIRTNDVAKTPQMHGTEMANSPQPPPLSPHPCDVVDEGVTKTPSTPQSQHFYQMPTPDPLVPSKPMEDRIDSLSQSFPPQYQEAVEPTVYVGTAVNLEEDEANIAWKYYKFPKKKDVEFLPPQLPSDKFKDDPVGPFGQESVTSVTEYVFFLIVTIII

SEQ ID NO: 22291 - protein, 1444 aa, Artificial Sequence
  Synthetic polypeptide
WDFKEPNVFLIFSHGLQGCLEAQGGQVRVTPACNTSLPAQRWKWVSRNRLFNLGTMQCLGTGWPGTNTTASLGMYECDREALNLRWHCRTLGDQLSLLLGARTSNISKPGTLERGDQTRSGQWRIYGSEEDLCALPYHEVYTIQGNSHGKPCTIPFKYDNQWFHGCTSTGREDGHLWCATTQDYGKDERWGFCPIKSNDCETFWDKDQLTDSCYQFNFQSTLSWREAWASCEQQGADLLSITEIHEQTYINGLLTGYSSTLWIGLNDLDTSGGWQWSDNSPLKYLNWESDQPDNPSEENCGVIRTESSGGWQNRDCSIALPYVCKKKPNATAEPTPPDRWANVKVECEPSWQPFQGHCYRLQAEKRSWQESKKACLRGGGDLVSIHSMAELEFITKQIKQEVEELWIGLNDLKLQMNFEWSDGSLVSFTHWHPFEPNNFRDSLEDCVTIWGPEGRWNDSPCNQSLPSICKKAGQLSQGAAEEDHGCRKGWTWHSPSCYWLGEDQVTYSEARRLCTDHGSQLVTITNRFEQAFVSSLIYNWEGEYFWTALQDLNSTGSFFWLSGDEVMYTHWNRDQPGYSRGGCVALATGSAMGLWEVKNCTSFRARYICRQSLGTPVTPELPGPDPTPSLTGSCPQGWASDTKLRYCYKVFSSERLQDKKSWVQAQGACQELGAQLLSLASYEEEHFVANMLNKIFGESEPEIHEQHWFWIGLNRRDPRGGQSWRWSDGVGFSYHNFDRSRHDDDDIRGCAVLDLASLQWVAMQCDTQLDWICKIPRGTDVREPDDSPQGRREWLRFQEAEYKFFEHHSTWAQAQRICTWFQAELTSVHSQAELDFLSHNLQKFSRAQEQHWWIGLHTSESDGRFRWTDGSIINFISWAPGKPRPVGKDKKCVYMTASREDWGDQRCLTALPYICKRSNVTKETQPPDLPTTALGGCPSDWIQFLNKCFQVQGQEPQSRVKWSEAQFSCEQQEAQLVTITNPLEQAFITASLPNVTFDLWIGLHASQRDFQWVEQEPLMYANWAPGEPSGPSPAPSGNKPTSCAVVLHSPSAHFTGRWDDRSCTEETHGFICQKGTDPSLSPSPAALPPAPGTELSYLNGTFRLLQKPLRWHDALLLCESRNASLAYVPDPYTQAFLTQAARGLRTPLWIGLAGEEGSRRYSWVSEEPLNYVGWQDGEPQQPGGCTYVDVDGAWRTTSCDTKLQGAVCGVSSGPPPPRRISYHGSCPQGLADSAWIPFREHCYSFHMELLLGHKEARQRCQRAGGAVLSILDEMENVFVWEHLQSYEGQSRGAWLGMNFNPKGGTLVWQDNTAVNYSNWGPPGLGPSMLSHNSCYWIQSNSGLWRPGACTNITMGVVCKLPRAEQSSFSPSALPENPAALVVVLMAVLLLLALLTAALILYRRRQSIERGAFEGARYSRSSSSPTEATEKNILVSDMEMNEQQE

SEQ ID NO: 22292 - protein, 81 aa, Artificial Sequence
  Synthetic polypeptide
GILKNPTSSSSSAMDCRAAWRPRAGRSESPRLAIPASLPSAGSGSPETGYSTWVPCSAWAQAGQAPTPRPPWACMSVTGKH

SEQ ID NO: 22293 - protein, 53 aa, Artificial Sequence
  Synthetic polypeptide
GCAQWLSPVISVLWRLRRADHVSYFEDEEEDSSNVDLPYIPAENSPTRQQFHS

SEQ ID NO: 22294 - protein, 24 aa, Artificial Sequence
  Synthetic polypeptide
MCTVALACNLSTLEAEEGRSRKLF

SEQ ID NO: 22295 - protein, 887 aa, Artificial Sequence
  Synthetic polypeptide
GCAQWLSPVISVLWRLRRADHVSYFEDEEEDSSNVDLPYIPAENSPTRQQFHSKPVDSDSDDDPLEAFMAEVEDQAARDMKRLEEKDKERKNVKGIRDDIEEEDDQEAYFRYMAENPTAGVVQEEEEDNLEYDSDGNPIAPTKKIIDPLPPIDHSEIDYPPFEKNFYNEHEEITNLTPQQLIDLRHKLNLRVSGAAPPRPGSSFAHFGFDEQLMHQIRKSEYTQPTPIQCQGVPVALSGRDMIGIAKTGSGKTAAFIWPMLIHIMDQKELEPGDGPIAVIVCPTRELCQQIHAECKRFGKAYNLRSVAVYGGGSMWEQAKALQEGAEIVVCTPGRLIDHVKKKATNLQRVSYLVFDEADRMFDMGFEYQVRSIASHVRPDRQTLLFSATFRKKIEKLARDILIDPIRVVQGDIGEANEDVTQIVEILHSGPSKWNWLTRRLVEFTSSGSVLLFVTKKANAEELANNLKQEGHNLGLLHGDMDQSERNKVISDFKKKDIPVLVATDVAARGLDIPSIKTVINYDVARDIDTHTHRIGRTGRAGEKGVAYTLLTPKDSNFAGDLVRNLEGANQHVSKELLDLAMQNAWFRKSRFKGGKGKKLNIGGGGLGYRERPGLGSENMDRGNNNVMSNYEAYKPSTGAMGDRLTAMKAAFQSQYKSHFVAASLSNQKAGSSAAGASGWTSAGSLNSVPTNSAQQGHNSPDSPVTSAAKGIPGFGNTGNISGAPVTYPSAGAQGVNNTASGNNSREGTGGSNGKRERYTENRGSSRHSHGETGNRHSDSPRHGDGGRHGDGYRHPESSSRHTDGHRHGENRHGGSAGRHGENRGANDGRNGESRKEAFNRESKMEPKMEPKVDSSKMDKVDSKTDKTADGFAVPEPPKRKKSRWDS

SEQ ID NO: 22296 - protein, 108 aa, Artificial Sequence
  Synthetic polypeptide
GCAQWLSPVISVLWRLRRADHVSYFEDEEEDSSNVDLPYIPAENSPTRQQFHSKPVDSDSDDDPLEAFMAEVEDQAARDMKRLEEKDKERKNVNVESSCAVWNSTLIC

SEQ ID NO: 22297 - protein, 54 aa, Artificial Sequence
  Synthetic polypeptide
HLARDPALEIHRGRGKNGEGAVCHGTGTCSIYHLHGRNRLHRLLAAGGGFWRGQ

SEQ ID NO: 22298 - protein, 191 aa, Artificial Sequence
  Synthetic polypeptide
QGTQHSKFIGEGARMVRELFVMAREHAPSIIFMDEIDSIGSSRLEGGSGGDSEVQRTMLELLNQLDGFEATKNIKVIMATNRIDILDSALLRPGRIDRKIEFPPPNEEARLDILKIHSRKMNLTRGINLRKIAELMPGASGAEVKGVCTEAGMYALRERRVHVTQEDFEMAVAKVMQKDSEKNMSIKKLWK

SEQ ID NO: 22299 - protein, 20 aa, Artificial Sequence
  Synthetic polypeptide
CSFFFFVSLTSSKGPSTRNS

SEQ ID NO: 22300 - protein, 10 aa, Artificial Sequence
  Synthetic polypeptide
HLARDPALEI

SEQ ID NO: 22301 - protein, 8 aa, Artificial Sequence
  Synthetic polypeptide
QGTQHSKF

SEQ ID NO: 22302 - protein, 19 aa, Artificial Sequence
  Synthetic polypeptide
CSFFFFVSLTSSKGPSTRN

SEQ ID NO: 22303 - protein, 67 aa, Artificial Sequence
  Synthetic polypeptide
QGTQHSKFIGEGARMVRELFVMAREHAPSIIFMDEIDSIGSSRLEGGSGGDSEVQRTMLELLNQLDG

SEQ ID NO: 22304 - protein, 37 aa, Artificial Sequence
  Synthetic polypeptide
HLARDPALEIHRGRGKNGEGAVCHGTGTCSIYHLHGR

SEQ ID NO: 22305 - protein, 34 aa, Artificial Sequence
  Synthetic polypeptide
QGTQHSKFIGEGARMVRELFVMAREHAPSIIFMD

SEQ ID NO: 22306 - protein, 52 aa, Artificial Sequence
  Synthetic polypeptide
HLARDPALEIHRGRGKNGEGAVCHGTGTCSIYHLHGRNRLHRLLAAGGGFWR

SEQ ID NO: 22307 - protein, 50 aa, Artificial Sequence
  Synthetic polypeptide
QGTQHSKFIGEGARMVRELFVMAREHAPSIIFMDEIDSIGSSRLEGGSGG

SEQ ID NO: 22308 - protein, 23 aa, Artificial Sequence
  Synthetic polypeptide
HLARDPALEIHRGSSASTQGQEW

SEQ ID NO: 22309 - protein, 57 aa, Artificial Sequence
  Synthetic polypeptide
QGTQHSKFIGEARPPHRGKNGEGAVCHGTGTCSIYHLHGRNRLHRLLAAGGGFWRGQ

SEQ ID NO: 22310 - protein, 28 aa, Artificial Sequence
  Synthetic polypeptide
SPFPSLGLSFSLDPDCGPLHPDLLSRIG

SEQ ID NO: 22311 - protein, 256 aa, Artificial Sequence
  Synthetic polypeptide
VRSPLWVSVSRWTLTVALFTLICCPGSDEKVFEVHVRPKKLATSLDKILLDEQAQWKHYLVSNISHDTVLQCHFTCSGKQESMNSNVSVYQPPRQVILTLQPTLVAVGKSFTIECRVPTVEPLDSLTLFLFRGNETLHYETFGKAAPAPQEATATFNSTADREDGHRNFSCLAVLDLMSRGGNIFHKHSAPKMLEIYEPVSDSQMVIIVTVVSVLLSLFVTSVLLCFIFGQHLRQQRMGTYGVRAAWRRLPQAFRP

SEQ ID NO: 22312 - protein, 13 aa, Artificial Sequence
  Synthetic polypeptide
SVPLSGSQFLAGP

SEQ ID NO: 22313 - protein, 28 aa, Artificial Sequence
  Synthetic polypeptide
SPFPSLGLSFSLDPDCGPLHPDLLSRSQ

SEQ ID NO: 22314 - protein, 58 aa, Artificial Sequence
  Synthetic polypeptide
VRSPLWVSVSRWTLTVALFTLICCPGVNEFQRQRVPASKAGHPDTATHFGGCGQVLHH

SEQ ID NO: 22315 - protein, 280 aa, Artificial Sequence
  Synthetic polypeptide
VRSPLWVSVSRWTLTVALFTLICCPGSDEKVFEVHVRPKKLAVEPKGSLEVNCSTTCNQPEVGGLETSLDKILLDEQAQWKHYLVSNISHDTVLQCHFTCSGKQESMNSNVSVYQPPRQVILTLQPTLVAVGKSFTIECRVPTVEPLDSLTLFLFRGNETLHYETFGKAAPAPQEATATFNSTADREDGHRNFSCLAVLDLMSRGGNIFHKHSAPKMLEIYEPVSDSQMVIIVTVVSVLLSLFVTSVLLCFIFGQHLRQQRMGTYGVRAAWRRLPQAFRP

SEQ ID NO: 22316 - protein, 221 aa, Artificial Sequence
  Synthetic polypeptide
VRSPLWVSVSRWTLTVALFTLICCPGSDEKVFEVHVRPKKLAVEPKGSLEVNCSTTCNQPEVGGLETSLDKILLDEQAQWKHYLVSNISHDTVLQCHFTCSGKQESMNSNVSVYQPPRQVILTLQPTLVAVGKSFTIECRVPTVEPLDSLTLFLFRGNETLHYETFGKAAPAPQEATATFNSTADREDGHRNFSCLAVLDLMSRGGNIFHKHSAPKMLEIY

SEQ ID NO: 22317 - protein, 219 aa, Artificial Sequence
  Synthetic polypeptide
VRSPLWVSVSRWTLTVALFTLICCPGSDEKVFEVHVRPKKLAVEPKGSLEVNCSTTCNQPEVGGLETSLDKILLDEQAQWKHYLVSNISHDTVLQCHFTCSGKQESMNSNVSVYQPPRQVILTLQPTLVAVGKSFTIECRVPTVEPLDSLTLFLFRGNETLHYETFGKAAPAPQEATATFNSTADREDGHRNFSCLAVLDLMSRGGNIFHKHSAPKMLE

SEQ ID NO: 22318 - protein, 171 aa, Artificial Sequence
  Synthetic polypeptide
VRSPLWVSVSRWTLTVALFTLICCPGSDEKVFEVHVRPKKLAVEPKGSLEVNCSTTCNQPEVGGLETSLDKILLDEQAQWKHYLVSNISHDTVLQCHFTCSGKQESMNSNVSVYQPPRQVILTLQPTLVAVGKSFTIECRVPTVEPLDSLTLFLFRGNETLHYETFGKAAP

SEQ ID NO: 22319 - protein, 972 aa, Artificial Sequence
  Synthetic polypeptide
FQHFRKLRRADHKIFGSTSTVTLPETLLFVSTLDGSLHAVSKRTGSIKWTLKEDPVLQVPTHVEEPAFLPDPNDGSLYTLGSKNNEGLTKLPFTIPELVQASPCRSSDGILYMGKKQDIWYVIDLLTGEKQQTLSSAFADSLCPSTSLLYLGRTEYTITMYDTKTRELRWNATYFDYAASLPEDDVDYKMSHFVSNGDGLVVTVDSESGDVLWIQNYASPVVAFYVWQREGLRKVMHINVAVETLRYLTFMSGEVGRITKWKYPFPKETEAKSKLTPTLYVGKYSTSLYASPSMVHEGVAVVPRGSTLPLLEGPQTDGVTIGDKGECVITPSTDVKFDPGLKSKNKLNYLRNYWLLIGHHETPLSASTKMLERFPNNLPKHRENVIPADSEKKSFEEVINLVDQTSENAPTTVSRDVEEKPAHAPARPEAPVDSMLKDMATIILSTFLLIGWVAFIITYPLSMHQQQQLQHQQFQKELEKIQLLQQQQQQLPFHPPGDTAQDGELLDTSGPYSESSGTSSPSTSPRASNHSLCSGSSASKAGSSPSLEQDDGDEETSVVIVGKISFCPKDVLGHGAEGTIVYRGMFDNRDVAVKRILPECFSFADREVQLLRESDEHPNVIRYFCTEKDRQFQYIAIELCAATLQEYVEQKDFAHLGLEPITLLQQTTSGLAHLHSLNIVHRDLKPHNILISMPNAHGKIKAMISDFGLCKKLAVGRHSFSRRSGVPGTEGWIAPEMLSEDCKENPTYTVDIFSAGCVFYYVISEGSHPFGKSLQRQANILLGACSLDCLHPEKHEDVIARELIEKMIAMDPQKRPSAKHVLKHPFFWSLEKQLQFFQDVSDRIEKESLDGPIVKQLERGGRAVVKMDWRENITVPLQTDLRKFRTYKGGSVRDLLRAMRNKKHHYRELPAEVRETLGSLPDDFVCYFTSRFPHLLAHTYRAMELCSHERLFQPYYFHEPPEPQPPVTPDAL

SEQ ID NO: 22320 - protein, 13 aa, Artificial Sequence
  Synthetic polypeptide
GGRIIRFLEVPAQ

SEQ ID NO: 22321 - protein, 105 aa, Artificial Sequence
  Synthetic polypeptide
GWAEWLTPIIPALWEAKVCQGLFNELLENGISVWPGYLETMQSSLEQLYSKYDEMSILFTVLVTETTLENGLIHLRSRDTTMKEMMHISKLKDFLIKYISSAKNV

SEQ ID NO: 22322 - protein, 17 aa, Artificial Sequence
  Synthetic polypeptide
SQHFGKPRFVKGYLMSY

SEQ ID NO: 22323 - protein, 19 aa, Artificial Sequence
  Synthetic polypeptide
MAHAYNPSTLGSQGLSRAI

SEQ ID NO: 22324 - protein, 25 aa, Artificial Sequence
  Synthetic polypeptide
GWAEWLTPIIPALWEAKPLLRLLWM

SEQ ID NO: 22325 - protein, 10 aa, Artificial Sequence
  Synthetic polypeptide
SQHFGKPSPY

SEQ ID NO: 22326 - protein, 120 aa, Artificial Sequence
  Synthetic polypeptide
MAHAYNPSTLGSQAPIKVALDVGRGPTLELRQVCQGLFNELLENGISVWPGYLETMQSSLEQLYSKYDEMSILFTVLVTETTLENGLIHLRSRDTTMKEMMHISKLKDFLIKYISSAKNV

SEQ ID NO: 22327 - protein, 33 aa, Artificial Sequence
  Synthetic polypeptide
MAHAYNPSTLGSQAPIKVALDVGRGPTLELRQV

SEQ ID NO: 22328 - protein, 30 aa, Artificial Sequence
  Synthetic polypeptide
SQHFGRPRQADHEVRRSRPTWLTRCLGTLC

SEQ ID NO: 22329 - protein, 299 aa, Artificial Sequence
  Synthetic polypeptide
HGALEHYVNCLDLVNKRLPYGLAQIGVCFHPVFDTKQIRNGVKSIGEKTEASLVWFTPPRTSNQWLDFWLRHRLQWWRKFAMSPSNFSSSDCQDEEGRKGNKLYYNFPWGKELIETLWNLGDHELLHMYPGNVSKLHGRDGRKNVVPCVLSVNGDLDRGMLAYLYDSFQLTENSFTRKKNLHRKVLKLHPCLAPIKVALDVGRGPTLELRQVCQGLFNELLENGISVWPGYLETMQSSLEQLYSKYDEMSILFTVLVTETTLENGLIHLRSRDTTMKEMMHISKLKDFLIKYISSAKNV

SEQ ID NO: 22330 - protein, 23 aa, Artificial Sequence
  Synthetic polypeptide
GQEIETNLANTVPWNTMLIAWIW

SEQ ID NO: 22331 - protein, 8 aa, Artificial Sequence
  Synthetic polypeptide
HGALEHYV

SEQ ID NO: 22332 - protein, 18 aa, Artificial Sequence
  Synthetic polypeptide
GQEIETNLANTVPWNTML

SEQ ID NO: 22333 - protein, 25 aa, Artificial Sequence
  Synthetic polypeptide
SQHFGRPRQADHEVPWNTMLIAWIW

SEQ ID NO: 22334 - protein, 28 aa, Artificial Sequence
  Synthetic polypeptide
SGAVAHACNPSTLGGQGRQIMRCLGTLC

SEQ ID NO: 22335 - protein, 20 aa, Artificial Sequence
  Synthetic polypeptide
SQHFGRPRQADHEVPWNTML

SEQ ID NO: 22336 - protein, 60 aa, Artificial Sequence
  Synthetic polypeptide
VCTLHKVKRELRSKMEKEIQQLQDMITQNDDDVFFRELEAERFRSRLQLASFQYSKSPSL

SEQ ID NO: 22337 - protein, 21 aa, Artificial Sequence
  Synthetic polypeptide
AVSYSPGVQWTVLSRFVHYIR

SEQ ID NO: 22338 - protein, 22 aa, Artificial Sequence
  Synthetic polypeptide
SNRLYHIAPVCSGLYSLGLYIT

SEQ ID NO: 22339 - protein, 11 aa, Artificial Sequence
  Synthetic polypeptide
VALRTEVYWKV

SEQ ID NO: 22340 - protein, 684 aa, Artificial Sequence
  Synthetic polypeptide
GLRYIGKSDSVTISVWNHKKIHKKQGAGFLGCVRLLSNAINRLKDTGYQRLDLCKLGPNDNDTVRGQIVVSLQSRDRIGTGGQVVDCSRLFDNDLPDGWEERRTASGRIQYLNHITRTTQWERPTRPASEYSSPGRPLSCFVDENTPISGTNGATCGQSSDPRLAERRVRSQRHRNYMSRTHLHTPPDLPEGYEQRTTQQGQVYFLHTQTGVSTWHDPRVPRDLSNINCEELGPLPPGWEIRNTATGRVYFVDHNNRTTQFTDPRLSANLHLVLNRQNQLKDQQQQQVVSLCPDDTECLTVPRYKRDLVQKLKILRQELSQQQPQAGHCRIEVSREEIFEESYRQVMKMRPKDLWKRLMIKFRGEEGLDYGGVAREWLYLLSHEMLNPYYGLFQYSRDDIYTLQINPDSAVNPEHLSYFHFVGRIMGMAVFHGHYIDGGFTLPFYKQLLGKSITLDDMELVDPDLHNSLVWILENDITGVLDHTFCVEHNAYGEIIQHELKPNGKSIPVNEENKKEYVRLYVNWRFLRGIEAQFLALQKGFNEVIPQHLLKTFDEKELELIICGLGKIDVNDWKVNTRLKHCTPDSNIVKWFWKAVEFFDEERRARLLQFVTGSSRVPLQGFKALQGAAGPRLFTIHQIDACTNNLPKAHTCFNRIDIPPYESYEKLYEKLLTAIEETCGFAVE

SEQ ID NO: 22341 - protein, 510 aa, Artificial Sequence
  Synthetic polypeptide
GLRYIGKSDSVTISVWNHKKIHKKQGAGFLGCVRLLSNAINRLKDTGYQRLDLCKLGPNDNDTVRGQIVVSLQSRDRIGTGGQVVDCSRLFDNDLPDGWEERRTASGRIQYLNHITRTTQWERPTRPASEYSSPGRPLSCFVDENTPISGTNGATCGQSSDPRLAERRVRSQRHRNYMSRTHLHTPPDLPEGYEQRTTQQGQVYFLHTQTGVSTWHDPRVPRDLSNINCEELGPLPPGWEIRNTATGRVYFVDHNNRTTQFTDPRLSANLHLVLNRQNQLKDQQQQQVVSLCPDDTECLTVPRYKRDLVQKLKILRQELSQQQPQAGHCRIEVSREEIFEESYRQVMKMRPKDLWKRLMIKFRGEEGLDYGGVAREWLYLLSHEMLNPYYGLFQYSRDDIYTLQINPDSAVNPEHLSYFHFVGRIMGMAVFHGHYIDGGFTLPFYKQLLGKSITLDDMELVDPDLHNSLVWILENDITGVLDHTFCVEHNAYGEIIQHELKPNGKSIPVN

SEQ ID NO: 22342 - protein, 66 aa, Artificial Sequence
  Synthetic polypeptide
SVTVFLHSQMGLSSCRKTSSGLPLILHYGLPDPFAKVVVDGSGQCHSTDTVKNTLDPKWNQHYDLQ

SEQ ID NO: 22343 - protein, 26 aa, Artificial Sequence
  Synthetic polypeptide
FYIMDFLIHLLRWWLMDLGNAILQIL

SEQ ID NO: 22344 - protein, 17 aa, Artificial Sequence
  Synthetic polypeptide
LQENKLRAPTDSTLWTS

SEQ ID NO: 22345 - protein, 746 aa, Artificial Sequence
  Synthetic polypeptide
SVTVFLHSQMGLSSCRKTSSGLPLILHYGLPDPFAKVVVDGSGQCHSTDTVKNTLDPKWNQHYDLYIGKSDSVTISVWNHKKIHKKQGAGFLGCVRLLSNAINRLKDTGYQRLDLCKLGPNDNDTVRGQIVVSLQSRDRIGTGGQVVDCSRLFDNDLPDGWEERRTASGRIQYLNHITRTTQWERPTRPASEYSSPGRPLSCFVDENTPISGTNGATCGQSSDPRLAERRVRSQRHRNYMSRTHLHTPPDLPEGYEQRTTQQGQVYFLHTQTGVSTWHDPRVPRDLSNINCEELGPLPPGWEIRNTATGRVYFVDHNNRTTQFTDPRLSANLHLVLNRQNQLKDQQQQQVVSLCPDDTECLTVPRYKRDLVQKLKILRQELSQQQPQAGHCRIEVSREEIFEESYRQVMKMRPKDLWKRLMIKFRGEEGLDYGGVAREWLYLLSHEMLNPYYGLFQYSRDDIYTLQINPDSAVNPEHLSYFHFVGRIMGMAVFHGHYIDGGFTLPFYKQLLGKSITLDDMELVDPDLHNSLVWILENDITGVLDHTFCVEHNAYGEIIQHELKPNGKSIPVNEENKKEYVRLYVNWRFLRGIEAQFLALQKGFNEVIPQHLLKTFDEKELELIICGLGKIDVNDWKVNTRLKHCTPDSNIVKWFWKAVEFFDEERRARLLQFVTGSSRVPLQGFKALQGAAGPRLFTIHQIDACTNNLPKAHTCFNRIDIPPYESYEKLYEKLLTAIEETCGFAVE

SEQ ID NO: 22346 - protein, 572 aa, Artificial Sequence
  Synthetic polypeptide
SVTVFLHSQMGLSSCRKTSSGLPLILHYGLPDPFAKVVVDGSGQCHSTDTVKNTLDPKWNQHYDLYIGKSDSVTISVWNHKKIHKKQGAGFLGCVRLLSNAINRLKDTGYQRLDLCKLGPNDNDTVRGQIVVSLQSRDRIGTGGQVVDCSRLFDNDLPDGWEERRTASGRIQYLNHITRTTQWERPTRPASEYSSPGRPLSCFVDENTPISGTNGATCGQSSDPRLAERRVRSQRHRNYMSRTHLHTPPDLPEGYEQRTTQQGQVYFLHTQTGVSTWHDPRVPRDLSNINCEELGPLPPGWEIRNTATGRVYFVDHNNRTTQFTDPRLSANLHLVLNRQNQLKDQQQQQVVSLCPDDTECLTVPRYKRDLVQKLKILRQELSQQQPQAGHCRIEVSREEIFEESYRQVMKMRPKDLWKRLMIKFRGEEGLDYGGVAREWLYLLSHEMLNPYYGLFQYSRDDIYTLQINPDSAVNPEHLSYFHFVGRIMGMAVFHGHYIDGGFTLPFYKQLLGKSITLDDMELVDPDLHNSLVWILENDITGVLDHTFCVEHNAYGEIIQHELKPNGKSIPVN

SEQ ID NO: 22347 - protein, 218 aa, Artificial Sequence
  Synthetic polypeptide
GLRAEKPWLYLQQHWQDLGYMILYITGRPDMQKQRVVSWLSQHNFPQGMIFFSDGLVHDPLRQKAIFLRNLMQECFIKISAAYGSTKDISVYSVLGLPASQIFIVGRPTKKYQTQCQFLSEGYAAHLAALEASHRSRPKKNNSRMILRKGSFGLHAQPEFLRKRNHLRRTMSVQQPDPPAANPKPERAQSQPESDKDHERPLPALSWARGPPKFESVP

SEQ ID NO: 22348 - protein, 20 aa, Artificial Sequence
  Synthetic polypeptide
GCELRSPGFTSNSTGRTWAT

SEQ ID NO: 22349 - protein, 53 aa, Artificial Sequence
  Synthetic polypeptide
EALALPPTALAGLGLHDPLHHGTAGHAEAAGGVVAVPAQLPTGHDLLLRWAGA

SEQ ID NO: 22350 - protein, 78 aa, Artificial Sequence
  Synthetic polypeptide
GLRAEKPWLYLQQHWQDLGYMILYITGRPDMQKQRVVSWLSQHNFPQGMIFFSDGLVHDPLRQKAIFLRNLMQEMCFP

SEQ ID NO: 22351 - protein, 13 aa, Artificial Sequence
  Synthetic polypeptide
GCPSHVELFYKMN

SEQ ID NO: 22352 - protein, 50 aa, Artificial Sequence
  Synthetic polypeptide
ISLTRSDGFIRGNPFHLALILSLFCLHVRCPLLFRRDCEAAPAMWNCFTR

SEQ ID NO: 22353 - protein, 104 aa, Artificial Sequence
  Synthetic polypeptide
DVPCSSAVIVRLPQPCGTVLQDELENRSNQVRCAEKKLQHKELESQEQITYIRQEYETKLKGLMPASLRQELEDTISSLKSQVNFLQKRASILQEELTTYQGRR

SEQ ID NO: 22354 - protein, 52 aa, Artificial Sequence
  Synthetic polypeptide
DVPCSSAVIVRLPQPCGTVLQDELENRSNQVNFLQKRASILQEELTTYQGRR

SEQ ID NO: 22355 - protein, 52 aa, Artificial Sequence
  Synthetic polypeptide
DVPCSSAVIVRLPQPCGTVLQDELENRSNQVRCAEKKLQHKELESQEQMKCR

SEQ ID NO: 22356 - protein, 56 aa, Artificial Sequence
  Synthetic polypeptide
GRARWLTPVIPALWEAEVGRSPGQETETILANMEKGPRRAHPASSRRSSENCTGFP

SEQ ID NO: 22357 - protein, 136 aa, Artificial Sequence
  Synthetic polypeptide
SQPFGRPRWADHQVKRLRPSWPTWRRDRAVHIQHPPGEAARTVPGFLEKTEVPSPGKHRDPRRQRGRLPAALLQDTCPPAGPAWGKHPGHGCRGPVLQGSRHPHLQLRAGEGHTSPFPCCPGPHPHQVRPLSCHLL

SEQ ID NO: 22358 - protein, 905 aa, Artificial Sequence
  Synthetic polypeptide
DHLGQHGEGTAPCTSSILQEKQRELYRVSLRRQRFPAQGSIEIHEDSEEGCPQRSCKTHVLLLVLHGGNILDTGAGDPSCKAADIHTFSSVLEKVTRAHFPAALGHILIKFVPCPAICSEAFSLVSHLNPYSHDEGCLSSSQDHVPLAALPLLAISSPQYQDAVATVIERANQVYREFLKSSDGIGFSGQVCLIGDCVGGLLAFDAICYSAGPSGDSPASSSRKGSISSTQDTPVAVEEDCSLASSKRLSKSNIDISSGLEDEEPKRPLPRKQSDSSTYDCEAITQHHAFLSSIHSSVLKDESETPAAGGPQLPEVSLGRFDFDVSDFFLFGSPLGLVLAMRRTVLPGLDGFQVRPACSQVYSFFHCADPSASRLEPLLEPKFHLVPPVSVPRYQRFPLGDGQSLLLADALHTHSPLFLEGSSRDSPPLLDAPASPPQASRFQRPGRRMSEGSSHSESSESSDSMAPVGASRITAKWWGSKRIDYALYCPDVLTAFPTVALPHLFHASYWESTDVVAFILRQVMRYESVNIKESARLDPAALSPANPREKWLRKRTQVKLRNVTANHRANDVIAAEDGPQVLVGRFMYGPLDMVALTGEKVDILVMAEPSSGRWVHLDTEITNSSGRITYNVPRPRRLGVGVYPVKMVVRGDQTCAMSYLTVLPRGMECVVFSIDGSFAASVSIMGSDPKVRPGAVDVVRHWQDLGYMILYITGRPDMQKQRVVSWLSQHNFPQGMIFFSDGLVHDPLRQKAIFLRNLMQECFIKISAAYGSTKDISVYSVLGLPASQIFIVGRPTKKYQTQCQFLSEGYAAHLAALEASHRSRPKKNNSRMILRKGSFGLHAQPEFLRKRNHLRRTMSVQQPDPPAANPKPERAQSQPESDKDHERPLPALSWARGPPKFESVP

SEQ ID NO: 22359 - protein, 41 aa, Artificial Sequence
  Synthetic polypeptide
PSTYSLHLMVKMKTSYFSLSWSTTFPIQNPCPRRLFLSAKD

SEQ ID NO: 22360 - protein, 26 aa, Artificial Sequence
  Synthetic polypeptide
WQLLHPGGSPNATSRGLSDPQRTASI

SEQ ID NO: 22361 - protein, 197 aa, Artificial Sequence
  Synthetic polypeptide
PAPANEIRGEVSRVGLEAQVQDMAELLLQPLLQQDCDGSCSIPVGPRMQPAEASLTLNVQPPFDGEDEDELFQSIMEHNVSYPKSLSKEAVSVCKGLMTKHPAKRLGCGPEGERDVREHAFFRRIDWEKLENREIQPPFKPKVCGKGAENFDKFFTRGQPVLTPPDQLVIANIDQSDFEGFSYVNPQFVHPILQSAV

SEQ ID NO: 22362 - protein, 374 aa, Artificial Sequence
  Synthetic polypeptide
GSVQWITPVIPALWEAKAVAKMVQQCCTYVEEITDLPIKLRLIDTLRMVTEGKIYVEIERARLTKTLATIKEQNGDVKEAASILQELQVETYGSMEKKERVEFILEQMRLCLAVKDYIRTQIISKKINTKFFQEENTEKLKLKYYNLMIQLDQHEGSYLSICKHYRAIYDTPCIQAESEKWQQALKSVVLYVILAPFDNEQSDLVHRISGDKKLEEIPKYKDLLKLFTTMELMRWSTLVEDYGMELRKGSLESPATDVFGSTEEGEKRWKDLKNRVVEHNIRIMAKYYTRITMKRMAQLLDLSVDESEAFLSNLVVNKTIFAKVDRLAGIINFQRPKDPNNLLNDWSQKLNSLMSLVNKTTHLIAKEEMIHNLQ

SEQ ID NO: 22363 - protein, 32 aa, Artificial Sequence
  Synthetic polypeptide
YQHFGRPRLLPKWFNSAVLMLRKSQTFLSNFD

SEQ ID NO: 22364 - protein, 29 aa, Artificial Sequence
  Synthetic polypeptide
LSAVDHTCNTSTLGGQGCCQNGSTVLYLC

SEQ ID NO: 22365 - protein, 23 aa, Artificial Sequence
  Synthetic polypeptide
WQNMTGVPVLAHCCRSTKLDSCT

SEQ ID NO: 22366 - protein, 25 aa, Artificial Sequence
  Synthetic polypeptide
QGYQCWPTAAGVQNWTAVHDQQTQP

SEQ ID NO: 22367 - protein, 288 aa, Artificial Sequence
  Synthetic polypeptide
LSPRGHVSDSLTLLLGCSQLMAEYDRGTSAGPLLQEYKIGQLYMISKHSHEQSDRGEGVEVVQNEPFEDPHHGNGQFTEKRVYLNSKLPSWARAVVPKIFYVTEKAWNYYPYTITEYTCSFLPKFSIHIETKYEDNKGSNDTIFDNEAKDVEREVCFIDIACDEIPERYYKESEDPKHFKSEKTGRGQLREGWRDSHQPIMCSYKLVTVKFEVWGLQTRVEQFVHKVVRDILLIGHRQAFAWVDEWYDMTMDDVREYEKNMHEQTNIKVCNQHSSPVDDIESHAQTST

SEQ ID NO: 22368 - protein, 288 aa, Artificial Sequence
  Synthetic polypeptide
LSPRGHVSDSLTLLLGCSQLMAEYDRGTSAGPLLQEYKIGQLYMISKHSHEQSDRGEGVEVVQNEPFEDPHHGNGQFTEKRVYLNSKLPSWARAVVPKIFYVTEKAWNYYPYTITEYKCSFLPKFSIHIETKYEDNKGSNDTIFDNEAKDVEREVCFIDIACDEIPERYYKESEDPKHFKSEKTGRGQLREGWRDSHQPIMCSYKLVTVKFEVWGLQTRVEQFVHKVVRDILLIGHRQAFAWVDEWYDMTMDDVREYEKNMHEQTNIKVCNQHSSPVDDIESHAQTST

SEQ ID NO: 22369 - protein, 352 aa, Artificial Sequence
  Synthetic polypeptide
LSPRGHVSDSLTLLLGCSQLMAEYDRGTSAGPLLQEYKIGQLYMISKHSHEQSDRGEGVEVVQNEPFEDPHHGNGQFTEKRVYLNSKLPSWARAVVPKIFYVTEKAWNYYPYTITEYKCSFLPKFSIHIETKYEDNKGSNDTIFDNEAKDVEREVCFIDIACDEIPERYYKESEDPKHFKSEKTGRGQLREGWRDSHQPIMCSYKLVTVKFEVWGLQTRVEQFVHKVVRDILLIGHRQAFAWVDEWYDMTMDEVREFERATQEATNKKIGIFPPAISISSIPLLPSSVRSAPSSAPSTPLSTDAPEFLSVPKDRPRKKSAPETLTLPDPEKKATLNLPGMHSSDKPCRPKSE

SEQ ID NO: 22370 - protein, 352 aa, Artificial Sequence
  Synthetic polypeptide
LSPRGHVSDSLTLLLGCSQLMAEYDRGTSAGPLLQEYKIGQLYMISKHSHEQSDRGEGVEVVQNEPFEDPHHGNGQFTEKRVYLNSKLPSWARAVVPKIFYVTEKAWNYYPYTITEYTCSFLPKFSIHIETKYEDNKGSNDTIFDNEAKDVEREVCFIDIACDEIPERYYKESEDPKHFKSEKTGRGQLREGWRDSHQPIMCSYKLVTVKFEVWGLQTRVEQFVHKVVRDILLIGHRQAFAWVDEWYDMTMDEVREFERATQEATNKKIGIFPPAISISSIPLLPSSVRSAPSSAPSTPLSTDAPEFLSVPKDRPRKKSAPETLTLPDPEKKATLNLPGMHSSDKPCRPKSE

SEQ ID NO: 22371 - protein, 257 aa, Artificial Sequence
  Synthetic polypeptide
SSELGYKIGQLYMISKHSHEQSDRGEGVEVVQNEPFEDPHHGNGQFTEKRVYLNSKLPSWARAVVPKIFYVTEKAWNYYPYTITEYTCSFLPKFSIHIETKYEDNKGSNDTIFDNEAKDVEREVCFIDIACDEIPERYYKESEDPKHFKSEKTGRGQLREGWRDSHQPIMCSYKLVTVKFEVWGLQTRVEQFVHKVVRDILLIGHRQAFAWVDEWYDMTMDDVREYEKNMHEQTNIKVCNQHSSPVDDIESHAQTST

SEQ ID NO: 22372 - protein, 12 aa, Artificial Sequence
  Synthetic polypeptide
AQNLGTKLDSCT

SEQ ID NO: 22373 - protein, 18 aa, Artificial Sequence
  Synthetic polypeptide
LRTWVQNWTAVHDQQTQP

SEQ ID NO: 22374 - protein, 257 aa, Artificial Sequence
  Synthetic polypeptide
SSELGYKIGQLYMISKHSHEQSDRGEGVEVVQNEPFEDPHHGNGQFTEKRVYLNSKLPSWARAVVPKIFYVTEKAWNYYPYTITEYKCSFLPKFSIHIETKYEDNKGSNDTIFDNEAKDVEREVCFIDIACDEIPERYYKESEDPKHFKSEKTGRGQLREGWRDSHQPIMCSYKLVTVKFEVWGLQTRVEQFVHKVVRDILLIGHRQAFAWVDEWYDMTMDDVREYEKNMHEQTNIKVCNQHSSPVDDIESHAQTST

SEQ ID NO: 22375 - protein, 321 aa, Artificial Sequence
  Synthetic polypeptide
SSELGYKIGQLYMISKHSHEQSDRGEGVEVVQNEPFEDPHHGNGQFTEKRVYLNSKLPSWARAVVPKIFYVTEKAWNYYPYTITEYKCSFLPKFSIHIETKYEDNKGSNDTIFDNEAKDVEREVCFIDIACDEIPERYYKESEDPKHFKSEKTGRGQLREGWRDSHQPIMCSYKLVTVKFEVWGLQTRVEQFVHKVVRDILLIGHRQAFAWVDEWYDMTMDEVREFERATQEATNKKIGIFPPAISISSIPLLPSSVRSAPSSAPSTPLSTDAPEFLSVPKDRPRKKSAPETLTLPDPEKKATLNLPGMHSSDKPCRPKSE

SEQ ID NO: 22376 - protein, 321 aa, Artificial Sequence
  Synthetic polypeptide
SSELGYKIGQLYMISKHSHEQSDRGEGVEVVQNEPFEDPHHGNGQFTEKRVYLNSKLPSWARAVVPKIFYVTEKAWNYYPYTITEYTCSFLPKFSIHIETKYEDNKGSNDTIFDNEAKDVEREVCFIDIACDEIPERYYKESEDPKHFKSEKTGRGQLREGWRDSHQPIMCSYKLVTVKFEVWGLQTRVEQFVHKVVRDILLIGHRQAFAWVDEWYDMTMDEVREFERATQEATNKKIGIFPPAISISSIPLLPSSVRSAPSSAPSTPLSTDAPEFLSVPKDRPRKKSAPETLTLPDPEKKATLNLPGMHSSDKPCRPKSE

SEQ ID NO: 22377 - protein, 128 aa, Artificial Sequence
  Synthetic polypeptide
RQGMESDQHSPWHTDPKHFKSEKTGRGQLREGWRDSHQPIMCSYKLVTVKFEVWGLQTRVEQFVHKVVRDILLIGHRQAFAWVDEWYDMTMDDVREYEKNMHEQTNIKVCNQHSSPVDDIESHAQTST

SEQ ID NO: 22378 - protein, 28 aa, Artificial Sequence
  Synthetic polypeptide
GKAWKVTSTVPGTQILSTSSQRRQDGDS

SEQ ID NO: 22379 - protein, 9 aa, Artificial Sequence
  Synthetic polypeptide
PAQSLAHRS

SEQ ID NO: 22380 - protein, 192 aa, Artificial Sequence
  Synthetic polypeptide
RQGMESDQHSPWHTDPKHFKSEKTGRGQLREGWRDSHQPIMCSYKLVTVKFEVWGLQTRVEQFVHKVVRDILLIGHRQAFAWVDEWYDMTMDEVREFERATQEATNKKIGIFPPAISISSIPLLPSSVRSAPSSAPSTPLSTDAPEFLSVPKDRPRKKSAPETLTLPDPEKKATLNLPGMHSSDKPCRPKSE

SEQ ID NO: 22381 - protein, 16 aa, Artificial Sequence
  Synthetic polypeptide
SQEFETSLANMVLLSK

SEQ ID NO: 22382 - protein, 55 aa, Artificial Sequence
  Synthetic polypeptide
QAQWLMPVIPALQEAEMGRSPEVRSLRPAWPTWCSSASDDSNHQGAACLHCSLRP

SEQ ID NO: 22383 - protein, 314 aa, Artificial Sequence
  Synthetic polypeptide
DQPGQHGAPQQVMTQIIRGQPVSTAVSAPNTVSSTPGQKSLTSATSTSNIQSSASQPPRPQQGQVKLTMAQLTQLTQGHGGNQGLTVVIQGQGQTTGQLQLIPQGVTVLPGPGQQLMQAAMPNGTVQRFLFTPLATTATTASTTTTTVSTTAAGTGEQRQSKLSPQMQVHQDKTLPPAQSSSVGPAEAQPQTAQPSAQPQPQTQPQSPAQPEVQTQPEVQTQTTVSSHVPSEAQPTHAQSSKPQVAAQSQPQSNVQGQSPVRVQSPSQTRIRPSTPSQLSPGQQSQVQTTTSQPIPIQPHTSLQIPSQGQPQSQ

SEQ ID NO: 22384 - protein, 840 aa, Artificial Sequence
  Synthetic polypeptide
DQPGQHGAPQQVMTQIIRGQPVSTAVSAPNTVSSTPGQKSLTSATSTSNIQSSASQPPRPQQGQVKLTMAQLTQLTQGHGGNQGLTVVIQGQGQTTGQLQLIPQGVTVLPGPGQQLMQAAMPNGTVQRFLFTPLATTATTASTTTTTVSTTAAGTGEQRQSKLSPQMQVHQDKTLPPAQSSSVGPAEAQPQTAQPSAQPQPQTQPQSPAQPEVQTQPEVQTQTTVSSHVPSEAQPTHAQSSKPQVAAQSQPQSNVQGQSPVRVQSPSQTRIRPSTPSQLSPGQQSQVQTTTSQPIPIQPHTSLQIPSQGQPQSQPQVQSSTQTLSSGQTLNQVTVSSPSRPQLQIQQPQPQVIAVPQLQQQVQVLSQIQSQVVAQIQAQQSGVPQQIKLQLPIQIQQSSAVQTHQIQNVVTVQAASVQEQLQRVQQLRDQQQKKKQQQIEIKREHTLQASNQSEIIQKQVVMKHNAVIEHLKQKKSMTPAEREENQRMIVCNQVMKYILDKIDKEEKQAAKKRKREESVEQKRSKQNATKLSALLFKHKEQLRAEILKKRALLDKDLQIEVQEELKRDLKIKKEKDLMQLAQATAVAAPCPPVTPAPPAPPAPPPSPPPPPAVQHTGLLSTPTLPAASQKRKREEEKDSSSKSKKKKMISTTSKETKKDTKLYCICKTPYDESKFYIGCDRCQNWYHGRCVGILQSEAELIDEYVCPQCQSTEDAMTVLTPLTEKDYEGLKRVLRSLQAHKMAWPFLEPVDPNDAPDYYGVIKEPMDLATMEERVQRRYYEKLTEFVADMTKIFDNCRYYNPSDSPFYQCAEVLESFFVQKLKGFKASRSHNNKLQSTAS

SEQ ID NO: 22385 - protein, 697 aa, Artificial Sequence
  Synthetic polypeptide
DQPGQHGAPQQVMTQIIRGQPVSTAVSAPNTVSSTPGQKSLTSATSTSNIQSSASQPPRPQQGQVKLTMAQLTQLTQGHGGNQGLTVVIQGQGQTTGQLQLIPQGVTVLPGPGQQLMQAAMPNGTVQRFLFTPLATTATTASTTTTTVSTTAAGTGEQRQSKLSPQMQVHQDKTLPPAQSSSVGPAEAQPQTAQPSAQPQPQTQPQSPAQPEVQTQPEVQTQTTVSSHVPSEAQPTHAQSSKPQVAAQSQPQSNVQGQSPVRVQSPSQTRIRPSTPSQLSPGQQSQVQTTTSQPIPIQPHTSLQIPSQGQPQSQPQVVMKHNAVIEHLKQKKSMTPAEREENQRMIVCNQVMKYILDKIDKEEKQAAKKRKREESVEQKRSKQNATKLSALLFKHKEQLRAEILKKRALLDKDLQIEVQEELKRDLKIKKEKDLMQLAQATAVAAPCPPVTPAPPAPPAPPPSPPPPPAVQHTGLLSTPTLPAASQKRKREEEKDSSSKSKKKKMISTTSKETKKDTKLYCICKTPYDESKFYIGCDRCQNWYHGRCVGILQSEAELIDEYVCPQCQSTEDAMTVLTPLTEKDYEGLKRVLRSLQAHKMAWPFLEPVDPNDAPDYYGVIKEPMDLATMEERVQRRYYEKLTEFVADMTKIFDNCRYYNPSDSPFYQCAEVLESFFVQKLKGFKASRSHNNKLQSTAS

SEQ ID NO: 22386 - protein, 42 aa, Artificial Sequence
  Synthetic polypeptide
DQPGQHGAPQQVMTQIIRGQPVSTAVSAPNTVSSTPGQKSLT

SEQ ID NO: 22387 - protein, 22 aa, Artificial Sequence
  Synthetic polypeptide
RERDRDREIKQVPGPDMSVLVS

SEQ ID NO: 22388 - protein, 11 aa, Artificial Sequence
  Synthetic polypeptide
SKCQAQTCPSL

SEQ ID NO: 22389 - protein, 225 aa, Artificial Sequence
  Synthetic polypeptide
RERQRQRNKASARPRHVRPCKLKASMGAFLPNQDWITSHPEAPQDFEQFFSDPYRKTPSPNKRSIYIQSIGSLGNTRIISEEYIKWLTGYCKAYFYGLRVKLLEPVPVSVTRCSFRVNENTHNLQIHAGDILKFLKKKKPEDAFCVVGITMIDLYPRDSWNFVFGQASLTDGVGIFSFARYGSDFYSMHYKGKVKKLKKTSSSDYSIFDNYYIPEITSVLLLRSC

SEQ ID NO: 22390 - protein, 372 aa, Artificial Sequence
  Synthetic polypeptide
RERDRDREIKQVMQIIRHSEQTLKTALISKNPVLVSQYEKLNAGEQRLMNEAFQPASDLFGPITLHSPSDWITSHPEAPQDFEQFFSDPYRKTPSPNKRSIYIQSIGSLGNTRIISEEYIKWLTGYCKAYFYGLRVKLLEPVPVSVTRCSFRVNENTHNLQIHAGDILKFLKKKKPEDAFCVVGITMIDLYPRDSWNFVFGQASLTDGVGIFSFARYGSDFYSMHYKGKVKKLKKTSSSDYSIFDNYYIPEITSVLLLRSCKTLTHEIGHIFGLRHCQWLACLMQGSNHLEEADRRPLNLCPICLHKLQCAVGFSIVERYKALVRWIDDESSDTPGATPEHSHEDNGNLPKPVEAFKEWKEWIIKCLAVLQK

SEQ ID NO: 22391 - protein, 37 aa, Artificial Sequence
  Synthetic polypeptide
RERQRQRNKASDANNTALRTDTKNSSHLKEPSACITV

SEQ ID NO: 22392 - protein, 207 aa, Artificial Sequence
  Synthetic polypeptide
RERDRDREIKQVMQIIRHSEQTLKTALISKNPVLVSQYEKLNAGEQRLMNEAFQPASDLFGPITLHSPSDWITSHPEAPQDFEQFFSDPYRKTPSPNKRSIYIQSIGSLGNTRIISEEYIKWLTGYCKAYFYGLRVKLLEPVPVSVTRCSFRVNENTHNLQIHAGDILKFLKKKKPEDAFCVVGITMIDLYPRDSWNFVFGQASLTD

SEQ ID NO: 22393 - protein, 314 aa, Artificial Sequence
  Synthetic polypeptide
RERDRDREIKQVMQIIRHSEQTLKTALISKNPVLVSQYEKLNAGEQRLMNEAFQPASDLFGPITLHSPSDWITSHPEAPQDFEQFFSDPYRKTPSPNKRSIYIQSIGDILKFLKKKKPEDAFCVVGITMIDLYPRDSWNFVFGQASLTDGVGIFSFARYGSDFYSMHYKGKVKKLKKTSSSDYSIFDNYYIPEITSVLLLRSCKTLTHEIGHIFGLRHCQWLACLMQGSNHLEEADRRPLNLCPICLHKLQCAVGFSIVERYKALVRWIDDESSDTPGATPEHSHEDNGNLPKPVEAFKEWKEWIIKCLAVLQK

SEQ ID NO: 22394 - protein, 218 aa, Artificial Sequence
  Synthetic polypeptide
RERDRDREIKQVMQIIRHSEQTLKTALISKNPVLVSQYEKLNAGEQRLMNEAFQPASDLFGPITLHSPSDWITSHPEAPQDFEQFFSDPYRKTPSPNKRSIYIQSIGSLGNTRIISEEYIKWLTGYCKAYFYGLRVKLLEPVPVSVTRCSFRVNENTHNLQIHAGDILKFLKKKKPEDAFCVVGITMIDLYPRDSWNFVFGQASLTDGVGIFSFARYG

SEQ ID NO: 22395 - protein, 260 aa, Artificial Sequence
  Synthetic polypeptide
RERDRDREIKQVMQIIRHSEQTLKTALISKNPVLVSQYEKLNAGEQRLMNEAFQPASDLFGPITLHSPSDWITSHPEAPQDFEQFFSDPYRKTPSPNKRSIYIQSIGSLGNTRIISEEYIKWLTGYCKAYFYGLRVKLLEPVPVSVTRCSFRVNENTHNLQIHAGDILKFLKKKKPEDAFCVVGITMIDLYPRDSWNFVFGQASLTDGVGIFSFARYGSDFYSMHYKGKVKKLKKTSSSDYSIFDNYYIPEITSVLLLRS

SEQ ID NO: 22396 - protein, 209 aa, Artificial Sequence
  Synthetic polypeptide
RERDRDREIKQVMQIIRHSEQTLKTALISKNPVLVSQYEKLNAGEQRLMNEAFQPASDLFGPITLHSPSDWITSHPEAPQDFEQFFSDPYRKTPSPNKRSIYIQSIGSLGNTRIISEEYIKWLTGYCKAYFYGLRVKLLEPVPVSVTRCSFRVNENTHNLQIHAGDILKFLKKKKPEDAFCVVGITMIDLYPRDSWNFVFGQASLTDGV

SEQ ID NO: 22397 - protein, 213 aa, Artificial Sequence
  Synthetic polypeptide
RERDRDREIKQVMQIIRHSEQTLKTALISKNPVLVSQYEKLNAGEQRLMNEAFQPASDLFGPITLHSPSDWITSHPEAPQDFEQFFSDPYRKTPSPNKRSIYIQSIGSLGNTRIISEEYIKWLTGYCKAYFYGLRVKLLEPVPVSVTRCSFRVNENTHNLQIHAGDILKFLKKKKPEDAFCVVGITMIDLYPRDSWNFVFGQASLTDGTGEVD

SEQ ID NO: 22398 - protein, 128 aa, Artificial Sequence
  Synthetic polypeptide
NFKFVNKVLFHPNSGAAGEFGALQTVRLERYKAFYITGGARACDGSTGPELQHKFPLIFNLEDDTAEAVPLERGGAEYQAVLPEVRKVLADVLQDIANDNISSADYTQDPSVTPCCNPYQIACRCQAA

SEQ ID NO: 22399 - protein, 51 aa, Artificial Sequence
  Synthetic polypeptide
TRCCSTPTAGQLESLEPCRLSAWSVTRPSTLPVEPGRVMGARGLSCSISFL

SEQ ID NO: 22400 - protein, 40 aa, Artificial Sequence
  Synthetic polypeptide
VCEQGAVPPQQRGSWRVWSPADCPPGALQGLLHYRWSQGV

SEQ ID NO: 22401 - protein, 109 aa, Artificial Sequence
  Synthetic polypeptide
AKHFGPQDHHWKEQIDSQGGARACDGSTGPELQHKFPLIFNLEDDTAEAVPLERGGAEYQAVLPEVRKVLADVLQDIANDNISSADYTQDPSVTPCCNPYQIACRCQAA

SEQ ID NO: 22402 - protein, 22 aa, Artificial Sequence
  Synthetic polypeptide
ILKVEPGRVMGARGLSCSISFL

SEQ ID NO: 22403 - protein, 23 aa, Artificial Sequence
  Synthetic polypeptide
KTFWTTGSSLEGANRFSRWSQGV

SEQ ID NO: 22404 - protein, 32 aa, Artificial Sequence
  Synthetic polypeptide
SVTVSHHPQMGSSCRKTSSGFLLILHYGFPGV

SEQ ID NO: 22405 - protein, 102 aa, Artificial Sequence
  Synthetic polypeptide
FYIMAFLGFDVCWLHPYHGHFNGSYCKICTNCRPDWFCDGLHPLSPLWPVFDNFSFPDECVDKETFPYGLGCVSPYCLLGDPGIPSIVYTSSCIFGMDFVSS

SEQ ID NO: 22406 - protein, 1372 aa, Artificial Sequence
  Synthetic polypeptide
LQENKLRVPTDSTLWLSWGLMYAGFILIMATLMALIVKSAQIVVLTGFVMVFTLFLLYGLSLITLAFLMSVLIKKPFLTGLVVFLLIVFWGILGFPALYTRLPAFLEWTLCLLSPFAFTVGMAQLIHLDYDVNSNAHLDSSQNPYLIIATLFMLVFDTLLYLVLTLYFDKILPAEYGHRCSPLFFLKSCFWFQHGRANHVVLENETDSDPTPNDCFEPVSPEFCGKEAIRIKNLKKEYAGKCERVEALKGVVFDIYEGQITALLGHSGAGKTTLLNILSGLSVPTSGSVTVYNHTLSRMADIENISKFTGFCPQSNVQFGFLTVKENLRLFAKIKGILPHEVEKEVQRVVQELEMENIQDILAQNLSGGQNRKLTFGIAILGDPQVLLLDEPTAGLDPLSRHRIWNLLKEGKSDRVILFSTQFIDEADILADRKVFISNGKLKCAGSSLFLKKKWGIGYHLSLHLNERCDPESITSLVKQHISDAKLTAQSEEKLVYILPLERTNKFPELYRDLDRCSNQGIEDYGVSITTLNEVFLKLEGKSTIDESDIGIWGQLQTDGAKDIGSLVELEQVLSSFHETRKTISGVALWRQQVCAIAKVRFLKLKKERKSLWTILLLFGISFIPQLLEHLFYESYQKSYPWELSPNTYFLSPGQQPQDPLTHLLVINKTGSTIDNFLHSLRRQNIAIEVDAFGTRNGTDDPSYNGAIIVSGDEKDHRFSIACNTKRLNCFPVLLDVISNGLLGIFNSSEHIQTDRSTFFEEHMDYEYGYRSNTFFWIPMAASFTPYIAMSSIGDYKKKAHSQLRISGLYPSAYWFGQALVDVSLYFLILLLMQIMDYIFSPEEIIFIIQNLLIQILCSIGYVSSLVFLTYVISFIFRNGRKNSGIWSFFFLIVVIFSIVATDLNEYGFLGLFFGTMLIPPFTLIGSLFIFSEISPDSMDYLGASESEIVYLALLIPYLHFLIFLFILRCLEMNCRKKLMRKDPVFRISPRSNAIFPNPEEPEGEEEDIQMERMRTVNAMAVRDFDETPVIIASCLRKEYAGKKKNCFSKRKKKIATRNVSFCVKKGEVIGLLGHNGAGKSTTIKMITGDTKPTAGQVILKGSGGGEPLGFLGYCPQENALWPNLTVRQHLEVYAAVKGLRKGDAMIAITRLVDALKLQDQLKAPVKTLSEGIKRKLCFVLSILGNPSVVLLDEPSTGMDPEGQQQMWQVIRATFRNTERGALLTTHYMAEAEAVCDRVAIMVSGRLRCIGSIQHLKSKFGKDYLLEMKLKNLAQMEPLHAEILRLFPQAAQQERFSSLMVYKLPVEDVRPLSQAFFKLEIVKQSFDLEEYSLSQSTLEQVFLELSKEQELGDLEEDFDPSVKWKLLLQEEP

SEQ ID NO: 22407 - protein, 1334 aa, Artificial Sequence
  Synthetic polypeptide
LQENKLRVPTDSTLWLSWGLMYAGFILIMATLMALIVKSAQIVVLTGFVMVFTLFLLYGLSLITLAFLMSVLIKKPFLTGLVVFLLIVFWGILGFPALYTRLPAFLEWTLCLLSPFAFTVGMAQLIHLDYDVNSNAHLDSSQNPYLIIATLFMLVFDTLLYLVLTLYFDKILPAEYGHRCSPLFFLKSCFWFQHGRANHVVLENETDSDPTPNDCFEPVSPEFCGKEAIRIKNLKKEYAGKCERVEALKGVVFDIYEGQITALLGHSGAGKTTLLNILSGLSVPTSGSVTVYNHTLSRMADIENISKFTGFCPQSNVQFGFLTVKENLRLFAKIKGILPHEVEKEVQRVVQELEMENIQDILAQNLSGGQNRKLTFGIAILGDPQVLLLDEPTAGLDPLSRHRIWNLLKEGKSDRVILFSTQFIDEADILADRKVFISNGKLKCAGSSLFLKKKWGIGYHLSLHLNERCDPESITSLVKQHISDAKLTAQSEEKLVYILPLERTNKFPELYRDLDRCSNQGIEDYGVSITTLNEVFLKLEGKSTIDESDIGIWGQLQTDGAKDIGSLVELEQVLSSFHETRKTISGVALWRQQVCAIAKVRFLKLKKERKSLWTILLLFGISFIPQLLEHLFYESYQKSYPWELSPNTYFLSPGQQPQDPLTHLLVINKTGSTIDNFLHSLRRQNIAIEVDAFGTRNGTDDPSYNGAIIVSGDEKDHRFSIACNTKRLNCFPVLLDVISNGLLGIFNSSEHIQTDRSTFFEEHMDYEYGYRSNTFFWIPMAASFTPYIAMSSIGDYKKKAHSQLRISGLYPSAYWFGQALVDVSLYFLILLLMQIMDYIFSPEEIIFIIQNLLIQVVIFSIVATDLNEYGFLGLFFGTMLIPPFTLIGSLFIFSEISPDSMDYLGASESEIVYLALLIPYLHFLIFLFILRCLEMNCRKKLMRKDPVFRISPRSNAIFPNPEEPEGEEEDIQMERMRTVNAMAVRDFDETPVIIASCLRKEYAGKKKNCFSKRKKKIATRNVSFCVKKGEVIGLLGHNGAGKSTTIKMITGDTKPTAGQVILKGSGGGEPLGFLGYCPQENALWPNLTVRQHLEVYAAVKGLRKGDAMIAITRLVDALKLQDQLKAPVKTLSEGIKRKLCFVLSILGNPSVVLLDEPSTGMDPEGQQQMWQVIRATFRNTERGALLTTHYMAEAEAVCDRVAIMVSGRLRCIGSIQHLKSKFGKDYLLEMKLKNLAQMEPLHAEILRLFPQAAQQERFSSLMVYKLPVEDVRPLSQAFFKLEIVKQSFDLEEYSLSQSTLEQVFLELSKEQELGDLEEDFDPSVKWKLLLQEEP

SEQ ID NO: 22408 - protein, 1183 aa, Artificial Sequence
  Synthetic polypeptide
LQENKLRVPTDSTLWLSWGLMYAGFILIMATLMALIVKSAQIVVLTGFVMVFTLFLLYGLSLITLAFLMSVLIKKPFLTGLVVFLLIVFWGILGFPALYTRLPAFLEWTLCLLSPFAFTVGMAQLIHLDYDVNSNAHLDSSQNPYLIIATLFMLVFDTLLYLVLTLYFDKILPAEYGHRCSPLFFLKSCFWFQHGRANHVVLENETDSDPTPNDCFEPVSPEFCGKEAIRIKNLKKEYAGKCERVEALKGVVFDIYEGQITALLGHSGAGKTTLLNILSGLSVPTSGSVTVYNHTLSRMADIENISKFTGFCPQSNVQFGFLTVKENLRLFAKIKGILPHEVEKEVQRVVQELEMENIQDILAQNLSGGQNRKLTFGIAILGDPQVLLLDEPTAGLDPLSRHRIWNLLKEGKSDRVILFSTQFIDEADILADRKVFISNGKLKCAGSSLFLKKKWGIGYHLSLHLNERCDPESITSLVKQHISDAKLTAQSEEKLVYILPLERTNKFPELYRDLDRCSNQGIEDYGVSITTLNEVFLKLEGKSTIDESDIGIWGQLQTDGAKDIGSLVELEQVLSSFHETRKTISGVALWRQQVCAIAKVRFLKLKKERKSLWTILLLFGISFIPQLLEHLFYESYQKSYPWELSPNTYFLSPGQQPQDPLTHLLVINKTGSTIDNFLHSLRRQNIAIEVDAFGTRNGTDDPSYNGAIIVSGDEKDHRFSIACNTKRLNCFPVLLDVISNGLLGIFNSSEHIQTDRSTFFEEHMDYEYGYRSNTFFWIPMAASFTPYIAMSSIGDYKKKAHSQLRISGLYPSAYWFGQALVDVSLYFLILLLMQIMDYIFSPEEIIFIIQNLLIQILCSIGYVSSLVFLTYVISFIFRNGRKNSGIWSFFFLIVVIFSIVATDLNEYGFLGLFFGTMLIPPFTLIGSLFIFSEISPDSMDYLGASESEIVYLALLIPYLHFLIFLFILRCLEMNCRKKLMRKDPVFRISPRSNAIFPNPEEPEGEEEDIQMERMRTVNAMAVRDFDETPVIIASCLRKEYAGKKKNCFSKRKKKIATRNVSFCVKKGEVIGLLGHNGAGKSTTIKMITGDTKPTAGQVILKGSGGGEPLGFLGYCPQENALWPNLTVRQHLEVYAAVKGLRKGDAMIAITRLVDALKLQDQLKAPVKTLSEGIKRKAGDSGHL

SEQ ID NO: 22409 - protein, 31 aa, Artificial Sequence
  Synthetic polypeptide
EVRSPSARQPPRLGSEEHLRPAAAPSRRHIF

SEQ ID NO: 22410 - protein, 80 aa, Artificial Sequence
  Synthetic polypeptide
GAPLPGSHPVWEVRSISARQPPPPGGIFFDIYEGQITAILGHNGAGKSTLLNILSGLSVSTEGKKNYNGIRHAKHSRHYC

SEQ ID NO: 22411 - protein, 37 aa, Artificial Sequence
  Synthetic polypeptide
GASPPGSRPLQEAYFLTYMKDRSLQYLGIMELVNQHC

SEQ ID NO: 22412 - protein, 1157 aa, Artificial Sequence
  Synthetic polypeptide
GAPLPGSHPVWEVRSISARQPPPPGGIFFDIYEGQITAILGHNGAGKSTLLNILSGLSVSTEGSATIYNTQLSEITDMEEIRKNIGFCPQFNFQFDFLTVRENLRVFAKIKGIQPKEVEQEVKRIIMELDMQSIQDIIAKKLSGGQKRKLTLGIAILGDPQVLLLDEPTAGLDPFSRHRVWSLLKEHKVDRLILFSTQFMDEADILADRKVFLSNGKLKCAGSSLFLKRKWGIGYHLSLHRNEMCDTEKITSLIKQHIPDAKLTTESEEKLVYSLPLEKTNKFPDLYSDLDKCSDQGIRNYAVSVTSLNEVFLNLEGKSAIDEPDFDIGKQEKIHVTRNTGDESEMEQVLCSLPETRKAVSSAALWRRQIYAVATLRFLKLRRERRALLCLLLVLGIAFIPIILEKIMYKVTRETHCWEFSPSMYFLSLEQIPKTPLTSLLIVNNTGSNIEDLVHSLKCQDIVLEIDDFRNRNGSDDPSYNGAIIVSGDQKDYRFSVACNTKKLNCFPVLMGIVSNALMGIFNFTELIQMESTSFSRDDIVLDLGFIDGSIFLLLITNCVSPFIGMSSISDYKKNVQSQLWISGLWPSAYWCGQALVDIPLYFLILFSIHLIYYFIFLGFQLSWELMFVLVVCIIGCAVSLIFLTYVLSFIFRKWRKNNGFWSFGFFIILICVSTIMVSTQYEKLNLILCMIFIPSFTLLGYVMLLIQLDFMRNLDSLDNRINEVNKTILLTTLIPYLQSVIFLFVIRCLEMKYGNEIMNKDPVFRISPRSRETHPNPEEPEEEDEDVQAERVQAANALTAPNLEEEPVITASCLHKEYYETKKSCFSTRKKKIAIRNVSFCVKKGEVLGLLGHNGAGKSTSIKMITGCTKPTAGVVVLQGSRASVRQQHDNSLKFLGYCPQENSLWPKLTMKEHLELYAAVKGLGKEDAALSISRLVEALKLQEQLKAPVKTLSEGIKRKLCFVLSILGNPSVVLLDEPFTGMDPEGQQQMWQILQATVKNKERGTLLTTHYMSEAEAVCDRMAMMVSGTLRCIGSIQHLKNKFGRDYLLEIKMKEPTQVEALHTEILKLFPQAAWQERYSSLMAYKLPVEDVHPLSRAFFKLEAMKQTFNLEEYSLSQATLEQVFLELCKEQELGNVDDKIDTTVEWKLLPQEDP

SEQ ID NO: 22413 - protein, 940 aa, Artificial Sequence
  Synthetic polypeptide
GAPLPGSHPVWEVRSISARQPPPPGGIFFDIYEGQITAILGHNGAGKSTLLNILSGLSVSTEGSATIYNTQLSEITDMEEIRKNIGFCPQFNFQFDFLTVRENLRVFAKIKGIQPKEVEQEVKRIIMELDMQSIQDIIAKKLSGGQKRKLTLGIAILGDPQVLLLDEPTAGLDPFSRHRVWSLLKEHKVDRLILFSTQFMDEADILADRKVFLSNGKLKCAGSSLFLKRKWGIGYHLSLHRNEMCDTEKITSLIKQHIPDAKLTTESEEKLVYSLPLEKTNKFPDLYSDLDKCSDQGIRNYAVSVTSLNEVFLNLEGKSAIDEPDFDIGKQEKIHVTRNTGDESEMEQVLCSLPETRKAVSSAALWRRQIYAVATLRFLKLRRERRALLCLLLVLGIAFIPIILEKIMYKVTRETHCWEFSPSMYFLSLEQIPKTPLTSLLIVNNTGSNIEDLVHSLKCQDIVLEIDDFRNRNGSDDPSYNGAIIVSGDQKDYRFSVACNTKKLNCFPVLMGIVSNALMGIFNFTELIQMESTSFSRDDIVLDLGFIDGSIFLLLITNCVSPFIGMSSISDYKKNVQSQLWISGLWPSAYWCGQALVDIPLYFLILFSIHLIYYFIFLGFQLSWELMFVLVVCIIGCAVSLIFLTYVLSFIFRKWRKNNGFWSFGFFIILICVSTIMVSTQYEKLNLILCMIFIPSFTLLGYVMLLIQLDFMRNLDSLDNRINEVNKTILLTTLIPYLQSVIFLFVIRCLEMKYGNEIMNKDPVFRISPRSRETHPNPEEPEEEDEDVQAERVQAANALTAPNLEEEPVITASCLHKEYYETKKSCFSTRKKKIAIRNVSFCVKKGEVLGLLGHNGAGKSTSIKMITGCTKPTAGVVVLQGSRASVRQQHDNSLKFLGYCPQENSLWPKLTMKEHLELYAAVKGLGKEDAALSISRCALC

SEQ ID NO: 22414 - protein, 144 aa, Artificial Sequence
  Synthetic polypeptide
MNNSLSLNFHVYKICIGTVQHLKSKFGKGYFLEIKLKDWIENLEVDRLQREIQYIFPNASRQESFSSILAYKIPKEDVQSLSQSFFKLEEAKHAFAIEEYSFSQATLEQVFVELTKEQEEEDNSCGTLNSTLWWERTQEDRVVF

SEQ ID NO: 22415 - protein, 16 aa, Artificial Sequence
  Synthetic polypeptide
ASTSMSIKYVSEQYNI

SEQ ID NO: 22416 - protein, 11 aa, Artificial Sequence
  Synthetic polypeptide
NMYRNSTTSKE

SEQ ID NO: 22417 - protein, 109 aa, Artificial Sequence
  Synthetic polypeptide
MNNSLSLNFHVYKICIGTVQHLKSKFGKGYFLEIKLKDWIENLEVDRLQREIQYIFPNASRQESFSSILAYKIPKEDVQSLSQSFFKLEEAKHAFAIEEYSFSQATLEQ

SEQ ID NO: 22418 - protein, 31 aa, Artificial Sequence
  Synthetic polypeptide
QVHWLMPVIPTSPEAQVGGSLEARSSRPAWS

SEQ ID NO: 22419 - protein, 25 aa, Artificial Sequence
  Synthetic polypeptide
SQLVRRLRWEDHLRPGVQDQLGHNY

SEQ ID NO: 22420 - protein, 1548 aa, Artificial Sequence
  Synthetic polypeptide
GQEFKTSLVIITEEYTNEKEMLTSSLSKPSNFVGVVFKDSMSYELRFFPDMIPVSSIYMDSRAGCSKSCEAAQYWSSGFTVLQASIDAAIIQLKTNVSLWKELESTKAVIMGETAVVEIDTFPRGVILIYLVIAFSPFGYFLAIHIVAEKEKKIKEFLKIMGLHDTAFWLSWVLLYTSLIFLMSLLMAVIATASLLFPQSSSIVIFLLFFLYGLSSVFFALMLTPLFKKSKHVGIVEFFVTVAFGFIGLMIILIESFPKSLVWLFSPFCHCTFVIGIAQVMHLEDFNEGASFSNLTAGPYPLIITIIMLTLNSIFYVLLAVYLDQVIPGEFGLRRSSLYFLKPSYWSKSKRNYEELSEGNVNGNISFSEIIEPVSSEFVGKEAIRISGIQKTYRKKGENVEALRNLSFDIYEGQITALLGHSGTGKSTLMNILCGLCPPSDGFASIYGHRVSEIDEMFEARKMIGICPQLDIHFDVLTVEENLSILASIKGIPANNIIQEVQKVLLDLDMQTIKDNQAKKLSGGQKRKLSLGIAVLGNPKILLLDEPTAGMDPCSRHIVWNLLKYRKANRVTVFSTHFMDEADILADRKAVISQGMLKCVGSSMFLKSKWGIGYRLSMYIDKYCATESLSSLVKQHIPGATLLQQNDQQLVYSLPFKDMDKFSGLFSALDSHSNLGVISYGVSMTTLEDVFLKLEVEAEIDQADYSVFTQQPLEEEMDSKSFDEMEQSLLILSETKAALVSTMSLWKQQMYTIAKFHFFTLKRESKSVRSVLLLLLIFFTVQIFMFLVHHSFKNAVVPIKLVPDLYFLKPGDKPHKYKTSLLLQNSADSDISDLISFFTSQNIMVTMINDSDYVSVAPHSAALNVMHSEKDYVFAAVFNSTMVYSLPILVNIISNYYLYHLNVTETIQIWSTPFFQEITDIVFKIELYFQAALLGIIVTAMPPYFAMENAENHKIKAYTQLKLSGLLPSAYWIGQAVVDIPLFFIILILMLGSLLAFHYGLYFYTVKFLAVVFCLIGYVPSVILFTYIASFTFKKILNTKEFWSFIYSVAALACIAITEITFFMGYTIATILHYAFCIIIPIYPLLGCLISFIKISWKNVRKNVDTYNPWDRLSVAVISPYLQCVLWIFLLQYYEKKYGGRSIRKDPFFRNLSTKSKNRKLPEPPDNEDEDEDVKAERLKVKELMGCQCCEEKPSIMVSNLHKEYDDKKDFLLSRKVKKVATKYISFCVKKGEILGLLGPNGAGKSTIINILVGDIEPTSGQVFLGDYSSETSEDDDSLKCMGYCPQINPLWPDTTLQEHFEIYGAVKGMSASDMKEVISRITHALDLKEHLQKTVKKLPAGIKRKLCFALSMLGNPQITLLDEPSTGMDPKAKQHMWRAIRTAFKNRKRAAILTTHYMEEAEAVCDRVAIMVSGQLRCIGTVQHLKSKFGKGYFLEIKLKDWIENLEVDRLQREIQYIFPNASRQESFSSILAYKIPKEDVQSLSQSFFKLEEAKHAFAIEEYSFSQATLEQVFVELTKEQEEEDNSCGTLNSTLWWERTQEDRVVF

SEQ ID NO: 22421 - protein, 1549 aa, Artificial Sequence
  Synthetic polypeptide
GQEFKTSLVIITEEYTNEKEMLTSSLSKPSNFVGVVFKDSMSYELRFFPDMIPVSSIYMDSRAGCSKSCEAAQYWSSGFTVLQASIDAAIIQLKTNVSLWKELESTKAVIMGETAVVEIDTFPRGVILIYLVIAFSPFGYFLAIHIVAEKEKKIKEFLKIMGLHDTAFWLSWVLLYTSLIFLMSLLMAVIATASLLFPQSSSIVIFLLFFLYGLSSVFFALMLTPLFKKSKHVGIVEFFVTVAFGFIGLMIILIESFPKSLVWLFSPFCHCTFVIGIAQVMHLEDFNEGASFSNLTAGPYPLIITIIMLTLNSIFYVLLAVYLDQVIPGEFGLRRSSLYFLKPSYWSKSKRNYEELSEGNVNGNISFSEIIEPVSSEFVGKEAIRISGIQKTYRKKGENVEALRNLSFDIYEGQITALLGHSGTGKSTLMNILCGLCPPSDGFASIYGHRVSEIDEMFEARKMIGICPQLDIHFDVLTVEENLSILASIKGIPANNIIQEVQKVLLDLDMQTIKDNQAKKLSGGQKRKLSLGIAVLGNPKILLLDEPTAGMDPCSRHIVWNLLKYRKANRVTVFSTHFMDEADILADRKAVISQGMLKCVGSSMFLKSKWGIGYRLSMYIDKYCATESLSSLVKQHIPGATLLQQNDQQLVYSLPFKDMDKFSGLFSALDSHSNLGVISYGVSMTTLEDVFLKLEVEAEIDQADYSVFTQQPLEEEMDSKSFDEMEQSLLILSETKAALVSTMSLWKQQMYTIAKFHFFTLKRESKSVRSVLLLLLIFFTVQIFMFLVHHSFKNAVVPIKLVPDLYFLKPGDKPHKYKTSLLLQNSAADSDISDLISFFTSQNIMVTMINDSDYVSVAPHSAALNVMHSEKDYVFAAVFNSTMVYSLPILVNIISNYYLYHLNVTETIQIWSTPFFQEITDIVFKIELYFQAALLGIIVTAMPPYFAMENAENHKIKAYTQLKLSGLLPSAYWIGQAVVDIPLFFIILILMLGSLLAFHYGLYFYTVKFLAVVFCLIGYVPSVILFTYIASFTFKKILNTKEFWSFIYSVAALACIAITEITFFMGYTIATILHYAFCIIIPIYPLLGCLISFIKISWKNVRKNVDTYNPWDRLSVAVISPYLQCVLWIFLLQYYEKKYGGRSIRKDPFFRNLSTKSKNRKLPEPPDNEDEDEDVKAERLKVKELMGCQCCEEKPSIMVSNLHKEYDDKKDFLLSRKVKKVATKYISFCVKKGEILGLLGPNGAGKSTIINILVGDIEPTSGQVFLGDYSSETSEDDDSLKCMGYCPQINPLWPDTTLQEHFEIYGAVKGMSASDMKEVISRITHALDLKEHLQKTVKKLPAGIKRKLCFALSMLGNPQITLLDEPSTGMDPKAKQHMWRAIRTAFKNRKRAAILTTHYMEEAEAVCDRVAIMVSGQLRCIGTVQHLKSKFGKGYFLEIKLKDWIENLEVDRLQREIQYIFPNASRQESFSSILAYKIPKEDVQSLSQSFFKLEEAKHAFAIEEYSFSQATLEQVFVELTKEQEEEDNSCGTLNSTLWWERTQEDRVVF

SEQ ID NO: 22422 - protein, 823 aa, Artificial Sequence
  Synthetic polypeptide
GQEFKTSLVIITEEYTNEKEMLTSSLSKPSNFVGVVFKDSMSYELRFFPDMIPVSSIYMDSRAGCSKSCEAAQYWSSGFTVLQASIDAAIIQLKTNVSLWKELESTKAVIMGETAVVEIDTFPRGVILIYLVIAFSPFGYFLAIHIVAEKEKKIKEFLKIMGLHDTAFWLSWVLLYTSLIFLMSLLMAVIATASLLFPQSSSIVIFLLFFLYGLSSVFFALMLTPLFKKSKHVGIVEFFVTVAFGFIGLMIILIESFPKSLVWLFSPFCHCTFVIGIAQVMHLEDFNEGASFSNLTAGPYPLIITIIMLTLNSIFYVLLAVYLDQVIPGEFGLRRSSLYFLKPSYWSKSKRNYEELSEGNVNGNISFSEIIEPVSSEFVGKEAIRISGIQKTYRKKGENVEALRNLSFDIYEGQITALLGHSGTGKSTLMNILCGLCPPSDGFASIYGHRVSEIDEMFEARKMIGICPQLDIHFDVLTVEENLSILASIKGIPANNIIQEVQKVLLDLDMQTIKDNQAKKLSGGQKRKLSLGIAVLGNPKILLLDEPTAGMDPCSRHIVWNLLKYRKANRVTVFSTHFMDEADILADRKAVISQGMLKCVGSSMFLKSKWGIGYRLSMYIDKYCATESLSSLVKQHIPGATLLQQNDQQLVYSLPFKDMDKFSGLFSALDSHSNLGVISYGVSMTTLEDVFLKLEVEAEIDQADYSVFTQQPLEEEMDSKSFDEMEQSLLILSETKAALVSTMSLWKQQMYTIAKFHFFTLKRESKSVRSVLLLLLIFFTVQIFMFLVHHSFKNAVVPIKLVPDLYFLKPGDKPHKYKTSLLL

SEQ ID NO: 22423 - protein, 156 aa, Artificial Sequence
  Synthetic polypeptide
GQEFKTSLVIITEEYTNEKEMLTSSLSKPSNFVGVVFKDSMSYELRFFPDMIPVSSIYMDSRAGCSKSCEAAQYWSSGFTVLQASIDAAIIQLKTNVSLWKELESTKAVIMGETAVVEIDTFPRGVILIYLVIAFSPFGYFLAIHIVAEKEKKIKE

SEQ ID NO: 22424 - protein, 33 aa, Artificial Sequence
  Synthetic polypeptide
GQEFKTSLVIITEEYTNEKEMLTSSLSKPSNFV

SEQ ID NO: 22425 - protein, 35 aa, Artificial Sequence
  Synthetic polypeptide
YFGEPARRWSLTLWPKLECKWCNQGSLQPPPPSFK

SEQ ID NO: 22426 - protein, 81 aa, Artificial Sequence
  Synthetic polypeptide
ILVSQPGDGVSLYGPNWSASGAIKAHCNLRLPASSDSRPSASQVAGITDTALPEKKITWGRGYACVSPGQNQQLIWIPSIH

SEQ ID NO: 22427 - protein, 40 aa, Artificial Sequence
  Synthetic polypeptide
ASQEMESHSMAQTGVQVVQSRLTATSASQLQVILVPQPPK

SEQ ID NO: 22428 - protein, 8 aa, Artificial Sequence
  Synthetic polypeptide
ENRDFCQA

SEQ ID NO: 22429 - protein, 236 aa, Artificial Sequence
  Synthetic polypeptide
KTGIFAKPDHVKMTYPKTQLQHSLPLLLICDNLRDPGNLGTILRSAAGAGCSKVLLTKGCVDAWEPKVLRAGMGAHFRMPIINNLEWETVPNYLPPDTRVYVADNCGLYAQAEMSNKASDHGWVCDQRVMKFHKYEEEEDVETGASQDWLPHVEVQSYDSDWTEAPAAVVIGGETYGVSLESLQLAESTGGKRLLIPVVPGVDSLNSAMAASILLFEGKRQLRGRAEDLSRDRSYH

SEQ ID NO: 22430 - protein, 12 aa, Artificial Sequence
  Synthetic polypeptide
KQGFLPSLTMLR

SEQ ID NO: 22431 - protein, 8 aa, Artificial Sequence
  Synthetic polypeptide
KTGIFAKP

SEQ ID NO: 22432 - protein, 8 aa, Artificial Sequence
  Synthetic polypeptide
KQGFLPSL

SEQ ID NO: 22433 - protein, 66 aa, Artificial Sequence
  Synthetic polypeptide
KTGIFAKPDHVKMTYPKTQLQHSLPLLLICDNLRDPGNLGTILRSAAGAGCSKVLLTKGKDIKGQA

SEQ ID NO: 22434 - protein, 23 aa, Artificial Sequence
  Synthetic polypeptide
VRDQPDQHDNARNIFQCPFRCVD

SEQ ID NO: 22435 - protein, 80 aa, Artificial Sequence
  Synthetic polypeptide
FETSLTNMIMLGIFFNVHSAVLIEDVPFTEKDFENGPQNIYNLYEQVSYNCFIAAGLYLLLGGFSFCQVRLNKRKEYMVR

SEQ ID NO: 22436 - protein, 23 aa, Artificial Sequence
  Synthetic polypeptide
FETSLTNMIMLGIFFNVHSAVLI

SEQ ID NO: 22437 - protein, 9 aa, Artificial Sequence
  Synthetic polypeptide
VRDQPDQHD

SEQ ID NO: 22438 - protein, 9 aa, Artificial Sequence
  Synthetic polypeptide
FETSLTNMI

SEQ ID NO: 22439 - protein, 39 aa, Artificial Sequence
  Synthetic polypeptide
FKNRRPNTHWVTYQLCNLGSHSSHPRRSSTAWLPRSSYS

SEQ ID NO: 22440 - protein, 83 aa, Artificial Sequence
  Synthetic polypeptide
KRARASNLKIDVQILTGSPISYVIWAATAAIPGEVLQHGCPDQATLRNSGEDLELDGSLSVSPRHTALPALLPPPQPAPAGFF

SEQ ID NO: 22441 - protein, 878 aa, Artificial Sequence
  Synthetic polypeptide
FGQPQQPSQEKFYSMAAQIKLLLEIPEKIWSSMEASQCLHATQLYLLCCHLHSLLQLDSSSSRYSPVLSRFPILIRQVAAASHFRSTILHESKMLLKCQGVSDQAVAEALCSIMLLEESSPRQALTDFLLARKATIQKLLNQPHHGAGIKAQICSLVELLATTLKQAHALFYTLPEGLLPDPALPCGLLFSTLETITGQHPAGKGTGVLQEEMKLCSWFKHLPASIVEFQPTLRTLAHPISQEYLKDTLQKWIHMCNEDIKNGITNLLMYVKSMKGLAGIRDAMWELLTNESTNHSWDVLCRRLLEKPLLFWEDMMQQLFLDRLQTLTKEGFDSISSSSKELLVSALQELESSTSNSPSNKHIHFEYNMSLFLWSESPNDLPSDAAWVSVANRGQFASSGLSMKAQAISPCVQNFCSALDSKLKVKLDDLLAYLPSDDSSLPKDVSPTQAKSSAFDRYADAGTVQEMLRTQSVACIKHIVDCIRAELQSIEEGVQGQQDALNSAKLHSVLFMARLCQSLGELCPHLKQCILGKSESSEKPAREFRALRKQGKVKTQEIIPTQAKWQEVKEVLLQQSVMGYQVWSSAVVKVLIHGFTQSLLLDDAGSVLATATSWDELEIQEEAESGSSVTSKIRLPAQPSWYVQSFLFSLCQEINRVGGHALPKVTLQEMLKSCMVQVVAAYEKLSEEKQIKKEGAFPVTQNRALQLLYDLRYLNIVLTAKGDEVKSGRSKPDSRIEKVTDHLEALIDPFDLDVFTPHLNSNLHRLVQRTSVLFGLVTGTENQLAPRSSTFNSQEPHNILPLASSQIRFGLLPLSMTSTRKAKSTRNIETKAQVVPPARSTAGDPTVPGSLFRQLVSEEDNTSAPSLFKLGWLSSMTK

SEQ ID NO: 22442 - protein, 860 aa, Artificial Sequence
  Synthetic polypeptide
FGQPQQPSQEKFYSMAAQIKLLLEIPEKIWSSMEASQCLHATQLYLLCCHLHSLLQLDSSSSRYSPVLSRFPILIRQVAAASHFRSTILHESKMLLKCQGVSDQAVAEALCSIMLLEESSPRQALTDFLLARKATIQKLLNQPHHGAGIKAQICSLVELLATTLKQAHALFYTLPEGLLPDPALPCGLLFSTLETITGQHPAGKGTGVLQEEMKLCSWFKHLPASIVEFQPTLRTLAHPISQEYLKDTLQKWIHMCNEDIKNGITNLLMYVKSMKGLAGIRDAMWELLTNESTNHSWDVLCRRLLEKPLLFWEDMMQQLFLDRLQTLTKEGFDSISSSSKELLVSALQELESSTSNSPSNKHIHFEYNMSLFLWSESPNDLPSDAAWVSVANRGQFASSGLSMKAQAISPCVQNFCSALDSKLKVKLDDLLAYLPSDDSSLPKDVSPTQAKSSAFDRYADAGTVQEMLRTQSVACIKHIVDCIRAELQSIEEGVQGQQDALNSAKLHSVLFMARLCQSLGELCPHLKQCILGKSESSEKPAREFRALRKQGKVKTQEIIPTQAKWQEVKEVLLQQSVMGYQVWSSAVVKVLIHGFTQSLLLDDAGSVLATATSWDELEIQEEAESGSSVTSKIRLPAQPSWYVQSFLFSLCQEINRVGGHALPKVTLQEMLKSCMVQVVAAYEKLSEEKQIKKEGAFPVTQNRALQLLYDLRYLNIVLTAKGDEVKSGRSKPDSRIEKVTDHLEALIDPFDLDVFTPHLNSNLHRLVQRTSVLFGLVTGTENQLAPRSSTFNSQEPHNILPLASSQIRFGLLPLSMTSTRKAKSTRNIETKAQVGAKSKRLIRGWVPTSHRATHDQLPFK

SEQ ID NO: 22443 - protein, 46 aa, Artificial Sequence
  Synthetic polypeptide
KRARASNLKIDVQILTGSPISYVIWAATAAIPGEVLQHGCPDQATL

SEQ ID NO: 22444 - protein, 23 aa, Artificial Sequence
  Synthetic polypeptide
FGQPQQPSQEKFYSMAAQIKLLL

SEQ ID NO: 22445 - protein, 461 aa, Artificial Sequence
  Synthetic polypeptide
QKPALHRCSQQLYSELPELGSNEDVFNSAAVGVGFYGNSETNDGAYQLMYSLDDANHTFSGIDALVSGTTQKMKVDLEQHLARLSEIFAARGDYLQTLKFIQQMAGSVVVQLSGLPVWREVTMELTKLSDQTGYVEYYRWLSYLLLFILDLVICLIACLGLAKRSKCLLASMLCCGALSLLLSWASLAADGSAAVATSDFCVAPDTFILNVTEGQISTEVTRYYLYCSQSGSSPFQQTLTTFQRALTTMQIQVAGLLQFAVPLFSTAEEDLLAIQLLLNSSESSLHQLTAMVDCRGLHKDYLDALAGICYDGLQGLLYLGLFSFLAALAFSTMICAGPRAWKHFTTRNRDYDDIDDDDPFNPQAWRMAAHSPPRGQLHSFCSYSSGLGSQTSLQPPAQTISNAPVSEYMNQAMLFGRNPRYENVPLIGRASPPPTYSPSMRATYLSVADEHLRHYGNQFPA

SEQ ID NO: 22446 - protein, 47 aa, Artificial Sequence
  Synthetic polypeptide
KNLLSIDVHSSCIQNCQNLEATKMSLTVLRWALVSMETARPTMGRTS

SEQ ID NO: 22447 - protein, 58 aa, Artificial Sequence
  Synthetic polypeptide
QCCGGRWFLWKQRDQRWGVPADVLLGRCQPHLLWDRCSGFRNYPEDEGGPRAAPGPAQ

SEQ ID NO: 22448 - protein, 24 aa, Artificial Sequence
  Synthetic polypeptide
GRAQWLMPRSAGFPRGSPGFLAGG

SEQ ID NO: 22449 - protein, 633 aa, Artificial Sequence
  Synthetic polypeptide
AGRSGSCLGLRGFREARRDFWRGAESLEAALTHNAEVPRRRAQEAEEAGAALRTARAGYRGRALDYALQINVIEDKRKFDIMEFVLRLVEAQATHFQQGHEELSRLSQYRKELGAQLHQLVLNSAREKRDMEQRHVLLKQKELGGEEPEPSLREGPGGLVMEGHLFKRASNAFKTWSRRWFTIQSNQLVYQKKYKDPVTVVVDDLRLCTVKLCPDSERRFCFEVVSTSKSCLLQADSERLLQLWVSAVQSSIASAFSQARLDDSPRGPGQGSGHLAIGSAATLGSGGMARGREPGGVGHVVAQVQSVDGNAQCCDCREPAPEWASINLGVTLCIQCSGIHRSLGVHFSKVRSLTLDSWEPELVKLMCELGNVIINQIYEARVEAMAVKKPGPSCSRQEKEAWIHAKYVEKKFLTKLPEIRGRRGGRGRPRGQPPVPPKPSIRPRPGSLRSKPEPPSEDLGSLHPGALLFRASGHPPSLPTMADALAHGADVNWVNGGQDNATPLIQATAANSLLACEFLLQNGANVNQADSAGRGPLHHATILGHTGLACLFLKRGADLGARDSEGRDPLTIAMETANADIVTLLRLAKMREAEAAQGQAGDETYLDIFRDFSLMASDDPEKLSRRSHDLHTL

SEQ ID NO: 22450 - protein, 115 aa, Artificial Sequence
  Synthetic polypeptide
AGRSGSCLGLRGFREARRDFWRGAESLEAALTHNAEVPRRRAQEAEEAGAALRTARAGYRGRALDYALQINVIEDKRKFDIMEFVLRLVEAQATHFQQGHEELSRLSQYRKELGA

SEQ ID NO: 22451 - protein, 68 aa, Artificial Sequence
  Synthetic polypeptide
AGRSGSCLGLRGFREARRDFWRGAESLEAALTHNAEVPRRRAQEAEEAGAALRTARAGYRGRALDYAL

SEQ ID NO: 22452 - protein, 660 aa, Artificial Sequence
  Synthetic polypeptide
SQLLRRPRQENHLNPGGGGCSEPRSHYFTSAWATEGLRGFREARRDFWRGAESLEAALTHNAEVPRRRAQEAEEAGAALRTARAGYRGRALDYALQINVIEDKRKFDIMEFVLRLVEAQATHFQQGHEELSRLSQYRKELGAQLHQLVLNSAREKRDMEQRHVLLKQKELGGEEPEPSLREGPGGLVMEGHLFKRASNAFKTWSRRWFTIQSNQLVYQKKYKDPVTVVVDDLRLCTVKLCPDSERRFCFEVVSTSKSCLLQADSERLLQLWVSAVQSSIASAFSQARLDDSPRGPGQGSGHLAIGSAATLGSGGMARGREPGGVGHVVAQVQSVDGNAQCCDCREPAPEWASINLGVTLCIQCSGIHRSLGVHFSKVRSLTLDSWEPELVKLMCELGNVIINQIYEARVEAMAVKKPGPSCSRQEKEAWIHAKYVEKKFLTKLPEIRGRRGGRGRPRGQPPVPPKPSIRPRPGSLRSKPEPPSEDLGSLHPGALLFRASGHPPSLPTMADALAHGADVNWVNGGQDNATPLIQATAANSLLACEFLLQNGANVNQADSAGRGPLHHATILGHTGLACLFLKRGADLGARDSEGRDPLTIAMETANADIVTLLRLAKMREAEAAQGQAGDETYLDIFRDFSLMASDDPEKLSRRSHDLHTL

SEQ ID NO: 22453 - protein, 44 aa, Artificial Sequence
  Synthetic polypeptide
TQEVEVAVSQDRTTSLQPGQQKVCGVSERLAGISGGGLRAWRLP

SEQ ID NO: 22454 - protein, 29 aa, Artificial Sequence
  Synthetic polypeptide
AKIALLHFSLGNRRSAGFPRGSPGFLAGG

SEQ ID NO: 22455 - protein, 142 aa, Artificial Sequence
  Synthetic polypeptide
SQLLRRPRQENHLNPGGGGCSEPRSHYFTSAWATEGLRGFREARRDFWRGAESLEAALTHNAEVPRRRAQEAEEAGAALRTARAGYRGRALDYALQINVIEDKRKFDIMEFVLRLVEAQATHFQQGHEELSRLSQYRKELGA

SEQ ID NO: 22456 - protein, 95 aa, Artificial Sequence
  Synthetic polypeptide
SQLLRRPRQENHLNPGGGGCSEPRSHYFTSAWATEGLRGFREARRDFWRGAESLEAALTHNAEVPRRRAQEAEEAGAALRTARAGYRGRALDYAL

SEQ ID NO: 22457 - protein, 24 aa, Artificial Sequence
  Synthetic polypeptide
TPAWATECAGGSGVLQHRVPCAAG

SEQ ID NO: 22458 - protein, 135 aa, Artificial Sequence
  Synthetic polypeptide
TQEAEVAVSQDRTTELQPGRQSVLEEAEFYNIASLVRLVKERIRDNENRTSQGPVKHVYRVLQCQEEELTQMVSTMSDGWKFEQLISIGSSYNYGNEDQAEFLCVVSRELNNSTNGIVIEPSEKAKILQERGSRM

SEQ ID NO: 22459 - protein, 46 aa, Artificial Sequence
  Synthetic polypeptide
AKIAPLNSSLGDRVCWRKRSFTTSRPLCGWLRKGYGTMRTELHKAP

SEQ ID NO: 22460 - protein, 61 aa, Artificial Sequence
  Synthetic polypeptide
GWAQWLTPVIPAFCEAEGLSMRQIRFRFDGQPINETDTPAQLEMEDEDTIDVFQQQTGGVY

SEQ ID NO: 22461 - protein, 11 aa, Artificial Sequence
  Synthetic polypeptide
SQRFVRLRDCQ

SEQ ID NO: 22462 - protein, 56 aa, Artificial Sequence
  Synthetic polypeptide
NSISTKNEKKKKNSRVWLHTPVVPATQEVEAGEAFEPRRRRLEQAEITPLYTSLLD

SEQ ID NO: 22463 - protein, 655 aa, Artificial Sequence
  Synthetic polypeptide
DYTTVHQPVRLIPGVNSKKNQMYFDWGPGEMLVCETSFNKKEKSEMVPSCPFIYIIRKDVDVYSQILRKLFNESHGIFLGLQRIDEELTGKSRKSQLVRVSKNYRSVIRACMEEMHQVAIAAKDPANGRQFSSQVSILSAMELIWNLCEILFIEVAPAGPLLLHLLDWVRLHVCEVDSLSADVLGSENPSKHDSFWNLVTILVLQGRLDEARQMLSKEADASPASAGICRIMGDLMRTMPILSPGNTQTLTELELKWQHWHEECERYLQDSTFATSPHLESLLKIMLGDEAALLEQKELLSNWYHFLVTRLLYSNPTVKPIDLHYYAQSSLDLFLGGESSPEPLDNILLAAFEFDIHQVIKECSIALSNWWFVAHLTDLLDHCKLLQSHNLYFGSNMREFLLLEYASGLFAHPSLWQLGVDYFDYCPELGRVSLELHIERIPLNTEQKALKVLRICEQRQMTEQVRSICKILAMKAVRNNRLGSALSWSIRAKDAAFATLVSDRFLRDYCERGCFSDLDLIDNLGPAMMLSDRLTFLGKYREFHRMYGEKRFADAASLLLSLMTSRIAPRSFWMTLLTDALPLLEQKQVIFSAEQTYELMRCLEDLTSRRPVHGESDTEQLQDDDIETTKVEMLRLSLARNLARAIIREGSLEGS

SEQ ID NO: 22464 - protein, 610 aa, Artificial Sequence
  Synthetic polypeptide
DYTTVHQPVRLIPGVNSKKNQMYFDWGPGEMLVCETSFNKKEKSEMVPSCPFIYIIRKDVDVYSQILRKLFNESHGIFLGLQRIDEELTGKSRKSQLVRVSKNYRSVIRACMEEMHQVAIAAKDPANGRQFSSQVSILSAMELIWNLCEILFIEVAPAGPLLLHLLDWVRLHVCEVDSLSADVLGSENPSKHDSFWNLPGNTQTLTELELKWQHWHEECERYLQDSTFATSPHLESLLKIMLGDEAALLEQKELLSNWYHFLVTRLLYSNPTVKPIDLHYYAQSSLDLFLGGESSPEPLDNILLAAFEFDIHQVIKECSIALSNWWFVAHLTDLLDHCKLLQSHNLYFGSNMREFLLLEYASGLFAHPSLWQLGVDYFDYCPELGRVSLELHIERIPLNTEQKALKVLRICEQRQMTEQVRSICKILAMKAVRNNRLGSALSWSIRAKDAAFATLVSDRFLRDYCERGCFSDLDLIDNLGPAMMLSDRLTFLGKYREFHRMYGEKRFADAASLLLSLMTSRIAPRSFWMTLLTDALPLLEQKQVIFSAEQTYELMRCLEDLTSRRPVHGESDTEQLQDDDIETTKVEMLRLSLARNLARAIIREGSLEGS

SEQ ID NO: 22465 - protein, 168 aa, Artificial Sequence
  Synthetic polypeptide
DYTTVHQPVRLIPGVNSKKNQMYFDWGPGEMLVCETSFNKKEKSEMVPSCPFIYIIRKDVDVYSQILRKLFNESHGIFLGLQRIDEELTGKSRKSQLVRVSKNYRSVIRACMEEMHQVAIAAKDPANGRQFSSQVSILSAMELIWNLCEILFIEVAPGDHLGAAGPAG

SEQ ID NO: 22466 - protein, 24 aa, Artificial Sequence
  Synthetic polypeptide
SKHFGRPRQADHEVKRSRPSWPIW

SEQ ID NO: 22467 - protein, 73 aa, Artificial Sequence
  Synthetic polypeptide
MGVGTQACNPSTLGGHGRQIMRSRDRDHPGQYGEWRPAHPPPALSSPLGSGNCLWRGPCPGPDEQGLTQLPAG

SEQ ID NO: 22468 - protein, 1049 aa, Artificial Sequence
  Synthetic polypeptide
GQEIETILANMVNGVLPILPLLFPVLWVLATACGEARVLAQMSKASPSSLLAKFSEDTLSSYTEAVSSQEMLRCIWGHFLRVLGGTSPTLSHSSSLLHSLGSVTVLCCVDKQGILSWPNPSPETVLFFSGKVEPPHSSHEDLTDGLSTRSFCHPEPHERDALLAGSLNNTLHLSNEQERGDWPGEAPKPPEPYSHHKAHGRSKHPSGSNVSFSRDTEGGEEEPSKTQPGMESDPYEAEDFVCDYHLEMLSLSQDQQNPSCIQFDDSNWQLHLTSLKPLGLNVLLNLCDASVTERLCRFSDHLCNIALQESHSAVLPVHVPWGLCELARLIGFTPGAKELFKQENHLALYRLPSAETMKETSLGRLSCVTKRRPPLSHMISLFIKDTTTSTEQMLSHGTADVVLEACTDFWDGADIYPLSGSDRKKVLDFYQRACLSGYCSAFAYKPMNCALSSQLNGKCIELVQVPGQSSIFTMCELPSTIPIKQNARRSSWSSDEGIGEVLEKEDCMQALSGQIFMGMVSSQYQARLDIVRLIDGLVNACIRFVYFSLEDELKSKVFAEKMGLETGWNCHISLTPNGDMPGSEIPPSSPSHAGSLHDDLNQVSRDDAEGLLLMEEEGHSDLISFQPTDSDIPSFLEDSNRAKLPRGIHQVRPHLQNIDNVPLLVPLFTDCTPETMCEMIKIMQEYGEVTCCLGSSANLRNSCLFLQSDISIALDPLYPSRCSWETFGYATSISMAQASDGLSPLQLSGQLNSLPCSLTFRQEETISIIRLIEQARHATYGIRKCFLFLLQCQLTLVVIQFLSCLVQLPPLLSTTDILWLSCFCYPLLSISLLGKPPHSSIMSMATGKNLQSIPKKTQHYFLLCFLLKFSLTISSCLICFGFTLQSFCDSSRDRNLTNCSSVMLPSNDDRAPAWFEDFANGLLSAQKLTAALIVLHTVFISITHVHRTKPLWRKSPLTNLWWAVTVPVVLLGQVVQTAVDLQLWTHRDSHVHFGLEDVPLLTWLLGCLSLVLVVVTNEIVKLHEIRVRVRYQKRQKLQFETKLGMNSPF

SEQ ID NO: 22469 - protein, 88 aa, Artificial Sequence
  Synthetic polypeptide
GNNRGRVQWFTSLSCPRMRGSLTWMPACSTWRMEMARERGAAPALGPLIRRPRPWTTPCNPRVWQPPAHLPAASPANAQRRNPRSQAP

SEQ ID NO: 22470 - protein, 30 aa, Artificial Sequence
  Synthetic polypeptide
LHLFFSESGTYPKEIIVDVYSGSPLCPVPV

SEQ ID NO: 22471 - protein, 361 aa, Artificial Sequence
  Synthetic polypeptide
SWTCTVVHLSVLSPYERQLNLDASVQHLEDGDGKRKRSSSSPRSINKKAKALDNSLQPKSLAASSPPPCSQPSQCPEEKPQESSPMKGPGGPFQLLGSLGPSPGPAREGVGCSWESGRAENGVTGAGKRRWNFEQISFPNMASDSRHTLLRAPAPELLPANVAGRETDAESWCQKLNQRKEKLSRREREHHAEAAQFQEDVNADPEVQRCSSWREYKELLQRRQVQRSQRRAPHLWGQPVTPLLSPGQASSPAVVLQHISVLQTTHLPDGGARLLEKSGGLEIIFDVYQADAVATFRKNNPGKPYARMCISGFDEPVPDLCSLKRLSYQSGDVPLIFALVDHGDISFYSFRDFTLPQDVGH

SEQ ID NO: 22472 - protein, 71 aa, Artificial Sequence
  Synthetic polypeptide
GNNRGRVQWFTSLSCPRMRGSLTWMPACSTWRMEMARERGAAPALDSRHTLLRAPAPELLPANVAGRETDA

SEQ ID NO: 22473 - protein, 68 aa, Artificial Sequence
  Synthetic polypeptide
SWTCTVVHLSVLSPYERQLNLDASVQHLEDGDGKRKRSSSSPRQPPHPSARPSPRAAPGQRGWAGDRR

SEQ ID NO: 22474 - protein, 18 aa, Artificial Sequence
  Synthetic polypeptide
GNNRGRVQWFTSLSCPRM

SEQ ID NO: 22475 - protein, 15 aa, Artificial Sequence
  Synthetic polypeptide
SWTCTVVHLSVLSPY

SEQ ID NO: 22476 - protein, 110 aa, Artificial Sequence
  Synthetic polypeptide
QTVVLQHISVLQTTHLPDGGARLLEKSGGLEIIFDVYQADAVATFRKNNPGKPYARMCISGFDEPVPDLCSLKRLSYQSGDVPLIFALVDHGDISFYSFRDFTLPQDVGH

SEQ ID NO: 22477 - protein, 95 aa, Artificial Sequence
  Synthetic polypeptide
AKITPLYSSLGDRPWSFSISLCCRQHTFLMEVPGCWRSLGAWKSSLMFTRPTLWPHSERITLANPMPGCALVDLMSLSQTSAASSGCLTRVGMSL

SEQ ID NO: 22478 - protein, 50 aa, Artificial Sequence
  Synthetic polypeptide
SQLLRRLRQENCLNLGGRGHSEPRSRHYTPAWVTDRGPSAYLCAADNTPS

SEQ ID NO: 22479 - protein, 84 aa, Artificial Sequence
  Synthetic polypeptide
QTVVLQHISVLQTTHLPDGGARLLEKSGGLEIIFDVYQADAVATFRKNNPGKPYARMCISGFDEPVPDLCSLKRLSYQSGDVPL

SEQ ID NO: 22480 - protein, 6 aa, Artificial Sequence
  Synthetic polypeptide
NGFTSF

SEQ ID NO: 22481 - protein, 94 aa, Artificial Sequence
  Synthetic polypeptide
DLGSLLRLLSLRFLTCKMGSQVFKQKPGSAGPCCGGDAWPEPAPAGGQPVPGGRAPVQGRARQTHAGLSLPAGPGGPHSPAGQEPCLFHPVPHP

SEQ ID NO: 22482 - protein, 265 aa, Artificial Sequence
  Synthetic polypeptide
ASVSSPVKWVHKFLNRNRDQLDPAVVEMLGQSQLQLVGSLFQEAEPQSRGGRGRPTLASRFQQALEDLIARLGRSHVYFIQCLTPNPGKLPGLFDVGHVTEQLHQAAILEAVGTRSANFPVRVPFEAFLASFQALGSEGQEDLSDREKCGAVLSQVLGAESPLYHLGATKVLLQEQGWQRLEELRDQQRSQALVDLHRSFHTCISRQRVLPRMQARMRGFQARKRYLRRRAALGQLNTILLVAQPLLQRRQRLQLGRWQGWHSSE

SEQ ID NO: 22483 - protein, 29 aa, Artificial Sequence
  Synthetic polypeptide
SQHFGRPRTTSPWRVSCCSSLGRPGKSCR

SEQ ID NO: 22484 - protein, 20 aa, Artificial Sequence
  Synthetic polypeptide
VAHACNPSTLGGQGLHPRGG

SEQ ID NO: 22485 - protein, 728 aa, Artificial Sequence
  Synthetic polypeptide
WLTPVIPALWEAKDYIPVEGELLFQPGEAWKELQVKLLELQEVDSLLRGRQVRRFHVQLSNPKFGAHLGQPHSTTIIIRDPDELDRSFTSQMLSSQPPPHGDLGAPQNPNAKAAGSRKIHFNWLPPSGKPMGYRVKYWIQGDSESEAHLLDSKVPSVELTNLYPYCDYEMKVCAYGAQGEGPYSSLVSCRTHQEVPSEPGRLAFNVVSSTVTQLSWAEPAETNGEITAYEVCYGLVNDDNRPIGPMKKVLVDNPKNRMLLIENLRESQPYRYTVKARNGAGWGPEREAIINLATQPKRPMSIPIIPDIPIVDAQSGEDYDSFLMYSDDVLRSPSGSQRPSVSDDTEHLVNGRMDFAFPGSTNSLHRMTTTSAAAYGTHLSPHVPHRVLSTSSTLTRDYNSLTRSEHSHSTTLPRDYSTLTSVSSHDSRLTAGVPDTPTRLVFSALGPTSLRVSWQEPRCERPLQGYSVEYQLLNGGELHRLNIPNPAQTSVVVEDLLPNHSYVFRVRAQSQEGWGREREGVITIESQVHPQSPLCPLPGSAFTLSTPSAPGPLVFTALSPDSLQLSWERPRRPNGDIVGYLVTCEMAQGGGPATAFRVDGDSPESRLTVPGLSENVPYKFKVQARTTEGFGPEREGIITIESQDGGPFPQLGSRAGLFQHPLQSEYSSITTTHTSATEPFLVDGLTLGAQHLEAGGSLTRHVTQEFVSRTLTTSGTLSTHMDQQFFQT

SEQ ID NO: 22486 - protein, 781 aa, Artificial Sequence
  Synthetic polypeptide
WLTPVIPALWEAKDYIPVEGELLFQPGEAWKELQVKLLELQEVDSLLRGRQVRRFHVQLSNPKFGAHLGQPHSTTIIIRDPDELDRSFTSQMLSSQPPPHGDLGAPQNPNAKAAGSRKIHFNWLPPSGKPMGYRVKYWIQGDSESEAHLLDSKVPSVELTNLYPYCDYEMKVCAYGAQGEGPYSSLVSCRTHQEVPSEPGRLAFNVVSSTVTQLSWAEPAETNGEITAYEVCYGLVNDDNRPIGPMKKVLVDNPKNRMLLIENLRESQPYRYTVKARNGAGWGPEREAIINLATQPKRPMSIPIIPDIPIVDAQSGEDYDSFLMYSDDVLRSPSGSQRPSVSDDTEHLVNGRMDFAFPGSTNSLHRMTTTSAAAYGTHLSPHVPHRVLSTSSTLTRDYNSLTRSEHSHSTTLPRDYSTLTSVSSHGLPPIWEHGRSRLPLSWALGSRSRAQMKGFPPSRGPRDSIILAGRPAAPSWGPDSRLTAGVPDTPTRLVFSALGPTSLRVSWQEPRCERPLQGYSVEYQLLNGGELHRLNIPNPAQTSVVVEDLLPNHSYVFRVRAQSQEGWGREREGVITIESQVHPQSPLCPLPGSAFTLSTPSAPGPLVFTALSPDSLQLSWERPRRPNGDIVGYLVTCEMAQGGGPATAFRVDGDSPESRLTVPGLSENVPYKFKVQARTTEGFGPEREGIITIESQDGGPFPQLGSRAGLFQHPLQSEYSSITTTHTSATEPFLVDGLTLGAQHLEAGGSLTRHVTQEFVSRTLTTSGTLSTHMDQQFFQT

SEQ ID NO: 22487 - protein, 798 aa, Artificial Sequence
  Synthetic polypeptide
WLTPVIPALWEAKDYIPVEGELLFQPGEAWKELQVKLLELQEVDSLLRGRQVRRFHVQLSNPKFGAHLGQPHSTTIIIRDPDELDRSFTSQMLSSQPPPHGDLGAPQNPNAKAAGSRKIHFNWLPPSGKPMGYRVKYWIQGDSESEAHLLDSKVPSVELTNLYPYCDYEMKVCAYGAQGEGPYSSLVSCRTHQEVPSEPGRLAFNVVSSTVTQLSWAEPAETNGEITAYEVCYGLVNDDNRPIGPMKKVLVDNPKNRMLLIENLRESQPYRYTVKARNGAGWGPEREAIINLATQPKRPMSIPIIPDIPIVDAQSGEDYDSFLMYSDDVLRSPSGSQRPSVSDDTGCGWKFEPLLGEELDLRRVTWRLPPELIPRLSASSGRSSDAEAPHGPPDDGGAGGKGGSLPRSATPGPPGEHLVNGRMDFAFPGSTNSLHRMTTTSAAAYGTHLSPHVPHRVLSTSSTLTRDYNSLTRSEHSHSTTLPRDYSTLTSVSSHDSRLTAGVPDTPTRLVFSALGPTSLRVSWQEPRCERPLQGYSVEYQLLNGGELHRLNIPNPAQTSVVVEDLLPNHSYVFRVRAQSQEGWGREREGVITIESQVHPQSPLCPLPGSAFTLSTPSAPGPLVFTALSPDSLQLSWERPRRPNGDIVGYLVTCEMAQGGGPATAFRVDGDSPESRLTVPGLSENVPYKFKVQARTTEGFGPEREGIITIESQDGGPFPQLGSRAGLFQHPLQSEYSSITTTHTSATEPFLVDGLTLGAQHLEAGGSLTRHVTQEFVSRTLTTSGTLSTHMDQQFFQT

SEQ ID NO: 22488 - protein, 317 aa, Artificial Sequence
  Synthetic polypeptide
NLDHLTFRIGMPFCAPQILYPKEKIDIGLPPPKVSRTQQLLERKQAIQELRANVEEERAARLRTASVPLDAVRAEWERTCGPYHKQRLAEYYGLYRDLFHGATFVPRVPLHVAYAVGEDDLMPVYCGNEVTPTEAAQAPEVTYEAEEGSLWTLLLTSLDGHLLEPDAEYLHWLLTNIPGNRVAEGQVTCPYLPPFPARGSGIHRLAFLLFKQDQPIDFSEDARPSPCYQLAQRTFRTFDFYKKHQETMTPAGLSFFQCRWDDSVTYIFHQLLDMREPVFEFVRPPPYHPKQKRFPHRQPLRYLDRYRDSHEPTYGIY

SEQ ID NO: 22489 - protein, 115 aa, Artificial Sequence
  Synthetic polypeptide
LSGLGCRSVRLKYSIPKRRLILGCLHPKSPGPNSYWNGNRPSRSFGPMWKRSGLPASAQPVSRWMPCGPSGRGPVAPTTSSVWLSITASTETCSTVPPLCPESPCTWPTLWVRMT

SEQ ID NO: 22490 - protein, 22 aa, Artificial Sequence
  Synthetic polypeptide
PPDFPDWDAVLCASNTLSQRED

SEQ ID NO: 22491 - protein, 36 aa, Artificial Sequence
  Synthetic polypeptide
GRARWLTSVIPAFWQAKPSWAAGHPRWGRCPTVTST

SEQ ID NO: 22492 - protein, 23 aa, Artificial Sequence
  Synthetic polypeptide
SQHFGRPSRPGPPDTPAGADAQQ

SEQ ID NO: 22493 - protein, 374 aa, Artificial Sequence
  Synthetic polypeptide
PGAVAHVCNPSILAGQAVLGRRTPPLGPMPNSDIDLSNLERLEKYRSFDRYRRRAEQEAQAPHWWRTYREYFGEKTDPKEKIDIGLPPPKVSRTQQLLERKQAIQELRANVEEERAARLRTASVPLDAVRAEWERTCGPYHKQRLAEYYGLYRDLFHGATFVPRVPLHVAYAVGEDDLMPVYCGNEVTPTEAAQAPEVTYEAEEGSLWTLLLTSLDGHLLEPDAEYLHWLLTNIPGNRVAEGQVTCPYLPPFPARGSGIHRLAFLLFKQDQPIDFSEDARPSPCYQLAQRTFRTFDFYKKHQETMTPAGLSFFQCRWDDSVTYIFHQLLDMREPVFEFVRPPPYHPKQKRFPHRQPLRYLDRYRDSHEPTYGIY

SEQ ID NO: 22494 - protein, 18 aa, Artificial Sequence
  Synthetic polypeptide
PGAVAMPVILTVWEAEIS

SEQ ID NO: 22495 - protein, 31 aa, Artificial Sequence
  Synthetic polypeptide
QFGRLRFHERLLPDTLQPAGPLHQRTEGAFP

SEQ ID NO: 22496 - protein, 29 aa, Artificial Sequence
  Synthetic polypeptide
QFGRLRFHERLLPDTLQPAGPLHQRTEGA

SEQ ID NO: 22497 - protein, 720 aa, Artificial Sequence
  Synthetic polypeptide
GRTRWLMPVIPALWEAEAGRSRRQEIETILTNTEEETLSFIRDSLEKSDQLTKNMVSILSSFESRLMKLENSIIPVHKQTENLQRLQENVEKTLSCLDHVISYYHVASDTEKIIREGPTGRLEEYLGSMAKIQKAVEYFQDNSPDSPELNKVKLLFERGKEALESEFRSLMTRHSKVVSPVLILDLISGDDDLEAQEDVTLEHLPESVLQDVIRISRWLVEYGRNQDFMNVYYQIRSSQLDRSIKGLKEHFHKSSSSSGVPYSPAIPNKRKDTPTKKPVKRPGTIRKAQNLLKQYSQHGLDGKKGGSNLIPLEGHEHDFRVKHLSEALNDKHGPLAGRDDMLDVETDAYIHCVSAFVKLAQSEYQLLADIIPEHHQKKTFDSLIQDALDGLMLEGENIVSAARKAIVRHDFSTVLTVFPILRHLKQTKPEFDQVLQGTAASTKNKLPGLITSMETIGAKALEDFADNIKNDPDKEYNMPKDGTVHELTSNAILFLQQLLDFQETAGAMLASQETSSSATSYSSEFSKRLLSTYICKVLGNLQLNLLSKSKVYEDPALSAIFLHNNYNYILKSLEKSELIQLVAVTQKTAERSYREHIEQQIQTYQRSWLKVTDYIAEKNLPVFQPGVKLRDKERQIIKERFKGFNDGLEELCKIQKAWAIPDTEQRDRIRQAQKTIVKETYGAFLQKFGSVPFTKNPEKYIKYGVEQVGDMIDRLFDTSA

SEQ ID NO: 22498 - protein, 36 aa, Artificial Sequence
  Synthetic polypeptide
LTRRRRLCPSSETAWRRATSSLRTWCLSYHPLRAAL

SEQ ID NO: 22499 - protein, 20 aa, Artificial Sequence
  Synthetic polypeptide
HGGGDSVLHPRQPGEERPAH

SEQ ID NO: 22500 - protein, 666 aa, Artificial Sequence
  Synthetic polypeptide
GRTRWLMPVIPALWEAEAGRSRRQEIETILTNTEEETLSFIRDSLEKSDQLTKNMVSILSSFESRLMKLENSIIPVHKQTENLQRLQENVEKTLSCLDHVISYYHVASDTEKIIREGPTGRLEEYLGSMAKIQKAVEYFQDNSPDSPELNKVKLLFERGKEALESEFRSLMTRHSKVVSPVLILDLISGDDDLEAQEDVTLEHLPESVLQDVIRISRWLVEYGRNQDFMNVYYQIRSSQLDRSIKGLKEHFHKSSSSSGVPYSPAIPNKRKDTPTKKPVKRPGRDDMLDVETDAYIHCVSAFVKLAQSEYQLLADIIPEHHQKKTFDSLIQDALDGLMLEGENIVSAARKAIVRHDFSTVLTVFPILRHLKQTKPEFDQVLQGTAASTKNKLPGLITSMETIGAKALEDFADNIKNDPDKEYNMPKDGTVHELTSNAILFLQQLLDFQETAGAMLASQETSSSATSYSSEFSKRLLSTYICKVLGNLQLNLLSKSKVYEDPALSAIFLHNNYNYILKSLEKSELIQLVAVTQKTAERSYREHIEQQIQTYQRSWLKVTDYIAEKNLPVFQPGVKLRDKERQIIKERFKGFNDGLEELCKIQKAWAIPDTEQRDRIRQAQKTIVKETYGAFLQKFGSVPFTKNPEKYIKYGVEQVGDMIDRLFDTSA

SEQ ID NO: 22501 - protein, 697 aa, Artificial Sequence
  Synthetic polypeptide
GRTRWLMPVIPALWEAEAGRSRRQEIETILTNTEEETLSFIRDSLEKSDQLTKNMVSILSSFESRLMKLENSIIPVHKQTENLQRLQENVEKTLSCLDHVISYYHVASDTEKIIREGPTGRLEEYLGSMAKIQKAVEYFQDNSPDSPELNKVKLLFERGKEALESEFRSLMTRHSKVVSPVLILDLISGDDDLEAQEDVTLEHLPESVLQDVIRISRWLVEYGRNQDFMNVYYQIRSSQLDRSIKGLKEHFHKSSSSSGVPYSPAIPNKRKDTPTKKPVKRPGTIRKAQNLLKQYSQHGLDGKKGGSNLIPLEGRDDMLDVETDAYIHCVSAFVKLAQSEYQLLADIIPEHHQKKTFDSLIQDALDGLMLEGENIVSAARKAIVRHDFSTVLTVFPILRHLKQTKPEFDQVLQGTAASTKNKLPGLITSMETIGAKALEDFADNIKNDPDKEYNMPKDGTVHELTSNAILFLQQLLDFQETAGAMLASQETSSSATSYSSEFSKRLLSTYICKVLGNLQLNLLSKSKVYEDPALSAIFLHNNYNYILKSLEKSELIQLVAVTQKTAERSYREHIEQQIQTYQRSWLKVTDYIAEKNLPVFQPGVKLRDKERQIIKERFKGFNDGLEELCKIQKAWAIPDTEQRDRIRQAQKTIVKETYGAFLQKFGSVPFTKNPEKYIKYGVEQVGDMIDRLFDTSA

SEQ ID NO: 22502 - protein, 748 aa, Artificial Sequence
  Synthetic polypeptide
GRTRWLMPVIPALWEAEAGRSRRQEIETILTNTEEETLSFIRDSLEKSDQLTKNMVSILSSFESRLMKLENSIIPVHKQTENLQRLQENVEKTLSCLDHVISYYHVASDTEKIIREGPTGRLEEYLGSMAKIQKAVEYFQDNSPDSPELNKVKLLFERGKEALESEFRSLMTRHSKVVSPVLILDLISGDDDLEAQEDVTLEHLPESVLQDVIRISRWLVEYGRNQDFMNVYYQIRSSQLDRSIKGLKEHFHKSSSSSGVPYSPAIPNKRKDTPTKKPVKRPGTIRKAQNLLKQYSQHGLDGKKGGSNLIPLEGLLPCTPRGGLPGPWINAACVCAADISPGHEHDFRVKHLSEALNDKHGPLAGRDDMLDVETDAYIHCVSAFVKLAQSEYQLLADIIPEHHQKKTFDSLIQDALDGLMLEGENIVSAARKAIVRHDFSTVLTVFPILRHLKQTKPEFDQVLQGTAASTKNKLPGLITSMETIGAKALEDFADNIKNDPDKEYNMPKDGTVHELTSNAILFLQQLLDFQETAGAMLASQETSSSATSYSSEFSKRLLSTYICKVLGNLQLNLLSKSKVYEDPALSAIFLHNNYNYILKSLEKSELIQLVAVTQKTAERSYREHIEQQIQTYQRSWLKVTDYIAEKNLPVFQPGVKLRDKERQIIKERFKGFNDGLEELCKIQKAWAIPDTEQRDRIRQAQKTIVKETYGAFLQKFGSVPFTKNPEKYIKYGVEQVGDMIDRLFDTSA

SEQ ID NO: 22503 - protein, 706 aa, Artificial Sequence
  Synthetic polypeptide
GRTRWLMPVIPALWEAEAGRSRRQEIETILTNTEEETLSFIRDSLEKSDQLTKNMVSILSSFESRLMKLENSIIPVHKQTENLQRLQENVEKTLSCLDHVISYYHVASDTEKIIREGPTGRLEEYLGSMAKIQKAVEYFQDNSPDSPELNKVKLLFERGKEALESEFRSLMTRHSKVVSPVLILDLISGDDDLEAQEDVTLEHLPESVLQDVIRISRWLVEYGRNQDFMNVYYQIRSSQLDRSIKGLKEHFHKSSSSSGVPYSPAIPNKRKDTPTKKPVKRPGTIRKAQNLLKQYSQHGLDGKKGGSNLIPLEGHEHDFRVKHLSEALNDKHGPLAGRDDMLDVETDAYIHCVSAFVKLAQSEYQLLADIIPEHHQKKTFDSLIQDALDGLMLEGENIVSAARKAIVRHDFSTVLTVFPILRHLKQTKPEFDQVLQGTAASTKNKLPGLITSMETIGAKALEDFADNIKNDPDKEYNMPKDGTVHELTSNAILFLQQLLDFQETAGAMLASQETSSSATSYSSEFSKRLLSTYICKVLGNLQLNLLSKSKVYEDPALSAIFLHNNYNYILKSLEKSELIQLVAVTQKTAERSYREHIEQQIQTYQRSWLKVTDYIAEKNLPVFQPGVKGFNDGLEELCKIQKAWAIPDTEQRDRIRQAQKTIVKETYGAFLQKFGSVPFTKNPEKYIKYGVEQVGDMIDRLFDTSA

SEQ ID NO: 22504 - protein, 689 aa, Artificial Sequence
  Synthetic polypeptide
GRTRWLMPVIPALWEAEAGRSRRQEIETILTNTEEETLSFIRDSLEKSDQLTKNMVSILSSFESRLMKLENSIIPVHKQTENLQRLQENVEKTLSCLDHVISYYHVASDTEKIIREGPTGRLEEYLGSMAKIQKAVEYFQDNSPDSPELNKVKLLFERGKEALESEFRSLMTRHSKVVSPVLILDLISGDDDLEAQEDVTLEHLPESVLQDVIRISRWLVEYGRNQDFMNVYYQIRSSQLDRSIKGLKEHFHKSSSSSGVPYSPAIPNKRKDTPTKKPVKRPGHEHDFRVKHLSEALNDKHGPLAGRDDMLDVETDAYIHCVSAFVKLAQSEYQLLADIIPEHHQKKTFDSLIQDALDGLMLEGENIVSAARKAIVRHDFSTVLTVFPILRHLKQTKPEFDQVLQGTAASTKNKLPGLITSMETIGAKALEDFADNIKNDPDKEYNMPKDGTVHELTSNAILFLQQLLDFQETAGAMLASQETSSSATSYSSEFSKRLLSTYICKVLGNLQLNLLSKSKVYEDPALSAIFLHNNYNYILKSLEKSELIQLVAVTQKTAERSYREHIEQQIQTYQRSWLKVTDYIAEKNLPVFQPGVKLRDKERQIIKERFKGFNDGLEELCKIQKAWAIPDTEQRDRIRQAQKTIVKETYGAFLQKFGSVPFTKNPEKYIKYGVEQVGDMIDRLFDTSA

SEQ ID NO: 22505 - protein, 162 aa, Artificial Sequence
  Synthetic polypeptide
GRTRWLMPVIPALWEAEAGRSRRQEIETILTNTEEETLSFIRDSLEKSDQLTKNMVSILSSFESRLMKLENSIIPVHKQTENLQRLQENVEKTLSCLDHVISYYHVASDTEKIIREGPTGRLEEYLGSMAKIQKAVEYFQDNSPDSPELNKVKLLFERGKEA

SEQ ID NO: 22506 - protein, 172 aa, Artificial Sequence
  Synthetic polypeptide
GRTRWLMPVIPALWEAEAGRSRRQEIETILTNTEEETLSFIRDSLEKSDQLTKNMVSILSSFESRLMKLENSIIPVHKQTENLQRLQENVEKTLSCLDHVISYYHVASDTEKIIREGPTGRLEEYLGSMAKIQKAVEYFQDNSPDSPELNKVVRGPQNNVRSLGISVSALVS

SEQ ID NO: 22507 - protein, 34 aa, Artificial Sequence
  Synthetic polypeptide
WLMHVIPALWETKAGGSPRSGVQDQPGQHDVLRK

SEQ ID NO: 22508 - protein, 26 aa, Artificial Sequence
  Synthetic polypeptide
SQHFGRPRRADHRGQEFKTSLANMMC

SEQ ID NO: 22509 - protein, 330 aa, Artificial Sequence
  Synthetic polypeptide
LRRLGAELGKSVVYQETNGETRVEIKESVRGQDIFIIQTIPRDVNTAVMELLIMAYALKTACARNIIGVIPYFPYSKQSKMRKRGSIVCKLLASMLAKAGLTHIITMDLHQKEIQGFFSFPVDNLRASPFLLQYIQEEIPNYRNAVIVAKSPDAAKRAQSYAERLRLGLAVIHGEAQCTELDMDDGRHSPPMVKNATVHPGLELPLMMAKEKPPITVVGDVGGRIAIIVDDIIDDVESFVAAAEILKERGAYKIYVMATHGILSAEAPRLIEESSVDEVVVTNTVPHEVQKLQCPKIKTVDISLILSEAIRRIHNGESMAYLFRNITVDD

SEQ ID NO: 22510 - protein, 7 aa, Artificial Sequence
  Synthetic polypeptide
MTEAPWC

SEQ ID NO: 22511 - protein, 91 aa, Artificial Sequence
  Synthetic polypeptide
LRRLGAELGKSVVYQETNGETRVEIKESVRGQDIFIIQTIPRDVNTAVMELLIMAYALKTACARNIIGVIPYFPYSKQSKMRKRGSIVCKL

SEQ ID NO: 22512 - protein, 76 aa, Artificial Sequence
  Synthetic polypeptide
KLVSTKKTNKIRQALLHLLADLRPCHHHAAGDLHVWHRTRGLCPARHHPAGAAEQRCVREREVHPAGELLGWPQLD

SEQ ID NO: 22513 - protein, 494 aa, Artificial Sequence
  Synthetic polypeptide
SQHFGRPRWADHLRSGVRDQPGQHSENWSLLKRQTKLGRPYFTYWLTFVHVIITLLVICTYGIAPVGFAQHVTTQLVLRNKGVYESVKYIQQENFWVGPSSIDLIHLGAKFSPCIRKDGQIEQLVLRERDLERDSGCCVQNDHSGCIQTQRKDCSETLATFVKWQDDTGPPMDKSDLGQKRTSGAVCHQDPRTCEEPASSGAHIWPDDITKWPICTEQARSNHTGFLHMDCEIKGRPCCIGTKGSCEITTREYCEFMHGYFHEEATLCSQVHCLDKVCGLLPFLNPEVPDQFYRLWLSLFLHAGVVHCLVSVVFQMTILRDLEKLAGWHRIAIIFILSGITGNLASAIFLPYRAEVGPAGSQFGLLACLFVELFQSWPLLERPWKAFLNLSAIVLFLFICGLLPWIDNIAHIFGFLSGLLLAFAFLPYITFGTSDKYRKRALILVSLLAFAGLFAALVLWLYIYPINWPWIEHLTCFPFTSRFCEKYELDQVLH

SEQ ID NO: 22514 - protein, 8 aa, Artificial Sequence
  Synthetic polypeptide
AGPTSPTG

SEQ ID NO: 22515 - protein, 463 aa, Artificial Sequence
  Synthetic polypeptide
SQHFGRPRPYFTYWLTFVHVIITLLVICTYGIAPVGFAQHVTTQLVLRNKGVYESVKYIQQENFWVGPSSIDLIHLGAKFSPCIRKDGQIEQLVLRERDLERDSGCCVQNDHSGCIQTQRKDCSETLATFVKWQDDTGPPMDKSDLGQKRTSGAVCHQDPRTCEEPASSGAHIWPDDITKWPICTEQARSNHTGFLHMDCEIKGRPCCIGTKGSCEITTREYCEFMHGYFHEEATLCSQVHCLDKVCGLLPFLNPEVPDQFYRLWLSLFLHAGVVHCLVSVVFQMTILRDLEKLAGWHRIAIIFILSGITGNLASAIFLPYRAEVGPAGSQFGLLACLFVELFQSWPLLERPWKAFLNLSAIVLFLFICGLLPWIDNIAHIFGFLSGLLLAFAFLPYITFGTSDKYRKRALILVSLLAFAGLFAALVLWLYIYPINWPWIEHLTCFPFTSRFCEKYELDQVLH

SEQ ID NO: 22516 - protein, 23 aa, Artificial Sequence
  Synthetic polypeptide
PGPVAHTCNPSTSGGLGPTSPTG

SEQ ID NO: 22517 - protein, 10 aa, Artificial Sequence
  Synthetic polypeptide
YRAQRRGWGS

SEQ ID NO: 22518 - protein, 177 aa, Artificial Sequence
  Synthetic polypeptide
SQLLRKLRQENHLNPGGRGCSEPRLHHHTPAWMTEFFVNFPSAKQYFSQFKHMEDPLEMERSPQLRKHACRVMGALNTVVENLHDPDKVSSVLALVGKAHALKHKVEPVYFKILSGVILEVVAEEFASDFPPETQRAWAKLRGLIYSHVTAAYKEVGWVQQVPNATTPPATLPSSGP

SEQ ID NO: 22519 - protein, 4 aa, Artificial Sequence
  Synthetic polypeptide
QSSL

SEQ ID NO: 22520 - protein, 88 aa, Artificial Sequence
  Synthetic polypeptide
WMPVVPATQEAEARESLEPRRQRLQRAKIAPPHSSLDDRVLCELPLGQAVLQPVQAHGGSPGDGAEPPAAEARLPSHGGPQHCRGEPA

SEQ ID NO: 22521 - protein, 213 aa, Artificial Sequence
  Synthetic polypeptide
SQLLRKLRQENHLNPGGRGCSEPRLHHHTPAWMTEFFVNFPSAKQYFSQFKHMEDPLEMERSPQLRKHACRVMGALNTVVENLHDPDKVSSVLALVGKAHALKHKVEPVYFKPTGHTALFGAVGPLTPPPSLAAPRAEGRVLKTLLDAPFLGAKEAGGIPDSTSPKEASVAARVPPWSCWEAALAAWMLTPARRAERGPLFLAFLLTVRERPS

SEQ ID NO: 22522 - protein, 68 aa, Artificial Sequence
  Synthetic polypeptide
SQHFGRLRRADHEVRRSRPSLLTRRLVACCPQSRHYYRHHPKFCQQHQLPCGMAQDGKRETKVIKEMV

SEQ ID NO: 22523 - protein, 147 aa, Artificial Sequence
  Synthetic polypeptide
HGGWWHVVLNLDTTIAITQNFASSTNFPVVWHKTVRGRPKLSRKWYRILKQEHPELAVLADSVDLQESTGIASDSSSDSSSSSSSSSSDSDSECESGSEGDGTVHRRKKRRTCSMVGNGDTTSQDDCVSKERSSSRIRDTCGGRAHP

SEQ ID NO: 22524 - protein, 65 aa, Artificial Sequence
  Synthetic polypeptide
RARWFMPVIPALWEAEAGRSRGQEIETILANTEAGGMLSSISTLLSPSPKILPAAPTSLWYGTRR

SEQ ID NO: 22525 - protein, 68 aa, Artificial Sequence
  Synthetic polypeptide
HGGWWHVVLNLDTTIAITQNFASSTNFPVVWHKTVRGRPKLSRKWYRYSTGSGSASHPQPPRATVSQP

SEQ ID NO: 22526 - protein, 94 aa, Artificial Sequence
  Synthetic polypeptide
HGGWWHVVLNLDTTIAITQNFASSTNFPVVWHKTVRGRPKLSRKWYRTDTARAAAVQATHSHPVPLCPNPDLEGPALGDFEARAPRVGSPRRLG

SEQ ID NO: 22527 - protein, 136 aa, Artificial Sequence
  Synthetic polypeptide
HGGWWHVVLNLDTTIAITQNFASSTNFPVVWHKTVRGRPKLSRKWYRILKQEHPELAVLADSVDLQESTGIASDSSSDSSSSSSSSSSDSDSECESGSEGDGTVHRRKKRRTCSMVGNGDTTSQDDCVSKERSSSR

SEQ ID NO: 22528 - protein, 128 aa, Artificial Sequence
  Synthetic polypeptide
HGGWWHVVLNLDTTIAITQNFASSTNFPVVWHKTVRGRPKLSRKWYSASLDPRAMGQCTAGRRGGRAAWWETGTPPPRTTVSAKSAAPPGDPARLLSVWKDTLAARAGPGEGGLSSPADKGRPDRAQE

SEQ ID NO: 22529 - protein, 247 aa, Artificial Sequence
  Synthetic polypeptide
IVNLLRRSHHSRSAQNNLTKAVDAFKKSFKLCVTKEMLLLSITTAYTGLELTFFSGVYGTCIGATNKFGAEEKSLIGLSGIFIGIGEILGGSLFGLLSKNNRFGRNPVVLLGILVHFIAFYLIFLNMPGDAPIAPVKGTDSSAYIKSSKEVAILCSFLLGLGDSCFNTQLLSILGFLYSEDSAPAFAIFKFVQSICAAVAFFYSNYLLLHWQLLVMVIFGFFGTISFFTVEWEAAAFVARGSDYRSI

SEQ ID NO: 22530 - protein, 12 aa, Artificial Sequence
  Synthetic polypeptide
EGVIILGLPRTI

SEQ ID NO: 22531 - protein, 18 aa, Artificial Sequence
  Synthetic polypeptide
IVNLLRRSHHSRSAQNNL

SEQ ID NO: 22532 - protein, 39 aa, Artificial Sequence
  Synthetic polypeptide
GRVWWLMPGIPALQDAEAGGSLELRSSRPVWQHGLPRTI

SEQ ID NO: 22533 - protein, 46 aa, Artificial Sequence
  Synthetic polypeptide
AGCGGSCLESQHFRMLRQVDHLSSEVQDQSGNMVCPEQSDKGSRCF

SEQ ID NO: 22534 - protein, 246 aa, Artificial Sequence
  Synthetic polypeptide
AQKFKTSLATWSAQNNLTKAVDAFKKSFKLCVTKEMLLLSITTAYTGLELTFFSGVYGTCIGATNKFGAEEKSLIGLSGIFIGIGEILGGSLFGLLSKNNRFGRNPVVLLGILVHFIAFYLIFLNMPGDAPIAPVKGTDSSAYIKSSKEVAILCSFLLGLGDSCFNTQLLSILGFLYSEDSAPAFAIFKFVQSICAAVAFFYSNYLLLHWQLLVMVIFGFFGTISFFTVEWEAAAFVARGSDYRSI

SEQ ID NO: 22535 - protein, 39 aa, Artificial Sequence
  Synthetic polypeptide
AGCGGSCLESQHFRMLRQVDHLSSEVQDQSGNMVCPEQS

SEQ ID NO: 22536 - protein, 17 aa, Artificial Sequence
  Synthetic polypeptide
AQKFKTSLATWSAQNNL

SEQ ID NO: 22537 - protein, 58 aa, Artificial Sequence
  Synthetic polypeptide
NSPPMPPLRRLPAALATWPTPPEMPGSSRRLHHGTRRPRWTSATWGLTPSWSRCAGRP

SEQ ID NO: 22538 - protein, 75 aa, Artificial Sequence
  Synthetic polypeptide
VTWPLPSAPVHCTGPLAWLLLEHEGSSSRKNIHLFPPGKSLPRPPGRLIQVLLKRCHLGEASLSPAVKTALPCLH

SEQ ID NO: 22539 - protein, 366 aa, Artificial Sequence
  Synthetic polypeptide
SAAILERPPCHPQLKQPSHASTEAAPSCVGDMADTPRDAGLKQAPASRNEKAPVDFGYVGIDSILEQMRRKAMKQGFEFNIMVVGQSGLGKSTLINTLFKSKISRKSVQPTSEERIPKTIEIKSITHDIEEKGVRMKLTVIDTPGFGDHINNENCWQPIMKFINDQYEKYLQEEVNINRKKRIPDTRVHCCLYFIPATGHSLRPLDIEFMKRLSKVVNIVPVIAKADTLTLEERVHFKQRITADLLSNGIDVYPQKEFDEDSEDRLVNEKFREMIPFAVVGSDHEYQVNGKRILGRKTKWGTIEVENTTHCEFAYLRDLLIRTHMQNIKDITSSIHFEAYRVKRLNEGSSAMANGMEEKEPEAPEM

SEQ ID NO: 22540 - protein, 122 aa, Artificial Sequence
  Synthetic polypeptide
SAAILERPPCHPQLKQPSHASTEAAPSCVGDMADTPRDAGLKQAPASRNEKAPVDFGYVGIDSILEQMRRKAMKQGFEFNIMVVGQSGLGKSTLINTLFKSKISRKSVQPTSEERIPKTIEI

SEQ ID NO: 22541 - protein, 160 aa, Artificial Sequence
  Synthetic polypeptide
SAAILERPPCHPQLKQPSHASTEAAPSCVGDMADTPRDAGLKQAPASRNEKAPVDFGYVGIDSILEQMRRKAMKQGFEFNIMVVGESSPCMPLNQCRKPASAPRAAHKPLGLVFPSVKWGSNPDLKDGLPVTLRVHACAWEEPTASSGSSEGPVLHIQGP

SEQ ID NO: 22542 - protein, 68 aa, Artificial Sequence
  Synthetic polypeptide
ETGGVLSHEVDDSSLRQQQETNEGEDKIFLINKLHSIYERKEREERSRVGTTEEAAAPPALLTDEQDA

SEQ ID NO: 22543 - protein, 23 aa, Artificial Sequence
  Synthetic polypeptide
ATKLMTVRYDSSRKLMRVRTKSS

SEQ ID NO: 22544 - protein, 110 aa, Artificial Sequence
  Synthetic polypeptide
MSWAWWRVPVVTAIPEAEQVQEKWHLVEDLSRLLPEPGPSDSPGPKYPASQASRPQSFCPGCPCPGSPGHQAPRPGPSVVDAAGLRSPCPGQHGAPASARRFRFPSGAEL

SEQ ID NO: 22545 - protein, 109 aa, Artificial Sequence
  Synthetic polypeptide
AGRGGACLWSQLFRRLSRFRRSGTWWRTCRDCCRSQARATLRAPSTLPPKLRARSPSAPDAHALAPRATRPRGRAPPSWMPRDCVPLALDSTVPRPPPADSASPAARSC

SEQ ID NO: 22546 - protein, 209 aa, Artificial Sequence
  Synthetic polypeptide
SQRFGRLSTELMRRVRRFQIAQYKCLVIKYAKDTRYSSSFCTHDRNTMEALPACLLRDVAQEALGVAVIGIDEGQFFPDIVEFCEAMANAGKTVIVAALDGTFQRKPFGAILNLVPLAESVVKLTAVCMECFREAAYTKRLGTEKEVEVIGGADKYHSVCRLCYFKKASGQPAGPDNKENCPVPGKPGEAVAARKLFAPQQILQCSPAN

SEQ ID NO: 22547 - protein, 51 aa, Artificial Sequence
  Synthetic polypeptide
QVWWPTPLIPALWKAEHRVDETRPSLPDCSVQVPGDQVCQRHSLQQQLLHT

SEQ ID NO: 22548 - protein, 242 aa, Artificial Sequence
  Synthetic polypeptide
SQRFGRLSTELMRRVRRFQIAQYKCLVIKYAKDTRYSSSFCTHDRNTMEALPACLLRDVAQEALGVAVIGIDEGQFFPDIVEFCEAMANAGKTVIVAALDGTFQRKPFGAILNLVPLAESVVKLTAVCMECFREAAYTKRLGTEKEVAPPAFPAGRRGGGMALPPSCPGPSPIPCPCGQVEVIGGADKYHSVCRLCYFKKASGQPAGPDNKENCPVPGKPGEAVAARKLFAPQQILQCSPAN

SEQ ID NO: 22549 - protein, 155 aa, Artificial Sequence
  Synthetic polypeptide
SQRFGRLSTELMRRVRRFQIAQYKCLVIKYAKDTRYSSSFCTHDRNTMEALPACLLRDVAQEALGVAVIGIDEGQFFPDIVEFCEAMANAGKTVIVAALDGTFQRKPFGAILNLVPLAESVVKLTAVCMECFREAAYTKRLGTEKEQILQCSPAN

SEQ ID NO: 22550 - protein, 62 aa, Artificial Sequence
  Synthetic polypeptide
SQRFGRLSTELMRRVRRFQIAQYKCLVIKYAKDTRYSSSFCTHDRSLTSWSSARPWPTPGRP

SEQ ID NO: 22551 - protein, 162 aa, Artificial Sequence
  Synthetic polypeptide
SQRFGRLSTELMRRVRRFQIAQYKCLVIKYAKDTRYSSSFCTHDRTRSRIIARNTMEALPACLLRDVAQEALGVAVIGIDEGQFFPDIVEFCEAMANAGKTVIVAALDGTFQRKPFGAILNLVPLAESVVKLTAVCMECFREAAYTKRLGTEKEVEVIGGAD

SEQ ID NO: 22552 - protein, 36 aa, Artificial Sequence
  Synthetic polypeptide
GRARWLTPVIPALWEAEAGGSRGQEIETILANTRGT

SEQ ID NO: 22553 - protein, 92 aa, Artificial Sequence
  Synthetic polypeptide
YQHFGRPRRADHEVRRSRPSWLIREEHKKHSSGCAFLSVKKQFEELTLGEFLKLDRERAKNKIAKETNNKKKEFEETAEKVRRAIEQLAAMD

SEQ ID NO: 22554 - protein, 23 aa, Artificial Sequence
  Synthetic polypeptide
YERNIKSIRPVALSFLSRSSLKN

SEQ ID NO: 22555 - protein, 70 aa, Artificial Sequence
  Synthetic polypeptide
YQHFGRPRRADHEVRRSRPSWLIREEHKKHSSGCAFLSVKKQFEELTLGEFLKLDRERAKNKIERALLAE

SEQ ID NO: 22556 - protein, 50 aa, Artificial Sequence
  Synthetic polypeptide
EVTMAVIGSLAVPSCSPGHLPTLLPVSRRRAPVPVDQKPGSRIWSLQFSR

SEQ ID NO: 22557 - protein, 52 aa, Artificial Sequence
  Synthetic polypeptide
GRALRLTPVIPALWEAEIGGSLEVGSWKSASPTWRNPVSTKIQKLARSRAAP

SEQ ID NO: 22558 - protein, 43 aa, Artificial Sequence
  Synthetic polypeptide
PDHALPHDPVLHLLPGRVPLDGLGHREEHQRAPGQVLRLHQEK

SEQ ID NO: 22559 - protein, 89 aa, Artificial Sequence
  Synthetic polypeptide
GRELEISLTNMAKPCLYKNTKISQITRCPMIPCYISSPDECLWMDWVTEKNINGHQAKFFACIKRSDGSCAWYRGAAPPKQEFLDIEDP

SEQ ID NO: 22560 - protein, 45 aa, Artificial Sequence
  Synthetic polypeptide
AQEFKTSLGNMVKIHLYKKPARHGSAHLWSQLFGRLRCSKGLRRI

SEQ ID NO: 22561 - protein, 155 aa, Artificial Sequence
  Synthetic polypeptide
RPPVVPAIREAEMFKGPEKDIEFIYTAPSSAVCGVSLDVGGKKEYLIAGKAEGDGKMHITLCDFIVPWDTLSTTQKKSLNHRYQMGCECKITRCPMIPCYISSPDECLWMDWVTEKNINGHQAKFFACIKRSDGSCAWYRGAAPPKQEFLDIEDP

SEQ ID NO: 22562 - protein, 121 aa, Artificial Sequence
  Synthetic polypeptide
RPPVVPAIREAEMFKGPEKDIEFIYTAPSSAVCGVSLDVGGKKEYLIAGKAEGDGKMHITLCDFIVPWDTLSTTQKKSLNHRYQMGCECKVSRSCLCWSIASSQCLQMDGRDFDPWLSRTR

SEQ ID NO: 22563 - protein, 44 aa, Artificial Sequence
  Synthetic polypeptide
RPPVVPAIREAEMFKGPEKDIEFIYTAPSSAVCGVSLDVGGKKE

SEQ ID NO: 22564 - protein, 369 aa, Artificial Sequence
  Synthetic polypeptide
KMGGRMEYLVKWKGWSQKYSTWEPEENILDARLLAAFEEREREMELYGPKKRGPKPKTFLLKAQAKAKAKTYEFRSDSARGIRIPYPGRSPQDLASTSRAREGLRNMGLSPPASSTSTSSTCRAEAPRDRDRDRDRDRERDRERERERERERERERERERGTSRVDDKPSSPGDSSKKRGPKPRKELPDPSQRPLGEPSAGLGEYLKGRKLDDTPSGAGKFPAGHSVIQLARRQDSDLVQCGVTSPSSAEATGKLAVDTFPARVIKHRAAFLEAKGQGALDPNGTRVRHGSGPPSSGGGLYRDMGAQGGRPSLIARIPVARILGDPEEESWSPSLTNLEKVVVTDVTSNFLTVTIKESNTDQGFFKEKR

SEQ ID NO: 22565 - protein, 28 aa, Artificial Sequence
  Synthetic polypeptide
MRAPEQVTWPRGASLSSSRKWGDAWNTS

SEQ ID NO: 22566 - protein, 48 aa, Artificial Sequence
  Synthetic polypeptide
LGPAVPRFPHLENGGTHGIPREMEGMVAEVQHMGTGGKHPGCSLARSL

SEQ ID NO: 22567 - protein, 232 aa, Artificial Sequence
  Synthetic polypeptide
KMGGRMEYLVKWKGWSQKYSTWEPEENILDARLLAAFEEREREMELYGPKKRGPKPKTFLLKAQAKAKAKTYEFRSDSARGIRIPYPGRSPQDLASTSRAREGLRNMGLSPPASSTSTSSTCRAEAPRDRDRDRDRDRERDRERERERERERERERERERGTSRVDDKPSSPGDSSKKRGPKPRKELPDPSQRPLGEPSAGLGEYLKGRKLDDTPSGAGKFPAGHSVIQLAR

SEQ ID NO: 22568 - protein, 2058 aa, Artificial Sequence
  Synthetic polypeptide
EEEEEEEEEEEEEMVVSEEEEEEEEEGDEEEEEEVEAADEDDEEDDDEGVLGRGPGHDRGRDRHSPPGCHLFPPPPPPPPPLPPPPPPPPPDKDDIRLLPSALGVKKRKRGPKKQKENKPGKPRKRKKRDSEEEFGSERDEYREKSESGGSEYGTGPGRKRRRKHREKKEKKTKRRKKGEGDGGQKQVEQKSSATLLLTWGLEDVEHVFSEEDYHTLTNYKAFSQFMRPLIAKKNPKIPMSKMMTILGAKWREFSANNPFKGSAAAVAAAAAAAAAAVAEQVSAAVSSATPIAPSGPPALPPPPAADIQPPPIRRAKTKEGKGPGHKRRSKSPRVPDGRKKLRGKKMAPLKIKLGLLGGKRKKGGSYVFQSDEGPEPEAEESDLDSGSVHSASGRPDGPVRTKKLKRGRPGRKKKKVLGCPAVAGEEEVDGYETDHQDYCEVCQQGGEIILCDTCPRAYHLVCLDPELDRAPEGKWSCPHCEKEGVQWEAKEEEEEYEEEGEEEGEKEEEDDHMEYCRVCKDGGELLCCDACISSYHIHCLNPPLPDIPNGEWLCPRCTCPVLKGRVQKILHWRWGEPPVAVPAPQQADGNPDVPPPRPLQGRSEREFFVKWVGLSYWHCSWAKELQLEIFHLVMYRNYQRKNDMDEPPPLDYGSGEDDGKSDKRKVKDPHYAEMEEKYYRFGIKPEWMTVHRIINHSVDKKGNYHYLVKWRDLPYDQSTWEEDEMNIPEYEEHKQSYWRHRELIMGEDPAQPRKYKKKKKELQGDGPPSSPTNDPTVKYETQPRFITATGGTLHMYQLEGLNWLRFSWAQGTDTILADEMGLGKTIQTIVFLYSLYKEGHTKGPFLVSAPLSTIINWEREFQMWAPKFYVVTYTGDKDSRAIIRENEFSFEDNAIKGGKKAFKMKREAQVKFHVLLTSYELITIDQAALGSIRWACLVVDEAHRLKNNQSKFFRVLNGYKIDHKLLLTGTPLQNNLEELFHLLNFLTPERFNNLEGFLEEFADISKEDQIKKLHDLLGPHMLRRLKADVFKNMPAKTELIVRVELSPMQKKYYKYILTRNFEALNSRGGGNQVSLLNIMMDLKKCCNHPYLFPVAAMESPKLPSGAYEGGALIKSSGKLMLLQKMLRKLKEQGHRVLIFSQMTKMLDLLEDFLDYEGYKYERIDGGITGALRQEAIDRFNAPGAQQFCFLLSTRAGGLGINLATADTVIIFDSDWNPHNDIQAFSRAHRIGQANKVMIYRFVTRASVEERITQVAKRKMMLTHLVVRPGLGSKAGSMSKQELDDILKFGTEELFKDENEGENKEEDSSVIHYDNEAIARLLDRNQDATEDTDVQNMNEYLSSFKVAQYVVREEDKIEEIEREIIKQEENVDPDYWEKLLRHHYEQQQEDLARNLGKGKRVRKQVNYNDAAQEDQDNQSEYSVGSEEEDEDFDERPEGRRQSKRQLRNEKDKPLPPLLARVGGNIEVLGFNTRQRKAFLNAVMRWGMPPQDAFTTQWLVRDLRGKTEKEFKAYVSLFMRHLCEPGADGSETFADGVPREGLSRQQVLTRIGVMSLVKKKVQEFEHINGRWSMPELMPDPSADSKRSSRASSPTKTSPTTPEASATNSPCTSKPATPAPSEKGEGIRTPLEKEEAENQEEKPEKNSRIGEKMETEADAPSPAPSLGERLEPRKIPLEDEVPGVPGEMEPEPGYRGDREKSATESTPGERGEEKPLDGQEHRERPEGETGDLGKREDVKGDRELRPGPRDEPRSNGRREEKTEKPRFMFNIADGGFTELHTLWQNEERAAISSGKLNEIWHRRHDYWLLAGIVLHGYARWQDIQNDAQFAIINEPFKTEANKGNFLEMKNKFLARRFKLLEQALVIEEQLRRAAYLNLSQEPAHPAMALHARFAEAECLAESHQHLSKESLAGNKPANAVLHKVLNQLEELLSDMKADVTRLPATLSRIPPIAARLQMSERSILSRLASKGTEPHPTPAYPPGPYATPPGYGAAFSAAPVGALAAAGANYSQMPAGSFITAATNGPPVLVKKEKEMVGALVSDGLDRKEPRAGEVICIDD

SEQ ID NO: 22569 - protein, 104 aa, Artificial Sequence
  Synthetic polypeptide
RRRRRRRRRRRRRWWCRRRKKRRKKRATRRRRRRWRRPTRTMRRTTTREYSGAGRATTGAATATAPPAATSSRRRRRRRHRCPRRRRPRRQIRMTFGCCRQHWV

SEQ ID NO: 22570 - protein, 41 aa, Artificial Sequence
  Synthetic polypeptide
GGGGGGGGGGGGDGGVGGGRRGGRRGRRGGGGGGGGGRRGR

SEQ ID NO: 22571 - protein, 1933 aa, Artificial Sequence
  Synthetic polypeptide
RLKEDSEEEFGSERDEYREKSESGGSEYGTGPGRKRRRKHREKKEKKTKRRKKGEGDGGQKQVEQKSSATLLLTWGLEDVEHVFSEEDYHTLTNYKAFSQFMRPLIAKKNPKIPMSKMMTILGAKWREFSANNPFKGSAAAVAAAAAAAAAAVAEQVSAAVSSATPIAPSGPPALPPPPAADIQPPPIRRAKTKEGKGPGHKRRSKSPRVPDGRKKLRGKKMAPLKIKLGLLGGKRKKGGSYVFQSDEGPEPEAEESDLDSGSVHSASGRPDGPVRTKKLKRGRPGRKKKKVLGCPAVAGEEEVDGYETDHQDYCEVCQQGGEIILCDTCPRAYHLVCLDPELDRAPEGKWSCPHCEKEGVQWEAKEEEEEYEEEGEEEGEKEEEDDHMEYCRVCKDGGELLCCDACISSYHIHCLNPPLPDIPNGEWLCPRCTCPVLKGRVQKILHWRWGEPPVAVPAPQQADGNPDVPPPRPLQGRSEREFFVKWVGLSYWHCSWAKELQLEIFHLVMYRNYQRKNDMDEPPPLDYGSGEDDGKSDKRKVKDPHYAEMEEKYYRFGIKPEWMTVHRIINHSVDKKGNYHYLVKWRDLPYDQSTWEEDEMNIPEYEEHKQSYWRHRELIMGEDPAQPRKYKKKKKELQGDGPPSSPTNDPTVKYETQPRFITATGGTLHMYQLEGLNWLRFSWAQGTDTILADEMGLGKTIQTIVFLYSLYKEGHTKGPFLVSAPLSTIINWEREFQMWAPKFYVVTYTGDKDSRAIIRENEFSFEDNAIKGGKKAFKMKREAQVKFHVLLTSYELITIDQAALGSIRWACLVVDEAHRLKNNQSKFFRVLNGYKIDHKLLLTGTPLQNNLEELFHLLNFLTPERFNNLEGFLEEFADISKEDQIKKLHDLLGPHMLRRLKADVFKNMPAKTELIVRVELSPMQKKYYKYILTRNFEALNSRGGGNQVSLLNIMMDLKKCCNHPYLFPVAAMESPKLPSGAYEGGALIKSSGKLMLLQKMLRKLKEQGHRVLIFSQMTKMLDLLEDFLDYEGYKYERIDGGITGALRQEAIDRFNAPGAQQFCFLLSTRAGGLGINLATADTVIIFDSDWNPHNDIQAFSRAHRIGQANKVMIYRFVTRASVEERITQVAKRKMMLTHLVVRPGLGSKAGSMSKQELDDILKFGTEELFKDENEGENKEEDSSVIHYDNEAIARLLDRNQDATEDTDVQNMNEYLSSFKVAQYVVREEDKIEEIEREIIKQEENVDPDYWEKLLRHHYEQQQEDLARNLGKGKRVRKQVNYNDAAQEDQDNQSEYSVGSEEEDEDFDERPEGRRQSKRQLRNEKDKPLPPLLARVGGNIEVLGFNTRQRKAFLNAVMRWGMPPQDAFTTQWLVRDLRGKTEKEFKAYVSLFMRHLCEPGADGSETFADGVPREGLSRQQVLTRIGVMSLVKKKVQEFEHINGRWSMPELMPDPSADSKRSSRASSPTKTSPTTPEASATNSPCTSKPATPAPSEKGEGIRTPLEKEEAENQEEKPEKNSRIGEKMETEADAPSPAPSLGERLEPRKIPLEDEVPGVPGEMEPEPGYRGDREKSATESTPGERGEEKPLDGQEHRERPEGETGDLGKREDVKGDRELRPGPRDEPRSNGRREEKTEKPRFMFNIADGGFTELHTLWQNEERAAISSGKLNEIWHRRHDYWLLAGIVLHGYARWQDIQNDAQFAIINEPFKTEANKGNFLEMKNKFLARRFKLLEQALVIEEQLRRAAYLNLSQEPAHPAMALHARFAEAECLAESHQHLSKESLAGNKPANAVLHKVLNQLEELLSDMKADVTRLPATLSRIPPIAARLQMSERSILSRLASKGTEPHPTPAYPPGPYATPPGYGAAFSAAPVGALAAAGANYSQMPAGSFITAATNGPPVLVKKEKEMVGALVSDGLDRKEPRAGEVICIDD

SEQ ID NO: 22572 - protein, 70 aa, Artificial Sequence
  Synthetic polypeptide
KRTVRRNLVLSEMSTGRSQRVGAVNMEPDRVGNEEGSTEKKRRRRQSGGKRGREMGGKSKWNRSHQQLCF

SEQ ID NO: 22573 - protein, 14 aa, Artificial Sequence
  Synthetic polypeptide
SYYHRIVVKIKRGQ

SEQ ID NO: 22574 - protein, 1899 aa, Artificial Sequence
  Synthetic polypeptide
RLKEDSEEEFGSERDEYREKSESGGSEYGTGPGRKRRRKHREKKEKKTKRRKKGEGDGGQKQVEQKSSATLLLTWGLEDVEHVFSEEDYHTLTNYKAFSQFMRPLIAKKNPKIPMSKMMTILGAKWREFSANNPFKGSAAAVAAAAAAAAAAVAEQVSAAVSSATPIAPSGPPALPPPPAADIQPPPIRRAKTKEGKGPGHKRRSKSPRVPDGRKKLRGKKMAPLKIKLGLLGGKRKKGGSYVFQSDEGPEPEAEESDLDSGSVHSASGRPDGPVRTKKLKRGRPGRKKKKVLGCPAVAGEEEVDGYETDHQDYCEVCQQGGEIILCDTCPRAYHLVCLDPELDRAPEGKWSCPHCEKEGVQWEAKEEEEEYEEEGEEEGEKEEEDDHMEYCRVCKDGGELLCCDACISSYHIHCLNPPLPDIPNGEWLCPRCTCPVLKGRVQKILHWRWGEPPVAVPAPQQADGNPDVPPPRPLQGRSEREFFVKWVGLSYWHCSWAKELQLEIFHLVMYRNYQRKNDMDEPPPLDYGSGEDDGKSDKRKVKDPHYAEMEEKYYRFGIKPEWMTVHRIINHSVDKKGNYHYLVKWRDLPYDQSTWEEDEMNIPEYEEHKQSYWRHRELIMGEDPAQPRKYKKKKKELQGDGPPSSPTNDPTVKYETQPRFITATGGTLHMYQLEGLNWLRFSWAQGTDTILADEMGLGKTIQTIVFLYSLYKEGHTKGPFLVSAPLSTIINWEREFQMWAPKFYVVTYTGDKDSRAIIRENEFSFEDNAIKGGKKAFKMKREAQVKFHVLLTSYELITIDQAALGSIRWACLVVDEAHRLKNNQSKFFRVLNGYKIDHKLLLTGTPLQNNLEELFHLLNFLTPERFNNLEGFLEEFADISKEDQIKKLHDLLGPHMLRRLKADVFKNMPAKTELIVRVELSPMQKKYYKYILTRNFEALNSRGGGNQVSLLNIMMDLKKCCNHPYLFPVAAMESPKLPSGAYEGGALIKSSGKLMLLQKMLRKLKEQGHRVLIFSQMTKMLDLLEDFLDYEGYKYERIDGGITGALRQEAIDRFNAPGAQQFCFLLSTRAGGLGINLATADTVIIFDSDWNPHNDIQAFSRAHRIGQANKVMIYRFVTRASVEERITQVAKRKMMLTHLVVRPGLGSKAGSMSKQELDDILKFGTEELFKDENEGENKEEDSSVIHYDNEAIARLLDRNQDATEDTDVQNMNEYLSSFKVAQYVVREEDKIEEIEREIIKQEENVDPDYWEKLLRHHYEQQQEDLARNLGKGKRVRKQVNYNDAAQEDQDNQSEYSVGSEEEDEDFDERPEGRRQSKRQLRNEKDKPLPPLLARVGGNIEVLGFNTRQRKAFLNAVMRWGMPPQDAFTTQWLVRDLRGKTEKEFKAYVSLFMRHLCEPGADGSETFADGVPREGLSRQQVLTRIGVMSLVKKKVQEFEHINGRWSMPELMPDPSADSKRSSRASSPTKTSPTTPEASATNSPCTSKPATPAPSEKGEGIRTPLEKEEAENQEEKPEKNSRIGEKMETEADAPSPAPSLGERLEPRKIPLEDEVPGVPGEMEPEPGYRGDREKSEDVKGDRELRPGPRDEPRSNGRREEKTEKPRFMFNIADGGFTELHTLWQNEERAAISSGKLNEIWHRRHDYWLLAGIVLHGYARWQDIQNDAQFAIINEPFKTEANKGNFLEMKNKFLARRFKLLEQALVIEEQLRRAAYLNLSQEPAHPAMALHARFAEAECLAESHQHLSKESLAGNKPANAVLHKVLNQLEELLSDMKADVTRLPATLSRIPPIAARLQMSERSILSRLASKGTEPHPTPAYPPGPYATPPGYGAAFSAAPVGALAAAGANYSQMPAGSFITAATNGPPVLVKKEKEMVGALVSDGLDRKEPRAGEVICIDD

SEQ ID NO: 22575 - protein, 1929 aa, Artificial Sequence
  Synthetic polypeptide
KSEEEFGSERDEYREKSESGGSEYGTGPGRKRRRKHREKKEKKTKRRKKGEGDGGQKQVEQKSSATLLLTWGLEDVEHVFSEEDYHTLTNYKAFSQFMRPLIAKKNPKIPMSKMMTILGAKWREFSANNPFKGSAAAVAAAAAAAAAAVAEQVSAAVSSATPIAPSGPPALPPPPAADIQPPPIRRAKTKEGKGPGHKRRSKSPRVPDGRKKLRGKKMAPLKIKLGLLGGKRKKGGSYVFQSDEGPEPEAEESDLDSGSVHSASGRPDGPVRTKKLKRGRPGRKKKKVLGCPAVAGEEEVDGYETDHQDYCEVCQQGGEIILCDTCPRAYHLVCLDPELDRAPEGKWSCPHCEKEGVQWEAKEEEEEYEEEGEEEGEKEEEDDHMEYCRVCKDGGELLCCDACISSYHIHCLNPPLPDIPNGEWLCPRCTCPVLKGRVQKILHWRWGEPPVAVPAPQQADGNPDVPPPRPLQGRSEREFFVKWVGLSYWHCSWAKELQLEIFHLVMYRNYQRKNDMDEPPPLDYGSGEDDGKSDKRKVKDPHYAEMEEKYYRFGIKPEWMTVHRIINHSVDKKGNYHYLVKWRDLPYDQSTWEEDEMNIPEYEEHKQSYWRHRELIMGEDPAQPRKYKKKKKELQGDGPPSSPTNDPTVKYETQPRFITATGGTLHMYQLEGLNWLRFSWAQGTDTILADEMGLGKTIQTIVFLYSLYKEGHTKGPFLVSAPLSTIINWEREFQMWAPKFYVVTYTGDKDSRAIIRENEFSFEDNAIKGGKKAFKMKREAQVKFHVLLTSYELITIDQAALGSIRWACLVVDEAHRLKNNQSKFFRVLNGYKIDHKLLLTGTPLQNNLEELFHLLNFLTPERFNNLEGFLEEFADISKEDQIKKLHDLLGPHMLRRLKADVFKNMPAKTELIVRVELSPMQKKYYKYILTRNFEALNSRGGGNQVSLLNIMMDLKKCCNHPYLFPVAAMESPKLPSGAYEGGALIKSSGKLMLLQKMLRKLKEQGHRVLIFSQMTKMLDLLEDFLDYEGYKYERIDGGITGALRQEAIDRFNAPGAQQFCFLLSTRAGGLGINLATADTVIIFDSDWNPHNDIQAFSRAHRIGQANKVMIYRFVTRASVEERITQVAKRKMMLTHLVVRPGLGSKAGSMSKQELDDILKFGTEELFKDENEGENKEEDSSVIHYDNEAIARLLDRNQDATEDTDVQNMNEYLSSFKVAQYVVREEDKIEEIEREIIKQEENVDPDYWEKLLRHHYEQQQEDLARNLGKGKRVRKQVNYNDAAQEDQDNQSEYSVGSEEEDEDFDERPEGRRQSKRQLRNEKDKPLPPLLARVGGNIEVLGFNTRQRKAFLNAVMRWGMPPQDAFTTQWLVRDLRGKTEKEFKAYVSLFMRHLCEPGADGSETFADGVPREGLSRQQVLTRIGVMSLVKKKVQEFEHINGRWSMPELMPDPSADSKRSSRASSPTKTSPTTPEASATNSPCTSKPATPAPSEKGEGIRTPLEKEEAENQEEKPEKNSRIGEKMETEADAPSPAPSLGERLEPRKIPLEDEVPGVPGEMEPEPGYRGDREKSATESTPGERGEEKPLDGQEHRERPEGETGDLGKREDVKGDRELRPGPRDEPRSNGRREEKTEKPRFMFNIADGGFTELHTLWQNEERAAISSGKLNEIWHRRHDYWLLAGIVLHGYARWQDIQNDAQFAIINEPFKTEANKGNFLEMKNKFLARRFKLLEQALVIEEQLRRAAYLNLSQEPAHPAMALHARFAEAECLAESHQHLSKESLAGNKPANAVLHKVLNQLEELLSDMKADVTRLPATLSRIPPIAARLQMSERSILSRLASKGTEPHPTPAYPPGPYATPPGYGAAFSAAPVGALAAAGANYSQMPAGSFITAATNGPPVLVKKEKEMVGALVSDGLDRKEPRAGEVICIDD

SEQ ID NO: 22576 - protein, 79 aa, Artificial Sequence
  Synthetic polypeptide
SYYHRIVVKIKRVRRNLVLSEMSTGRSQRVGAVNMEPDRVGNEEGSTEKKRRRRQSGGKRGREMGGKSKWNRSHQQLCF

SEQ ID NO: 22577 - protein, 1895 aa, Artificial Sequence
  Synthetic polypeptide
KSEEEFGSERDEYREKSESGGSEYGTGPGRKRRRKHREKKEKKTKRRKKGEGDGGQKQVEQKSSATLLLTWGLEDVEHVFSEEDYHTLTNYKAFSQFMRPLIAKKNPKIPMSKMMTILGAKWREFSANNPFKGSAAAVAAAAAAAAAAVAEQVSAAVSSATPIAPSGPPALPPPPAADIQPPPIRRAKTKEGKGPGHKRRSKSPRVPDGRKKLRGKKMAPLKIKLGLLGGKRKKGGSYVFQSDEGPEPEAEESDLDSGSVHSASGRPDGPVRTKKLKRGRPGRKKKKVLGCPAVAGEEEVDGYETDHQDYCEVCQQGGEIILCDTCPRAYHLVCLDPELDRAPEGKWSCPHCEKEGVQWEAKEEEEEYEEEGEEEGEKEEEDDHMEYCRVCKDGGELLCCDACISSYHIHCLNPPLPDIPNGEWLCPRCTCPVLKGRVQKILHWRWGEPPVAVPAPQQADGNPDVPPPRPLQGRSEREFFVKWVGLSYWHCSWAKELQLEIFHLVMYRNYQRKNDMDEPPPLDYGSGEDDGKSDKRKVKDPHYAEMEEKYYRFGIKPEWMTVHRIINHSVDKKGNYHYLVKWRDLPYDQSTWEEDEMNIPEYEEHKQSYWRHRELIMGEDPAQPRKYKKKKKELQGDGPPSSPTNDPTVKYETQPRFITATGGTLHMYQLEGLNWLRFSWAQGTDTILADEMGLGKTIQTIVFLYSLYKEGHTKGPFLVSAPLSTIINWEREFQMWAPKFYVVTYTGDKDSRAIIRENEFSFEDNAIKGGKKAFKMKREAQVKFHVLLTSYELITIDQAALGSIRWACLVVDEAHRLKNNQSKFFRVLNGYKIDHKLLLTGTPLQNNLEELFHLLNFLTPERFNNLEGFLEEFADISKEDQIKKLHDLLGPHMLRRLKADVFKNMPAKTELIVRVELSPMQKKYYKYILTRNFEALNSRGGGNQVSLLNIMMDLKKCCNHPYLFPVAAMESPKLPSGAYEGGALIKSSGKLMLLQKMLRKLKEQGHRVLIFSQMTKMLDLLEDFLDYEGYKYERIDGGITGALRQEAIDRFNAPGAQQFCFLLSTRAGGLGINLATADTVIIFDSDWNPHNDIQAFSRAHRIGQANKVMIYRFVTRASVEERITQVAKRKMMLTHLVVRPGLGSKAGSMSKQELDDILKFGTEELFKDENEGENKEEDSSVIHYDNEAIARLLDRNQDATEDTDVQNMNEYLSSFKVAQYVVREEDKIEEIEREIIKQEENVDPDYWEKLLRHHYEQQQEDLARNLGKGKRVRKQVNYNDAAQEDQDNQSEYSVGSEEEDEDFDERPEGRRQSKRQLRNEKDKPLPPLLARVGGNIEVLGFNTRQRKAFLNAVMRWGMPPQDAFTTQWLVRDLRGKTEKEFKAYVSLFMRHLCEPGADGSETFADGVPREGLSRQQVLTRIGVMSLVKKKVQEFEHINGRWSMPELMPDPSADSKRSSRASSPTKTSPTTPEASATNSPCTSKPATPAPSEKGEGIRTPLEKEEAENQEEKPEKNSRIGEKMETEADAPSPAPSLGERLEPRKIPLEDEVPGVPGEMEPEPGYRGDREKSEDVKGDRELRPGPRDEPRSNGRREEKTEKPRFMFNIADGGFTELHTLWQNEERAAISSGKLNEIWHRRHDYWLLAGIVLHGYARWQDIQNDAQFAIINEPFKTEANKGNFLEMKNKFLARRFKLLEQALVIEEQLRRAAYLNLSQEPAHPAMALHARFAEAECLAESHQHLSKESLAGNKPANAVLHKVLNQLEELLSDMKADVTRLPATLSRIPPIAARLQMSERSILSRLASKGTEPHPTPAYPPGPYATPPGYGAAFSAAPVGALAAAGANYSQMPAGSFITAATNGPPVLVKKEKEMVGALVSDGLDRKEPRAGEVICIDD

SEQ ID NO: 22578 - protein, 939 aa, Artificial Sequence
  Synthetic polypeptide
GQTWWLTPVIPALWEAEAGRSLEMTKMLDLLEDFLDYEGYKYERIDGGITGALRQEAIDRFNAPGAQQFCFLLSTRAGGLGINLATADTVIIFDSDWNPHNDIQAFSRAHRIGQANKVMIYRFVTRASVEERITQVAKRKMMLTHLVVRPGLGSKAGSMSKQELDDILKFGTEELFKDENEGENKEEDSSVIHYDNEAIARLLDRNQDATEDTDVQNMNEYLSSFKVAQYVVREEDKIEEIEREIIKQEENVDPDYWEKLLRHHYEQQQEDLARNLGKGKRVRKQVNYNDAAQEDQDNQSEYSVGSEEEDEDFDERPEGRRQSKRQLRNEKDKPLPPLLARVGGNIEVLGFNTRQRKAFLNAVMRWGMPPQDAFTTQWLVRDLRGKTEKEFKAYVSLFMRHLCEPGADGSETFADGVPREGLSRQQVLTRIGVMSLVKKKVQEFEHINGRWSMPELMPDPSADSKRSSRASSPTKTSPTTPEASATNSPCTSKPATPAPSEKGEGIRTPLEKEEAENQEEKPEKNSRIGEKMETEADAPSPAPSLGERLEPRKIPLEDEVPGVPGEMEPEPGYRGDREKSATESTPGERGEEKPLDGQEHRERPEGETGDLGKREDVKGDRELRPGPRDEPRSNGRREEKTEKPRFMFNIADGGFTELHTLWQNEERAAISSGKLNEIWHRRHDYWLLAGIVLHGYARWQDIQNDAQFAIINEPFKTEANKGNFLEMKNKFLARRFKLLEQALVIEEQLRRAAYLNLSQEPAHPAMALHARFAEAECLAESHQHLSKESLAGNKPANAVLHKVLNQLEELLSDMKADVTRLPATLSRIPPIAARLQMSERSILSRLASKGTEPHPTPAYPPGPYATPPGYGAAFSAAPVGALAAAGANYSQMPAGSFITAATNGPPVLVKKEKEMVGALVSDGLDRKEPRAGEVICIDD

SEQ ID NO: 22579 - protein, 14 aa, Artificial Sequence
  Synthetic polypeptide
SQHFGRPRQEDHLR

SEQ ID NO: 22580 - protein, 905 aa, Artificial Sequence
  Synthetic polypeptide
GQTWWLTPVIPALWEAEAGRSLEMTKMLDLLEDFLDYEGYKYERIDGGITGALRQEAIDRFNAPGAQQFCFLLSTRAGGLGINLATADTVIIFDSDWNPHNDIQAFSRAHRIGQANKVMIYRFVTRASVEERITQVAKRKMMLTHLVVRPGLGSKAGSMSKQELDDILKFGTEELFKDENEGENKEEDSSVIHYDNEAIARLLDRNQDATEDTDVQNMNEYLSSFKVAQYVVREEDKIEEIEREIIKQEENVDPDYWEKLLRHHYEQQQEDLARNLGKGKRVRKQVNYNDAAQEDQDNQSEYSVGSEEEDEDFDERPEGRRQSKRQLRNEKDKPLPPLLARVGGNIEVLGFNTRQRKAFLNAVMRWGMPPQDAFTTQWLVRDLRGKTEKEFKAYVSLFMRHLCEPGADGSETFADGVPREGLSRQQVLTRIGVMSLVKKKVQEFEHINGRWSMPELMPDPSADSKRSSRASSPTKTSPTTPEASATNSPCTSKPATPAPSEKGEGIRTPLEKEEAENQEEKPEKNSRIGEKMETEADAPSPAPSLGERLEPRKIPLEDEVPGVPGEMEPEPGYRGDREKSEDVKGDRELRPGPRDEPRSNGRREEKTEKPRFMFNIADGGFTELHTLWQNEERAAISSGKLNEIWHRRHDYWLLAGIVLHGYARWQDIQNDAQFAIINEPFKTEANKGNFLEMKNKFLARRFKLLEQALVIEEQLRRAAYLNLSQEPAHPAMALHARFAEAECLAESHQHLSKESLAGNKPANAVLHKVLNQLEELLSDMKADVTRLPATLSRIPPIAARLQMSERSILSRLASKGTEPHPTPAYPPGPYATPPGYGAAFSAAPVGALAAAGANYSQMPAGSFITAATNGPPVLVKKEKEMVGALVSDGLDRKEPRAGEVICIDD

SEQ ID NO: 22581 - protein, 71 aa, Artificial Sequence
  Synthetic polypeptide
AQQDEAADSRERSVGGVHPGGGPGDGSAGAAVSGLPDLTVLLHPQVCPGCRHHHGRGPAVRHQDLQDALAC

SEQ ID NO: 22582 - protein, 269 aa, Artificial Sequence
  Synthetic polypeptide
WALWYTLVIPFTLEAEAGESLEPSRMRLQTAVNAQSGVCTPAGGLVTGVLVLLSLDYLTSLFYYIPKSALAAVIIMAVAPLFDTKIFRTLWRVKRLDLLPLCVTFLLCFWEVQYGILAGALVSLLMLLHSAARPETKVSEGPVLVLQPASGLSFPAMEALREEILSRALEVSPPRCLVLECTHVCSIDYTVVLGLGELLQDFQKQGVALAFVGLQVPVLRVLLSADLKGFQYFSTLEEAEKHLRQEPGTQPYNIREDSILDQKVALLKA

SEQ ID NO: 22583 - protein, 5 aa, Artificial Sequence
  Synthetic polypeptide
GCRQP

SEQ ID NO: 22584 - protein, 47 aa, Artificial Sequence
  Synthetic polypeptide
MVQLPHWDSAEEAAAGPEWTAPAGAGQSASSVQGGNGRTRGTATAGG

SEQ ID NO: 22585 - protein, 460 aa, Artificial Sequence
  Synthetic polypeptide
WVQNDRWSSSLTGTVLRKQLQDLSGQHQQELASQLAQFKVEMAEREERQQQVAEDYELRLAREQARVCELQSGNQQLEEQRVELVERLQAMLQAHWDEANQLLSTTLPPPNPPAPPAGPSSPGPQEPEKEERRVWTMPPMAVALKPVLQQSREARDELPGAPPVLCSSSSDLSLLLGPSFQSQHSFQPLEPKPDLTSSTAGAFSALGAFHPDHRAERPFPEEDPGPDGEGLLKQGLPPAQLEGLKNFLHQLLETVPQNNENPSVDLLPPKSGPLTVPSWEEAPQVPRIPPPVHKTKVPLAMASSLFRVPEPPSSHSQGSGPSSGSPERGGDGLTFPRQLMEVSQLLRLYQARGWGALPAEDLLLYLKRLEHSGYKPGRKEEGFSGWKLDYGEWSGTDGRGDNVPRRNTDSRLGEIPRKEIPSQAVPRRLATAPKTEKPPARKKSGHPAPSSMRSRGGVWR

SEQ ID NO: 22586 - protein, 438 aa, Artificial Sequence
  Synthetic polypeptide
WVQNDRWSSSLTGTVLRKQLQDLSGQHQQELASQLAQFKVEMAEREERQQQVAEDYELRLAREQARVCELQSGNQQLEEQRVELVERLQAMLQAHWDEANQLLSTTLPPPNPPAPPAGPSSPGPQEPEKEERRVWTMPPMAVALKPVLQQSREARDELPGAPPVLCSSSSDLSLLLGPSFQSQHSFQPLEPKPDLTSSTAGAFSALGAFHPDHRAERPFPEEDPGPDGEGLLKQGLPPAQLEGLKNFLHQLLETVPQNNENPSVDLLPPKSGPLTVPSWEEAPQVPRIPPPVHKTKVPLAMASSLFRVPEPPSSHSQGSGPSSGSPERGGDGLTFPRQLMEVSQLLRLYQARGWGALPAEDLLLYLKRLEHSGTDGRGDNVPRRNTDSRLGEIPRKEIPSQAVPRRLATAPKTEKPPARKKSGHPAPSSMRSRGGVWR

SEQ ID NO: 22587 - protein, 89 aa, Artificial Sequence
  Synthetic polypeptide
WVQNDRWSSSLTGTVLRKQLQDLSGQHQQELASQLAQFKVEMAEREERQQQVAEDYELRLLLLDPPAPGLRSPRRRRGGSGLCLPWPWP

SEQ ID NO: 22588 - protein, 439 aa, Artificial Sequence
  Synthetic polypeptide
WVQNDRWSSSLTGTVLRKQLQDLSGQHQQELASQLAQFKVEMAEREERQQQVAEDYELRLAREQARVCELQSGNQQLEEQRVELVERLQAMLQAHWDEANQLLSTTLPPPNPPAPPAGPSSPGPQEPEKEERRVWTMPPMAVALKPVLQQSREARDELPGAPPVLCSSSSDLSLLLGPSFQSQHSFQPLEPKPDLTSSTAGAFSALGAFHPDHRAERPFPEEDPGPDGEGLLKQGLPPAQLEGLKNFLHQLLETVPQNNENPSVDLLPPKSGPLTVPSWEEAPQVPRIPPPVHKTKVPLAMASSLFRVPEPPSSHSQGSGPSSGSPERGGDGLTFPRQLMEVSQLLRLYQARGWGALPAEDLLLYLKRLEHSGRTDGRGDNVPRRNTDSRLGEIPRKEIPSQAVPRRLATAPKTEKPPARKKSGHPAPSSMRSRGGVWR

SEQ ID NO: 22589 - protein, 43 aa, Artificial Sequence
  Synthetic polypeptide
RDEDSQCCLSFVPECWCGPSRCGEDHALCTLGMLDRPGTSRAL

SEQ ID NO: 22590 - protein, 57 aa, Artificial Sequence
  Synthetic polypeptide
DWTLLIDSMESGNVNVMKTVSVALVLCLNVGVDPPDVVKTTPCARLECWIGPVQAEP

SEQ ID NO: 22591 - protein, 70 aa, Artificial Sequence
  Synthetic polypeptide
RDEDSQCCLSFVPECWCGPSRCGEDHALCTLGMLDRSSVDGSSESSGNHRCKFTEAVRELAAKGPVQAEP

SEQ ID NO: 22592 - protein, 341 aa, Artificial Sequence
  Synthetic polypeptide
DWTLLIDSMESGNVNVMKTVSVALVLCLNVGVDPPDVVKTTPCARLECWIDPLSMGPQKALETIGANLQKQYENWQPRARYKQSLDPTVDEVKKLCTSLRRNAKEERVLFHYNGHGVPRPTVNGEVWVFNKNYTQYIPLSIYDLQTWMGSPSIFVYDCSNAGLIVKSFKQFALQREQELEVAAINPNHPLAQMPLPPSMKNCIQLAACEATELLPMIPDLPADLFTSCLTTPIKIALRWFCMQKCVSLVPGVTLDLIEKIPGRLNDRRTPLGELNWIFTAITDTIAWNVLPRDLFQKLFRQDLLVASLFRNFLLAERIMRSYNCTPVSSPRLPPTYMHAMW

SEQ ID NO: 22593 - protein, 1297 aa, Artificial Sequence
  Synthetic polypeptide
DWTLLIDSMESGNVNVMKTVSVALVLCLNVGVDPPDVVKTTPCARLECWIDPLSMGPQKALETIGANLQKQYENWQPRARYKQSLDPTVDEVKKLCTSLRRNAKEERVLFHYNGHGVPRPTVNGEVWVFNKNYTQYIPLSIYDLQTWMGSPSIFVYDCSNAGLIVKSFKQFALQREQELEVAAINPNHPLAQMPLPPSMKNCIQLAACEATELLPMIPDLPADLFTSCLTTPIKIALRWFCMQKCVSLVPGVTLDLIEKIPGRLNDRRTPLGELNWIFTAITDTIAWNVLPRDLFQKLFRQDLLVASLFRNFLLAERIMRSYNCTPVSSPRLPPTYMHAMWQAWDLAVDICLSQLPTIIEEGTAFRHSPFFAEQLTAFQVWLTMGVENRNPPEQLPIVLQVLLSQVHRLRALDLLGRFLDLGPWAVSLALSVGIFPYVLKLLQSSARELRPLLVFIWAKILAVDSSCQADLVKDNGHKYFLSVLADPYMPAEHRTMTAFILAVIVNSYHTGQEACLQGNLIAICLEQLNDPHPLLRQWVAICLGRIWQNFDSARWCGVRDSAHEKLYSLLSDPIPEVRCAAVFALGTFVGNSAERTDHSTTIDHNVAMMLAQLVSDGSPMVRKELVVALSHLVVQYESNFCTVALQFIEEEKNYALPSPATTEGGSLTPVRDSPCTPRLRSVSSYGNIRAVATARSLNKSLQNLSLTEESGGAVAFSPGNLSTSSSASSTLGSPENEEHILSFETIDKMRRASSYSSLNSLIGVSFNSVYTQIWRVLLHLAADPYPEVSDVAMKVLNSIAYKATVNARPQRVLDTSSLTQSAPASPTNKGVHIHQAGGSPPASSTSSSSLTNDVAKQPVSRDLPSGRPGTTGPAGAQYTPHSHQFPRTRKMFDKGPEQTADDADDAAGHKSFISATVQTGFCDWSARYFAQPVMKIPEEHDLESQIRKEREWRFLRNSRVRRQAQQVIQKGITRLDDQIFLNRNPGVPSVVKFHPFTPCIAVADKDSICFWDWEKGEKLDYFHNGNPRYTRVTAMEYLNGQDCSLLLTATDDGAIRVWKNFADLEKNPEMVTAWQGLSDMLPTTRGAGMVVDWEQETGLLMSSGDVRIVRIWDTDREMKVQDIPTGADSCVTSLSCDSHRSLIVAGLGDGSIRVYDRRMALSECRVMTYREHTAWVVKASLQKRPDGHIVSVSVNGDVRIFDPRMPESVNVLQIVKGLTALDIHPQADLIACGSVNQFTAIYNSSGELINNIKYYDGFMGQRVGAISCLAFHPHWPHLAVGSNDYYISVYSVEKRVR

SEQ ID NO: 22594 - protein, 1139 aa, Artificial Sequence
  Synthetic polypeptide
DWTLLIDSMESGNVNVMKTVSVALVLCLNVGVDPPDVVKTTPCARLECWIDPLSMGPQKALETIGANLQKQYENWQPRARYKQSLDPTVDEVKKLCTSLRRNAKEERVLFHYNGHGVPRPTVNGEVWVFNKNYTQYIPLSIYDLQTWMGSPSIFVYDCSNAGLIVKSFKQFALQREQELEVAAINPNHPLAQMPLPPSMKNCIQLAACEATELLPMIPDLPADLFTSCLTTPIKIALRWFCMQKCVSLVPGVTLDLIEKIPGRLNDRRTPLGELNWIFTAITDTIAWNVLPRDLFQKLFRQDLLVASLFRNFLLAERIMRSYNCTPVSSPRLPPTYMHAMWQAWDLAVDICLSQLPTIIEEGTAFRHSPFFAEQLTAFQVWLTMGVENRNPPEQLPIVLQVLLSQVHRLRALDLLGRFLDLGPWAVSLALSVGIFPYVLKLLQSSARELRPLLVFIWAKILAVDSELVVALSHLVVQYESNFCTVALQFIEEEKNYALPSPATTEGGSLTPVRDSPCTPRLRSVSSYGNIRAVATARSLNKSLQNLSLTEESGGAVAFSPGNLSTSSSASSTLGSPENEEHILSFETIDKMRRASSYSSLNSLIGVSFNSVYTQIWRVLLHLAADPYPEVSDVAMKVLNSIAYKATVNARPQRVLDTSSLTQSAPASPTNKGVHIHQAGGSPPASSTSSSSLTNDVAKQPVSRDLPSGRPGTTGPAGAQYTPHSHQFPRTRKMFDKGPEQTADDADDAAGHKSFISATVQTGFCDWSARYFAQPVMKIPEEHDLESQIRKEREWRFLRNSRVRRQAQQVIQKGITRLDDQIFLNRNPGVPSVVKFHPFTPCIAVADKDSICFWDWEKGEKLDYFHNGNPRYTRVTAMEYLNGQDCSLLLTATDDGAIRVWKNFADLEKNPEMVTAWQGLSDMLPTTRGAGMVVDWEQETGLLMSSGDVRIVRIWDTDREMKVQDIPTGADSCVTSLSCDSHRSLIVAGLGDGSIRVYDRRMALSECRVMTYREHTAWVVKASLQKRPDGHIVSVSVNGDVRIFDPRMPESVNVLQIVKGLTALDIHPQADLIACGSVNQFTAIYNSSGELINNIKYYDGFMGQRVGAISCLAFHPHWPHLAVGSNDYYISVYSVEKRVR

SEQ ID NO: 22595 - protein, 68 aa, Artificial Sequence
  Synthetic polypeptide
NEKNATMSSVSEDVKQLGLSYLASGRQNRATLARTVSQGLRKFSTQFITLWAGRFIPRHSWRAAPRSP

SEQ ID NO: 22596 - protein, 95 aa, Artificial Sequence
  Synthetic polypeptide
SSWDSRTLRVGGKTVPPSRELCLRVLESSAHNSLPCGPADSFLGTVGGQLPGLHEYGAVGGSTHTATAAMWACQHCTFMNQPGTGHCEMCSLPRT

SEQ ID NO: 22597 - protein, 79 aa, Artificial Sequence
  Synthetic polypeptide
SSWDSRTLRVGGKTVPPSRELCLRVLESSAHNSLPCGPADSFLGTVGGQLPGLHEYGAVGGSTHTATAAMWACQHCTFM

SEQ ID NO: 22598 - protein, 108 aa, Artificial Sequence
  Synthetic polypeptide
NEKNATMSSVSEDVKQLGLSYLASGRQNRATLARTVSQGLRKFSTQFITLWAGRFIPSLPSSWDYRCAPPPPGTVGGQLPGLHEYGAVGGSTHTATAAMWACQHCTFM

SEQ ID NO: 22599 - protein, 93 aa, Artificial Sequence
  Synthetic polypeptide
SSWDSRTLRVGGKTVPPSRELCLRVLESSAHNSLPCGPADSFLAFLVAGITGAHHHPQAQLAGSSQVSMSTAPSGAPHTRPLQPCGPVSTARS

SEQ ID NO: 22600 - protein, 116 aa, Artificial Sequence
  Synthetic polypeptide
NEKNATMSSVSEDVKQLGLSYLASGRQNRATLARTVSQGLRKFSTQFITLWAGRFIPRFTPFSFLSLPSSWDYRCAPPPPGTVGGQLPGLHEYGAVGGSTHTATAAMWACQHCTFM

SEQ ID NO: 22601 - protein, 101 aa, Artificial Sequence
  Synthetic polypeptide
SSWDSRTLRVGGKTVPPSRELCLRVLESSAHNSLPCGPADSFLGSRHSPSSAFLVAGITGAHHHPQAQLAGSSQVSMSTAPSGAPHTRPLQPCGPVSTARS

SEQ ID NO: 22602 - protein, 63 aa, Artificial Sequence
  Synthetic polypeptide
LTPVIPALWEAEAVDHLRSGVRDSQANMAQLAGSSQVSMSTAPSGAPHTRPLQPCGPVSTARS

SEQ ID NO: 22603 - protein, 21 aa, Artificial Sequence
  Synthetic polypeptide
GQEFETARPTWHSWRAAPRSP

SEQ ID NO: 22604 - protein, 84 aa, Artificial Sequence
  Synthetic polypeptide
SGMVAHACNPSTLGGRGGGSFEVRSSRQPGQHGTVGGQLPGLHEYGAVGGSTHTATAAMWACQHCTFMNQPGTGHCEMCSLPRT

SEQ ID NO: 22605 - protein, 68 aa, Artificial Sequence
  Synthetic polypeptide
SGMVAHACNPSTLGGRGGGSFEVRSSRQPGQHGTVGGQLPGLHEYGAVGGSTHTATAAMWACQHCTFM

SEQ ID NO: 22606 - protein, 36 aa, Artificial Sequence
  Synthetic polypeptide
DQPTQHSEAPSVQKNNIKKKRISWAWHSWRAAPRSP

SEQ ID NO: 22607 - protein, 93 aa, Artificial Sequence
  Synthetic polypeptide
HSRRPKLEDTVAQKCETSPHSIVKPRLYKKTILKKKELAGHGTVGGQLPGLHEYGAVGGSTHTATAAMWACQHCTFMNQPGTGHCEMCSLPRT

SEQ ID NO: 22608 - protein, 38 aa, Artificial Sequence
  Synthetic polypeptide
LGMAQLAGSSQVSMSTAPSGAPHTRPLQPCGPVSTARS

SEQ ID NO: 22609 - protein, 77 aa, Artificial Sequence
  Synthetic polypeptide
HSRRPKLEDTVAQKCETSPHSIVKPRLYKKTILKKKELAGHGTVGGQLPGLHEYGAVGGSTHTATAAMWACQHCTFM

SEQ ID NO: 22610 - protein, 77 aa, Artificial Sequence
  Synthetic polypeptide
GRGRWLMPVIPALWEAEAGGSRGQEIETILAKKVWGRHPWNGRPGNRHHSHLPLGGLQPPGAARAGPIWHHLARGPA

SEQ ID NO: 22611 - protein, 62 aa, Artificial Sequence
  Synthetic polypeptide
SQHFGRPRRADHEVRRSRPFWLRRFGDDIPGMEGLGTDITVICPWEAFNHLELHELAQYGII

SEQ ID NO: 22612 - protein, 45 aa, Artificial Sequence
  Synthetic polypeptide
EGLGTTSLEWKAWEQTSQSSALGRPSTTWSCTSWPNMASSSTRPC

SEQ ID NO: 22613 - protein, 72 aa, Artificial Sequence
  Synthetic polypeptide
GRGRWLMPVIPALWEAEAGGSRGQEIETILAKKVWGRHPWNGRPGNRHHSHLPLGGLQPPGAARAGPIWHHL

SEQ ID NO: 22614 - protein, 40 aa, Artificial Sequence
  Synthetic polypeptide
EGLGTTSLEWKAWEQTSQSSALGRPSTTWSCTSWPNMASS

SEQ ID NO: 22615 - protein, 12 aa, Artificial Sequence
  Synthetic polypeptide
NPVSTKICDGRL

SEQ ID NO: 22616 - protein, 104 aa, Artificial Sequence
  Synthetic polypeptide
HGETPSLLKFVMDASDPTQLSASCVQLLGLLSAEQLAEASVLILFNKIDLPCYMSTEEMKSLIRLPDIIACAKQNITTAEISAREGTGLAGVLAWLQATHRAND

SEQ ID NO: 22617 - protein, 102 aa, Artificial Sequence
  Synthetic polypeptide
GRARWLTPVIPALWEAELSASCVQLLGLLSAEQLAEASVLILFNKIDLPCYMSTEEMKSLIRLPDIIACAKQNITTAEISAREGTGLAGVLAWLQATHRAND

SEQ ID NO: 22618 - protein, 16 aa, Artificial Sequence
  Synthetic polypeptide
SQHFGKLSSLHPVCSS

SEQ ID NO: 22619 - protein, 777 aa, Artificial Sequence
  Synthetic polypeptide
SLMFKSESASVSDKATSQLLLETDWESILQICDLIRQGDTQAKYAVNSIKKKVNDKNPHVALYALEVMESVVKNCGQTVHDEVANKQTMEELKDLLKRQVEVNVRNKILYLIQAWAHAFRNEPKYKVVQDTYQIMKVEGHVFPEFKESDAMFAAERAPDWVDAEECHRCRVQFGVMTRKHHCRACGQIFCGKCSSKYSTIPKFGIEKEVRVCEPCYEQLNRKAEGKATSTTELPPEYLTSPLSQQSQLPPKRDETALQEEEELQLALALSQSEAEEKERLRQKSTYTSYPKAEPMPSASSAPPASSLYSSPVNSSAPLAEDIDPELARYLNRNYWEKKQEEARKSPTPSAPVPLTEPAAQPGEGHAAPTNVVENPLPETDSQPIPPSGGPFSEPQFHNGESEESHEQFLKALQNAVTTFVNRMKSNHMRGRSITNDSAVLSLFQSINGMHPQLLELLNQLDERRLYYEGLQDKLAQIRDARGALSALREEHREKLRRAAEEAERQRQIQLAQKLEIMRQKKQEYLEVQRQLAIQRLQEQEKERQMRLEQQKQTVQMRAQMPAFPLPYAQLQAMPAAGGVLYQPSGPASFPSTFSPAGSVEGSPMHGVYMSQPAPAAGPYPSMPSTAADPSMVSAYMYPAGATGAQAAPQAQAGPTASPAYSSYQPTPTAGYQNVASQAPQSLPAISQPPQSSTMGYMGSQSVSMGYQPYNMQNLMTTLPSQDASLPPQQPYIAGQQPMYQQMAPSGGPPQQQPPVAQQPQAQGPPAQGSEAQLISFD

SEQ ID NO: 22620 - protein, 31 aa, Artificial Sequence
  Synthetic polypeptide
CLRVNQPLSLTRRPASSCWRQIGSPFCRSAT

SEQ ID NO: 22621 - protein, 263 aa, Artificial Sequence
  Synthetic polypeptide
SLMFKSESASVSDKATSQLLLETDWESILQICDLIRQGDTQAKYAVNSIKKKVNDKNPHVALYALEVMESVVKNCGQTVHDEVANKQTMEELKDLLKAWAHAFRNEPKYKVVQDTYQIMKVEGHVFPEFKESDAMFAAERAPDWVDAEECHRCRVQFGVMTRKHHCRACGQIFCGKCSSKYSTIPKFGIEKEVRVCEPCYEQLNRKAEGKATSTTELPPEYLTSPLSQQSQLPPKRDETALQEEEELQLALALSQSEAEEKER

SEQ ID NO: 22622 - protein, 173 aa, Artificial Sequence
  Synthetic polypeptide
SQHIGRLRQVGHEVRSSRPACQDDPSMVSAYMYPAGATGAQAAPQAQAGPTASPAYSSYQPTPTAGYQNVASQAPQSLPAISQPPQSSTMGYMGSQSVSMGYQPYNMQNLMTTLPSQDASLPPQQPYIAGQQPMYQQMAPSGGPPQQQPPVAQQPQAQGPPAQGSEAQLISFD

SEQ ID NO: 22623 - protein, 20 aa, Artificial Sequence
  Synthetic polypeptide
GRWVMRSGVQDQPARMIPAW

SEQ ID NO: 22624 - protein, 16 aa, Artificial Sequence
  Synthetic polypeptide
PDVVVHAPVVPATREG

SEQ ID NO: 22625 - protein, 120 aa, Artificial Sequence
  Synthetic polypeptide
SQLLEKGDLEQVGRFIRTRKVSLATIHPSGLAALHEAVLSGNLECVKLLVKYGADIHQRDEAGWTPLHIACSDGYPDIARYLISLGADRDATNDDGDLPSDLIDPDYKELVELFKGTTMD

SEQ ID NO: 22626 - protein, 73 aa, Artificial Sequence
  Synthetic polypeptide
DQPGQYGETPSLLKIQKLARRGGACPCSPSYSRRVTWSRWGASSGLGKSPWPPSTPQAWPPCMKPCSLETWNA

SEQ ID NO: 22627 - protein, 80 aa, Artificial Sequence
  Synthetic polypeptide
SQLLEKGDLEQVGRFIRTRKVSLATIHPSGLAALHEAVLSGNLECVKLLVKYGADIHQRDEAGWTPLHIACSDGYPDIAR

SEQ ID NO: 22628 - protein, 32 aa, Artificial Sequence
  Synthetic polypeptide
GHGGEPAGLYQTQPAAPCHRVHRADSPEDFWR

SEQ ID NO: 22629 - protein, 289 aa, Artificial Sequence
  Synthetic polypeptide
GTVENLLDFIKHNQLPLVIEFTEQTAPKIFGGEIKTHILLFLPKSVSDYDGKLSNFKTAAESFKGKILFIFIDSDHTDNQRILEFFGLKKEECPAVRLITLEEEMTKYKPESEELTAERITEFCHRFLEGKIKPHLMSQELPEDWDKQPVKVLVGKNFEDVAFDEKKNVFVEFYAPWCGHCKQLAPIWDKLGETYKDHENIVIAKMDSTANEVEAVKVHSFPTLKFFPASADRTVIDYNGERTLDGFKKFLESGGQDGAGDDDDLEDLEEAEEPDMEEDDDQKAVKDEL

SEQ ID NO: 22630 - protein, 52 aa, Artificial Sequence
  Synthetic polypeptide
ARWRTCWTLSNTTSCPLSSSSPSRQPRRFLEVKSRLTSCCSCPRVCLTMTAN

SEQ ID NO: 22631 - protein, 27 aa, Artificial Sequence
  Synthetic polypeptide
GHGGEPAGLYQTQPAAPCHRVHRAECV

SEQ ID NO: 22632 - protein, 269 aa, Artificial Sequence
  Synthetic polypeptide
GTVENLLDFIKHNQLPLVIEFTEQSVSDYDGKLSNFKTAAESFKGKILFIFIDSDHTDNQRILEFFGLKKEECPAVRLITLEEEMTKYKPESEELTAERITEFCHRFLEGKIKPHLMSQELPEDWDKQPVKVLVGKNFEDVAFDEKKNVFVEFYAPWCGHCKQLAPIWDKLGETYKDHENIVIAKMDSTANEVEAVKVHSFPTLKFFPASADRTVIDYNGERTLDGFKKFLESGGQDGAGDDDDLEDLEEAEEPDMEEDDDQKAVKDEL

SEQ ID NO: 22633 - protein, 32 aa, Artificial Sequence
  Synthetic polypeptide
ARWRTCWTLSNTTSCPLSSSSPSRVCLTMTAN

SEQ ID NO: 22634 - protein, 132 aa, Artificial Sequence
  Synthetic polypeptide
GTVENLLDFIKHNQLPLVIEFTEQTAPKIFGGEIKTHILLFLPKSVSDYDGKLSNFKTAAESFKGKILFIFIDSDHTDNQRILEFFGLKKEECPAVRLITLEEEMTKYKPESEELTAERITEFCHRFLEGKI

SEQ ID NO: 22635 - protein, 95 aa, Artificial Sequence
  Synthetic polypeptide
GTVENLLDFIKHNQLPLVIEFTEQTAPKIFGGEIKTHILLFLPKSVSDYDGKLSNFKTAAESFKGKILFIFIDSDHTDNQRILEFFGLKKEECPA

SEQ ID NO: 22636 - protein, 58 aa, Artificial Sequence
  Synthetic polypeptide
GTVENLLDFIKHNQLPLVIEFTEQTAPKIFGGEIKTHILLFLPKSVSDYDGKLSNFKT

SEQ ID NO: 22637 - protein, 37 aa, Artificial Sequence
  Synthetic polypeptide
GTVENLLDFIKHNQLPLVIEFTEQTAPKIFGGEIKTH

SEQ ID NO: 22638 - protein, 37 aa, Artificial Sequence
  Synthetic polypeptide
ARWRTCWTLSNTTSCPLSSSSPSRQPRRFLEVKSRLT

SEQ ID NO: 22639 - protein, 62 aa, Artificial Sequence
  Synthetic polypeptide
HELPAPPAADRRPVKMQAGIATPGMKTAAQAKAKTTGASRSHPAKAKGCQRPPKIRNYNIMD

SEQ ID NO: 22640 - protein, 55 aa, Artificial Sequence
  Synthetic polypeptide
RAWWPTPVIPALWEAEVGGSRGQEIETILVNMSSQLLQQPTGGPSRCRQALPPQG

SEQ ID NO: 22641 - protein, 46 aa, Artificial Sequence
  Synthetic polypeptide
HELPAPPAADRRPVKMQAGIATPGMKTAAQAKAKTTGASRSHPAKA

SEQ ID NO: 22642 - protein, 52 aa, Artificial Sequence
  Synthetic polypeptide
SQHFGRPRAPSSSSSRQEARQDAGRHCHPRDEDSSPGKGQDHRSLPVSSCKS

SEQ ID NO: 22643 - protein, 77 aa, Artificial Sequence
  Synthetic polypeptide
PGLVAHTCNPSTLGGRELPAPPAADRRPVKMQAGIATPGMKTAAQAKAKTTGASRSHPAKAKGCQRPPKIRNYNIMD

SEQ ID NO: 22644 - protein, 39 aa, Artificial Sequence
  Synthetic polypeptide
RAWWPTPVIPALWEAESSQLLQQPTGGPSRCRQALPPQG

SEQ ID NO: 22645 - protein, 61 aa, Artificial Sequence
  Synthetic polypeptide
PGLVAHTCNPSTLGGRELPAPPAADRRPVKMQAGIATPGMKTAAQAKAKTTGASRSHPAKA

SEQ ID NO: 22646 - protein, 44 aa, Artificial Sequence
  Synthetic polypeptide
ARTPRVPRMRLLPDTWESTSPAQHRWAADLTPCKARRHNTASTR

SEQ ID NO: 22647 - protein, 8 aa, Artificial Sequence
  Synthetic polypeptide
PGRQECRG

SEQ ID NO: 22648 - protein, 169 aa, Artificial Sequence
  Synthetic polypeptide
QDAKSAEDEAPSRHLGKHQPRSAQVGSRLDALQGPKTQHSIHTVTCKSPRQKEDRSPKPPQAPQHPEEHGRQSHSSSSFASGTLQDMWRLLDLGSSPSGVTSQGDSTPELPAPPAADRRPVKMQAGIATPGMKTAAQAKAKTTGASRSHPAKAKGCQRPPKIRNYNIMD

SEQ ID NO: 22649 - protein, 248 aa, Artificial Sequence
  Synthetic polypeptide
QDAKSAEDEAPSRHLGKHQPRSAQVGSRLDALQGPKTQHSIHTVTCKSPRQKEDRSPKPPQAPQHPEEHGRQSHSSSSFASGTLQDMWRLLDLGSSPSGVTSQGDSTPEMGSHYVTQAGLELLGSSSPAALASQSAEMTGVGPTPSLAWSGALHPNMNQEASLVRSTWAPGMRGGMNGGSSSVCKNMQRGPHWSPSQQPCSGIRTVLLSRKERTLLSCFSLPAPVVLVPLLLSGQAVTERAGHAGDIL

SEQ ID NO: 22650 - protein, 43 aa, Artificial Sequence
  Synthetic polypeptide
NKCCGNPWSRPLSSVSFPVRWTRYTWRFWSCGSRWLSWGSISG

SEQ ID NO: 22651 - protein, 32 aa, Artificial Sequence
  Synthetic polypeptide
AQEFETSLSNQLRCRLNKISAAGTPGAGRSPA

SEQ ID NO: 22652 - protein, 36 aa, Artificial Sequence
  Synthetic polypeptide
SCNRWGRISGILWVKERGPAVTQAGGQWHHHSSLQP

SEQ ID NO: 22653 - protein, 90 aa, Artificial Sequence
  Synthetic polypeptide
SNNENQLPRAAIDGEESQEYSGSKKGVLLSPRLEGSGTITAPCSLNLPNSSHPPASASRVAETTDVSHCTWPVSFSSLPPKCLSRNHPFC

SEQ ID NO: 22654 - protein, 85 aa, Artificial Sequence
  Synthetic polypeptide
QQMLEAPQGSTQYESDEATVYSYVDDQTMKINYLELQSMGKNLRNTLGQRKGSCCHPGWRAVAPSQLPAALTSRTLAILLPQPPE

SEQ ID NO: 22655 - protein, 116 aa, Artificial Sequence
  Synthetic polypeptide
AGCSVVRLWSWLPGMLRQEDCLKPGVQGYGDLRLLRLHLAAVPLQLPGGLRRRAVHVHGGGCQQDGGAESWSRLLLHLGVREPTPRGEGPLGHPLRHHHRLQLQPRPWHRGPSVPV

SEQ ID NO: 22656 - protein, 93 aa, Artificial Sequence
  Synthetic polypeptide
SQEFKVMVTYGSFDYTSLLYLSNYLEDFGGGRFMFMEEGANKTVEPRAGRVSFFTSGSENLHRVEKVHWGTRYAITIAFSCNPDHGIEDPAFP

SEQ ID NO: 22657 - protein, 26 aa, Artificial Sequence
  Synthetic polypeptide
CRAPVVLATRDAEAGGLFKARSSRLW

SEQ ID NO: 22658 - protein, 85 aa, Artificial Sequence
  Synthetic polypeptide
AGCSVVRLWSWLPGMLRQEDCLKPGVQGYGDLRLLRLHLAAVPLQLPGGLRRRAVHVHGGGCQQDGGAESWMFLFPDDVLWVPRS

SEQ ID NO: 22659 - protein, 105 aa, Artificial Sequence
  Synthetic polypeptide
SQEFKVMVTYGSFDYTSLLYLSNYLEDFGGGRFMFMEEGANKTVEPRAGCFCFRMMSCGFQEVNGPRASEAAGAKAGVRCPPGTHHPPERGETHAILEAESIAYC

SEQ ID NO: 22660 - protein, 78 aa, Artificial Sequence
  Synthetic polypeptide
AGCSVVRLWSWLPGMLRQEDCLKPGVQGYGDLRLLRLHLAAVPLQLPGGLRRRAVHVHGGGCQQDGGAESCCSESSLH

SEQ ID NO: 22661 - protein, 150 aa, Artificial Sequence
  Synthetic polypeptide
SQEFKVMVTYGSFDYTSLLYLSNYLEDFGGGRFMFMEEGANKTVEPRAVVLSHLCIRGRVWTSSLCKQEPSLSALTPEVPVTAVLWENEKLTEHKTGVFLRSQAAEASWDSKLHNFLAYFDLSHFKHDKYLSQTFCITIFFQIIKTTCLL

SEQ ID NO: 22662 - protein, 114 aa, Artificial Sequence
  Synthetic polypeptide
AGCSVVRLWSWLPGMLRQEDCLKPGVQGYGDLRLLRLHLAAVPLQLPGGLRRRAVHVHGGGCQQDGGAESWGRVWTSSLCKQEPSLSALTPEVPVTAVLWENEKLTEHKTGVFL

SEQ ID NO: 22663 - protein, 91 aa, Artificial Sequence
  Synthetic polypeptide
SQEFKVMVTYGSFDYTSLLYLSNYLEDFGGGRFMFMEEGANKTVEPRAGEGFGRPASASRSPACLPSPQKSQSQQFCGKMKNSQSTRQAFS

SEQ ID NO: 22664 - protein, 33 aa, Artificial Sequence
  Synthetic polypeptide
TQEVGRLHSPKVRQRCHRCRHHQGGSGADSQRS

SEQ ID NO: 22665 - protein, 247 aa, Artificial Sequence
  Synthetic polypeptide
KMGQVWWCTPVTPAQEAEVEESLEPRRLGGCTPRKCGRGVTDVVITREEAERIRSVAEKGLSLGGSDGGASILDLHSGALSVGKHFVNLYRYFGDKIQNIFSEEDFRLYREVRQKVQLTIAEAFGISASSLHLTKPTFFSRINSTEARTAHDEYWHAHVDKVTYGSFDYTSLLYLSNYLEDFGGGRFMFMEEGANKTVEPRAGRVSFFTSGSENLHRVEKVHWGTRYAITIAFSCNPDHGIEDPAFP

SEQ ID NO: 22666 - protein, 44 aa, Artificial Sequence
  Synthetic polypeptide
PQLRRQRWKNHLNPGGWEAALPESAAEVSPMSSSPGRKRSGFAA

SEQ ID NO: 22667 - protein, 259 aa, Artificial Sequence
  Synthetic polypeptide
KMGQVWWCTPVTPAQEAEVEESLEPRRLGGCTPRKCGRGVTDVVITREEAERIRSVAEKGLSLGGSDGGASILDLHSGALSVGKHFVNLYRYFGDKIQNIFSEEDFRLYREVRQKVQLTIAEAFGISASSLHLTKPTFFSRINSTEARTAHDEYWHAHVDKVTYGSFDYTSLLYLSNYLEDFGGGRFMFMEEGANKTVEPRAGCFCFRMMSCGFQEVNGPRASEAAGAKAGVRCPPGTHHPPERGETHAILEAESIAYC

SEQ ID NO: 22668 - protein, 209 aa, Artificial Sequence
  Synthetic polypeptide
TQEVGRLHSPKVRQRCHRCRHHQGGSGADSQASILDLHSGALSVGKHFVNLYRYFGDKIQNIFSEEDFRLYREVRQKVQLTIAEAFGISASSLHLTKPTFFSRINSTEARTAHDEYWHAHVDKVTYGSFDYTSLLYLSNYLEDFGGGRFMFMEEGANKTVEPRAGRVSFFTSGSENLHRVEKVHWGTRYAITIAFSCNPDHGIEDPAFP

SEQ ID NO: 22669 - protein, 72 aa, Artificial Sequence
  Synthetic polypeptide
KMGQVWWCTPVTPAQEAEVEESLEPRRLGGCTPRKCGRGVTDVVITREEAERIRRHPFWTCTQGPCLSGSTL

SEQ ID NO: 22670 - protein, 69 aa, Artificial Sequence
  Synthetic polypeptide
PQLRRQRWKNHLNPGGWEAALPESAAEVSPMSSSPGRKRSGFAGIHSGLALRGPVCREALCEPVQILRG

SEQ ID NO: 22671 - protein, 57 aa, Artificial Sequence
  Synthetic polypeptide
KMGQVWWCTPVTPAQEAEVEESLEPRRLGGCTPRKCGRGVTDVVITREEAERIRSVA

SEQ ID NO: 22672 - protein, 59 aa, Artificial Sequence
  Synthetic polypeptide
TREVEAAVSRDCAPALQPGNVVRKQKLMTKRMCQPMHRVQPRKMERRENSTSWLMPRYF

SEQ ID NO: 22673 - protein, 12 aa, Artificial Sequence
  Synthetic polypeptide
AEIAPLHSSLGM

SEQ ID NO: 22674 - protein, 479 aa, Artificial Sequence
  Synthetic polypeptide
SQLLRRPRQENRLNPGGGGCSEPRLRPCTPAWECSKKTKTDDQENVSADAPSPAQENGEKGEFHKLADAKIFLSDCLACDSCMTAEEGVQLSQQNAKDFFRVLNLNKKCDTSKHKVLVVSVCPQSLPYFAAKFNLSVTDASRRLCGFLKSLGVHYVFDTTIAADFSILESQKEFVRRYRQHSEEERTLPMLTSACPGWVRYAERVLGRPITAHLCTAKSPQQVMGSLVKDYFARQQNLSPEKIFHVIVAPCYDKKLEALQESLPPALHGSRGADCVLTSGEIAQIMEQGDLSVRDAAVDTLFGDLKEDKVTRHDGASSDGHLAHIFRHAAKELFNEDVEEVTYRALRNKDFQEVTLEKNGEVVLRFAAAYGFRNIQNMILKLKKGKFPFHFVEVLACAGGCLNGRGQAQTPDGHADKALLRQMEGIYADIPVRRPESSAHVQELYQEWLEGINSPKAREVLHTTYQSQERGTHSLDIKW

SEQ ID NO: 22675 - protein, 56 aa, Artificial Sequence
  Synthetic polypeptide
TREVEAAVSRDCAPALQPGNVVRKQKLMTKRMCQPMHRVQPRKMERNVIPQSTKCW

SEQ ID NO: 22676 - protein, 431 aa, Artificial Sequence
  Synthetic polypeptide
SQLLRRPRQENRLNPGGGGCSEPRLRPCTPAWECSKKTKTDDQENVSADAPSPAQENGEKCDTSKHKVLVVSVCPQSLPYFAAKFNLSVTDASRRLCGFLKSLGVHYVFDTTIAADFSILESQKEFVRRYRQHSEEERTLPMLTSACPGWVRYAERVLGRPITAHLCTAKSPQQVMGSLVKDYFARQQNLSPEKIFHVIVAPCYDKKLEALQESLPPALHGSRGADCVLTSGEIAQIMEQGDLSVRDAAVDTLFGDLKEDKVTRHDGASSDGHLAHIFRHAAKELFNEDVEEVTYRALRNKDFQEVTLEKNGEVVLRFAAAYGFRNIQNMILKLKKGKFPFHFVEVLACAGGCLNGRGQAQTPDGHADKALLRQMEGIYADIPVRRPESSAHVQELYQEWLEGINSPKAREVLHTTYQSQERGTHSLDIKW

SEQ ID NO: 22677 - protein, 240 aa, Artificial Sequence
  Synthetic polypeptide
SQLLRRPRQENRLNPGGGGCSEPRLRPCTPAWECSKKTKTDDQENVSADAPSPAQENGEKGEFHKLADAKIFLSDCLACDSCMTAEEGVQLSQQNAKDFFRVLNLNKKCDTSKHKVLVVSVCPQSLPYFAAKFNLSVTDASRRLCGFLKSLGWVRYAERVLGRPITAHLCTAKSPQQVMGSLVKDYFARQQNLSPEKIFHVIVAPCYDKKLEALQESLPPALHGSRGADCVLTSGESQAW

SEQ ID NO: 22678 - protein, 285 aa, Artificial Sequence
  Synthetic polypeptide
SQLLRRPRQENRLNPGGGGCSEPRLRPCTPAWECSKKTKTDDQENVSADAPSPAQENGEKGEFHKLADAKIFLSDCLACDSCMTAEEGVQLSQQNAKDFFRVLNLNKKCDTSKHKVLVVSVCPQSLPYFAAKFNLSVTDASRRLCGFLKSLGVHYVFDTTIAADFSILESQKEFVRRYRQHSEEERTLPMLTSACPGWVRYAERVLGRPITAHLCTAKSPQQVMGSLVKDYFARQQNLSPEKIFHVIVAPCYDKKLEALQESLPPALHGSRGADCVLTSGESQAW

SEQ ID NO: 22679 - protein, 77 aa, Artificial Sequence
  Synthetic polypeptide
TREVEAAVSRDCAPALQPGNVVRKQKLMTKRMCQPMHRVQPRKMERQVDFSVLYQPRVNYCCCFSLWGLTAPCTSLL

SEQ ID NO: 22680 - protein, 122 aa, Artificial Sequence
  Synthetic polypeptide
SQLLRRPRQENRLNPGGGGCSEPRLRPCTPAWECSKKTKTDDQENVSADAPSPAQENGEASRFFSFVSAQSKLLLLFFSLGAHSTVHITALKKTEVRGHGGSRLESQHFGRPRWTDHLRSGV

SEQ ID NO: 22681 - protein, 525 aa, Artificial Sequence
  Synthetic polypeptide
SQLLRRPRQENRLNPGGGGCSEPRLRPCTPAWECSKKTKTDDQENVSADAPSPAQENGEKGEFHKLADAKIFLSDCLACDSCMTAEEGVQLSQQNAKDFFRVLNLNKKCDTSKHKVLVVSVCPQSLPYFAAKFNLSVTDASRRLCGFLKSLGVHYVFDTTIAADFSILESQKEFVRRYRQHSEEERTLPMLTSACPGWVRYAERVLGRPITAHLCTAKSPQQVMGSLVKDYFARQQVQEEMGSAFPVLPGGSTGWGALQMFGRTTPSPEGGSRQTWMECWCSNLSPEKIFHVIVAPCYDKKLEALQESLPPALHGSRGADCVLTSGEIAQIMEQGDLSVRDAAVDTLFGDLKEDKVTRHDGASSDGHLAHIFRHAAKELFNEDVEEVTYRALRNKDFQEVTLEKNGEVVLRFAAAYGFRNIQNMILKLKKGKFPFHFVEVLACAGGCLNGRGQAQTPDGHADKALLRQMEGIYADIPVRRPESSAHVQELYQEWLEGINSPKAREVLHTTYQSQERGTHSLDIKW

SEQ ID NO: 22682 - protein, 166 aa, Artificial Sequence
  Synthetic polypeptide
SQLLRRPRQENRLNPGGGGCSEPRLRPCTPAWECSKKTKTDDQENVSADAPSPAQENGEKGEFHKLADAKIFLSDCLACDSCMTAEEGVQLSQQNAKDFFRVLNLNKKCDTSKHKVLVVSVCPQSLPYFAAKFNLSVTDASRRLCGFLKSLGMLPFPSSLQACRFP

SEQ ID NO: 22683 - protein, 285 aa, Artificial Sequence
  Synthetic polypeptide
SQLLRRPRQENRLNPGGGGCSEPRLRPCTPAWECSKKTKTDDQENVSADAPSPAQENGEKGEFHKLADAKIFLSDCLACDSCMTAEEGVQLSQQNAKDFFRVLNLNKKCDTSKHKVLVVSVCPQSLPYFAAKFNLSVTDASRRLCGFLKSLGWVRYAERVLGRPITAHLCTAKSPQQVMGSLVKDYFARQQNLSPEKIFHVIVAPCYDKKLEALQESLPPALHGSRGADCVLTSGEIAQIMEQGDLSVRDAAVDTLFGDLKEDKVTRHDGASSDGHLAHIFRHAA

SEQ ID NO: 22684 - protein, 211 aa, Artificial Sequence
  Synthetic polypeptide
SQLLRRPRQENRLNPGGGGCSEPRLRPCTPAWECSKKTKTDDQENVSADAPSPAQENGEKGEFHKLADAKIFLSDCLACDSCMTAEEGVQLSQQNAKDFFRVLNLNKKCDTSKHKVLVVSVCPQSLPYFAAKFNLSVTDASRRLCGFLKSLGVHYVFDTTIAADFSILESQKEFVRRYRQHSEEERTLPMLTSACPGMLPFPSSLQACRFP

SEQ ID NO: 22685 - protein, 36 aa, Artificial Sequence
  Synthetic polypeptide
SPHCTPSWETGRGESFAHVGNTRIRIGLPAHKAPQR

SEQ ID NO: 22686 - protein, 86 aa, Artificial Sequence
  Synthetic polypeptide
AREVEAAVNRDRPTALHPGRQAAASPLHMLATHASASASLPTKRHNGDQPEQPELKRIKTEDGEGIVIALSVDTPPAAVREKGVQN

SEQ ID NO: 22687 - protein, 46 aa, Artificial Sequence
  Synthetic polypeptide
TVIAPLHSILGDRPRRVLCTCWQHTHPHRPPCPQSATTVTSRSSRS

SEQ ID NO: 22688 - protein, 234 aa, Artificial Sequence
  Synthetic polypeptide
AGRGGSRLESQHFGRLRRVNHLSHAAKLGAQLADLHLDNKKLGEMRLKEAGTVGRGGGQEERPFVARFGFDVVTCCGYLPQVNDWQEDWVVFYARQRIQPQMDMVEKESGDREALQLWSALQLKIPDLFRDLEIIPALLHGDLWGGNVAEDSSGPVIFDPASFYGHSEYELAIAGMFGGFSSSFYSAYHGKIPKAPGFEKRLQLYQLFHYLNHWNHFGSGYRGSSLNIMRNLVK

SEQ ID NO: 22689 - protein, 36 aa, Artificial Sequence
  Synthetic polypeptide
RPRWLTPGIPTLREAEAGESLESCCKAWSPAGRFTP

SEQ ID NO: 22690 - protein, 70 aa, Artificial Sequence
  Synthetic polypeptide
AGRGGSRLESQHFGRLRRVNHLSHAAKLGAQLADLHLDNKKLGEMRLKEAGTVEHNALSGSREFSGILIC

SEQ ID NO: 22691 - protein, 102 aa, Artificial Sequence
  Synthetic polypeptide
AGRGGSRLESQHFGRLRRVNHLSHAAKLGAQLADLHLDNKKLGEMRLKEAGTVGRGGGQEERPFVARFGFDVVTCCGYLPQAPGFEKRLQLYQLFHYLNHWN

SEQ ID NO: 22692 - protein, 39 aa, Artificial Sequence
  Synthetic polypeptide
AGRGGSRLESQHFGRLRRVNHLRERRWAGGTALCGPVWI

SEQ ID NO: 22693 - protein, 41 aa, Artificial Sequence
  Synthetic polypeptide
RPRWLTPGIPTLREAEAGESLEGEEVGRRNGPLWPGLDLTW

SEQ ID NO: 22694 - protein, 219 aa, Artificial Sequence
  Synthetic polypeptide
SRHFGRPSHAAKLGAQLADLHLDNKKLGEMRLKEAGTVGRGGGQEERPFVARFGFDVVTCCGYLPQVNDWQEDWVVFYARQRIQPQMDMVEKESGDREALQLWSALQLKIPDLFRDLEIIPALLHGDLWGGNVAEDSSGPVIFDPASFYGHSEYELAIAGMFGGFSSSFYSAYHGKIPKAPGFEKRLQLYQLFHYLNHWNHFGSGYRGSSLNIMRNLVK

SEQ ID NO: 22695 - protein, 40 aa, Artificial Sequence
  Synthetic polypeptide
PAVVAHASNPGTLGGQVMLQSLEPSWPIYTLITRSLERCA

SEQ ID NO: 22696 - protein, 30 aa, Artificial Sequence
  Synthetic polypeptide
RLWWLTPLIPALWEAKSCCKAWSPAGRFTP

SEQ ID NO: 22697 - protein, 55 aa, Artificial Sequence
  Synthetic polypeptide
SRHFGRPSHAAKLGAQLADLHLDNKKLGEMRLKEAGTVEHNALSGSREFSGILIC

SEQ ID NO: 22698 - protein, 87 aa, Artificial Sequence
  Synthetic polypeptide
SRHFGRPSHAAKLGAQLADLHLDNKKLGEMRLKEAGTVGRGGGQEERPFVARFGFDVVTCCGYLPQAPGFEKRLQLYQLFHYLNHWN

SEQ ID NO: 22699 - protein, 285 aa, Artificial Sequence
  Synthetic polypeptide
PTWRNPQIQNSPGVVAVGYAKNQAVAQSSGSYLCFLDSDDVMMPQRVRLQHEAAVQHPSSIIGCRVRRDPPNSTERYTRWINQLTPEQLLTQVFTSNGPTVIMPTWFCSRAWFSHVGPFNEGGQGVPEDLLFFYEHLRKGGGVIRVDQSLLLYRHHPQAATHCVLETTIWTHRVRFLEEQALPRWAAFTIWNAGKQGRRLYRSLTAGSQRKVVAFCDVDENKIRKGFYCHEDSQERPKPRIPILHFRAARPPFVICVKLDLTGGAFEDNLRSLHLQEGQDFLHFS

SEQ ID NO: 22700 - protein, 63 aa, Artificial Sequence
  Synthetic polypeptide
SQHFGRPRWADHLRLGVRDQPDQHGETPKYKIRQAWWQSDTLKIKQLPRAQGLTFAFWIRMTS

SEQ ID NO: 22701 - protein, 28 aa, Artificial Sequence
  Synthetic polypeptide
GWEFETSLTNMEKPPNTKFARRGGSRIR

SEQ ID NO: 22702 - protein, 39 aa, Artificial Sequence
  Synthetic polypeptide
GRAPWLTPVIPALWEAEEGGSPEEEDNVWHPGLPAPRDD

SEQ ID NO: 22703 - protein, 129 aa, Artificial Sequence
  Synthetic polypeptide
SQHFGRPRRADHLRRKTMCGTLDYLPPEMIEGRMHNEKVDLWCIGVLCYELLVGNPPFESASHNETYRRIVKVDLKFPASVPMGAQDLISKLLRHNPSERLPLAQVSAHPWVRANSRRVLPPSALQSVA

SEQ ID NO: 22704 - protein, 95 aa, Artificial Sequence
  Synthetic polypeptide
SQHFGRPRRADHLRRKTMCGTLDYLPPEMIEGRMHNEKVDLKFPASVPMGAQDLISKLLRHNPSERLPLAQVSAHPWVRANSRRVLPPSALQSVA

SEQ ID NO: 22705 - protein, 55 aa, Artificial Sequence
  Synthetic polypeptide
SQHFGRPRRADHLRRKTMCGTLDYLPPEMIEGRMHNEKVDLWCIGVLCYELLVGN

SEQ ID NO: 22706 - protein, 19 aa, Artificial Sequence
  Synthetic polypeptide
LPPLECVLHGEGQRSDEAA

SEQ ID NO: 22707 - protein, 109 aa, Artificial Sequence
  Synthetic polypeptide
NVCFMEKANARMKQLKRQLEEAEEEATRANASRRKLQRELDDATEANEGLSREVSTLKNRLRRGGPISFSSSRSGRRQLHLEGASLELSDDDTESKTSDVNETQPPQSE

SEQ ID NO: 22708 - protein, 15 aa, Artificial Sequence
  Synthetic polypeptide
SSTRMCASWRRPTLG

SEQ ID NO: 22709 - protein, 12 aa, Artificial Sequence
  Synthetic polypeptide
PGEPSWCTGPFG

SEQ ID NO: 22710 - protein, 1510 aa, Artificial Sequence
  Synthetic polypeptide
SQCFGKLRQEDHLRPGVRDQPGQHSKTTSLQESFKISQANPPGVLALLDEECWFPKATDKTFVEKLVQEQGSHSKFQKPRQLKDKADFCIIHYAGKVDYKADEWLMKNMDPLNDNVATLLHQSSDRFVAELWKDEIQNIQRASFYDSVSGLHEPPVDRIVGLDQVTGMTETAFGSAYKTKKGMFRTVGQLYKESLTKLMATLRNTNPNFVRCIIPNHEKRAGKLDPHLVLDQLRCNGVLEGIRICRQGFPNRIVFQEFRQRYEILTPNAIPKGFMDGKQACERMIRALELDPNLYRIGQSKIFFRAGVLAHLEEERDLKITDIIIFFQAVCRGYLARKAFAKKQQQLSALKVLQRNCAAYLKLRHWQWWRVFTKVKPLLQVTRQEEELQAKDEELLKVKEKQTKVEGELEEMERKHQQLLEEKNILAEQLQAETELFAEAEEMRARLAAKKQELEEILHDLESRVEEEEERNQILQNEKKKMQAHIQDLEEQLDEEEGARQKLQLEKVTAEAKIKKMEEEILLLEDQNSKFIKEKKLMEDRIAECSSQLAEEEEKAKNLAKIRNKQEVMISDLEERLKKEEKTRQELEKAKRKLDGETTDLQDQIAELQAQIDELKLQLAKKEEELQGALARGDDETLHKNNALKVVRELQAQIAELQEDFESEKASRNKAEKQKRDLSEELEALKTELEDTLDTTAAQQELRTKREQEVAELKKALEEETKNHEAQIQDMRQRHATALEELSEQLEQAKRFKANLEKNKQGLETDNKELACEVKVLQQVKAESEHKRKKLDAQVQELHAKVSEGDRLRVELAEKASKLQNELDNVSTLLEEAEKKGIKFAKDAASLESQLQDTQELLQEETRQKLNLSSRIRQLEEEKNSLQEQQEEEEEARKNLEKQVLALQSQLADTKKKVDDDLGTIESLEEAKKKLLKDAEALSQRLEEKALAYDKLEKTKNRLQQELDDLTVDLDHQRQVASNLEKKQKKFDQLLAEEKSISARYAEERDRAEAEAREKETKALSLARALEEALEAKEEFERQNKQLRADMEDLMSSKDDVGKNVHELEKSKRALEQQVEEMRTQLEELEDELQATEDAKLRLEVNMQAMKAQFERDLQTRDEQNEEKKRLLIKQVRELEAELEDERKQRALAVASKKKMEIDLKDLEAQIEAANKARDEVIKQLRKLQAQMKDYQRELEEARASRDEIFAQSKESEKKLKSLEAEILQLQEELASSERARRHAEQERDELADEITNSASGKSALLDEKRRLEARIAQLEEELEEEQSNMELLNDRFRKTTLQVDTLNAELAAERSAAQKSDNARQQLERQNKELKAKLQELEGAVKSKFKATISALEAKIGQLEEQLEQEAKERAAANKLVRRTEKKLKEIFMQVEDERRHADQYKEQMEKANARMKQLKRQLEEAEEEATRANASRRKLQRELDDATEANEGLSREVSTLKNRLRRGGPISFSSSRSGRRQLHLEGASLELSDDDTESKTSDVNETQPPQSE

SEQ ID NO: 22711 - protein, 68 aa, Artificial Sequence
  Synthetic polypeptide
DQEFETSLGNIVRLHLYKKVLKLARRTLLVYWPFWMKNAGSLKPQIKPLLKNWFKSKVPTPSFRNLDN

SEQ ID NO: 22712 - protein, 1489 aa, Artificial Sequence
  Synthetic polypeptide
SQCFGKLRQEDHLRPGVRDQPGQHSKTTSLQESFKISQANPPGVLALLDEECWFPKATDKTFVEKLVQEQGSHSKFQKPRQLKDKADFCIIHYAGKVDYKADEWLMKNMDPLNDNVATLLHQSSDRFVAELWKDVDRIVGLDQVTGMTETAFGSAYKTKKGMFRTVGQLYKESLTKLMATLRNTNPNFVRCIIPNHEKRAGKLDPHLVLDQLRCNGVLEGIRICRQGFPNRIVFQEFRQRYEILTPNAIPKGFMDGKQACERMIRALELDPNLYRIGQSKIFFRAGVLAHLEEERDLKITDIIIFFQAVCRGYLARKAFAKKQQQLSALKVLQRNCAAYLKLRHWQWWRVFTKVKPLLQVTRQEEELQAKDEELLKVKEKQTKVEGELEEMERKHQQLLEEKNILAEQLQAETELFAEAEEMRARLAAKKQELEEILHDLESRVEEEEERNQILQNEKKKMQAHIQDLEEQLDEEEGARQKLQLEKVTAEAKIKKMEEEILLLEDQNSKFIKEKKLMEDRIAECSSQLAEEEEKAKNLAKIRNKQEVMISDLEERLKKEEKTRQELEKAKRKLDGETTDLQDQIAELQAQIDELKLQLAKKEEELQGALARGDDETLHKNNALKVVRELQAQIAELQEDFESEKASRNKAEKQKRDLSEELEALKTELEDTLDTTAAQQELRTKREQEVAELKKALEEETKNHEAQIQDMRQRHATALEELSEQLEQAKRFKANLEKNKQGLETDNKELACEVKVLQQVKAESEHKRKKLDAQVQELHAKVSEGDRLRVELAEKASKLQNELDNVSTLLEEAEKKGIKFAKDAASLESQLQDTQELLQEETRQKLNLSSRIRQLEEEKNSLQEQQEEEEEARKNLEKQVLALQSQLADTKKKVDDDLGTIESLEEAKKKLLKDAEALSQRLEEKALAYDKLEKTKNRLQQELDDLTVDLDHQRQVASNLEKKQKKFDQLLAEEKSISARYAEERDRAEAEAREKETKALSLARALEEALEAKEEFERQNKQLRADMEDLMSSKDDVGKNVHELEKSKRALEQQVEEMRTQLEELEDELQATEDAKLRLEVNMQAMKAQFERDLQTRDEQNEEKKRLLIKQVRELEAELEDERKQRALAVASKKKMEIDLKDLEAQIEAANKARDEVIKQLRKLQAQMKDYQRELEEARASRDEIFAQSKESEKKLKSLEAEILQLQEELASSERARRHAEQERDELADEITNSASGKSALLDEKRRLEARIAQLEEELEEEQSNMELLNDRFRKTTLQVDTLNAELAAERSAAQKSDNARQQLERQNKELKAKLQELEGAVKSKFKATISALEAKIGQLEEQLEQEAKERAAANKLVRRTEKKLKEIFMQVEDERRHADQYKEQMEKANARMKQLKRQLEEAEEEATRANASRRKLQRELDDATEANEGLSREVSTLKNRLRRGGPISFSSSRSGRRQLHLEGASLELSDDDTESKTSDVNETQPPQSE

SEQ ID NO: 22713 - protein, 35 aa, Artificial Sequence
  Synthetic polypeptide
SQCFGKLRQEDHLRPGVRDQPGQHSEPSWCTGPFG

SEQ ID NO: 22714 - protein, 1483 aa, Artificial Sequence
  Synthetic polypeptide
DQEFETSLGNIANPPGVLALLDEECWFPKATDKTFVEKLVQEQGSHSKFQKPRQLKDKADFCIIHYAGKVDYKADEWLMKNMDPLNDNVATLLHQSSDRFVAELWKDEIQNIQRASFYDSVSGLHEPPVDRIVGLDQVTGMTETAFGSAYKTKKGMFRTVGQLYKESLTKLMATLRNTNPNFVRCIIPNHEKRAGKLDPHLVLDQLRCNGVLEGIRICRQGFPNRIVFQEFRQRYEILTPNAIPKGFMDGKQACERMIRALELDPNLYRIGQSKIFFRAGVLAHLEEERDLKITDIIIFFQAVCRGYLARKAFAKKQQQLSALKVLQRNCAAYLKLRHWQWWRVFTKVKPLLQVTRQEEELQAKDEELLKVKEKQTKVEGELEEMERKHQQLLEEKNILAEQLQAETELFAEAEEMRARLAAKKQELEEILHDLESRVEEEEERNQILQNEKKKMQAHIQDLEEQLDEEEGARQKLQLEKVTAEAKIKKMEEEILLLEDQNSKFIKEKKLMEDRIAECSSQLAEEEEKAKNLAKIRNKQEVMISDLEERLKKEEKTRQELEKAKRKLDGETTDLQDQIAELQAQIDELKLQLAKKEEELQGALARGDDETLHKNNALKVVRELQAQIAELQEDFESEKASRNKAEKQKRDLSEELEALKTELEDTLDTTAAQQELRTKREQEVAELKKALEEETKNHEAQIQDMRQRHATALEELSEQLEQAKRFKANLEKNKQGLETDNKELACEVKVLQQVKAESEHKRKKLDAQVQELHAKVSEGDRLRVELAEKASKLQNELDNVSTLLEEAEKKGIKFAKDAASLESQLQDTQELLQEETRQKLNLSSRIRQLEEEKNSLQEQQEEEEEARKNLEKQVLALQSQLADTKKKVDDDLGTIESLEEAKKKLLKDAEALSQRLEEKALAYDKLEKTKNRLQQELDDLTVDLDHQRQVASNLEKKQKKFDQLLAEEKSISARYAEERDRAEAEAREKETKALSLARALEEALEAKEEFERQNKQLRADMEDLMSSKDDVGKNVHELEKSKRALEQQVEEMRTQLEELEDELQATEDAKLRLEVNMQAMKAQFERDLQTRDEQNEEKKRLLIKQVRELEAELEDERKQRALAVASKKKMEIDLKDLEAQIEAANKARDEVIKQLRKLQAQMKDYQRELEEARASRDEIFAQSKESEKKLKSLEAEILQLQEELASSERARRHAEQERDELADEITNSASGKSALLDEKRRLEARIAQLEEELEEEQSNMELLNDRFRKTTLQVDTLNAELAAERSAAQKSDNARQQLERQNKELKAKLQELEGAVKSKFKATISALEAKIGQLEEQLEQEAKERAAANKLVRRTEKKLKEIFMQVEDERRHADQYKEQMEKANARMKQLKRQLEEAEEEATRANASRRKLQRELDDATEANEGLSREVSTLKNRLRRGGPISFSSSRSGRRQLHLEGASLELSDDDTESKTSDVNETQPPQSE

SEQ ID NO: 22715 - protein, 1462 aa, Artificial Sequence
  Synthetic polypeptide
DQEFETSLGNIANPPGVLALLDEECWFPKATDKTFVEKLVQEQGSHSKFQKPRQLKDKADFCIIHYAGKVDYKADEWLMKNMDPLNDNVATLLHQSSDRFVAELWKDVDRIVGLDQVTGMTETAFGSAYKTKKGMFRTVGQLYKESLTKLMATLRNTNPNFVRCIIPNHEKRAGKLDPHLVLDQLRCNGVLEGIRICRQGFPNRIVFQEFRQRYEILTPNAIPKGFMDGKQACERMIRALELDPNLYRIGQSKIFFRAGVLAHLEEERDLKITDIIIFFQAVCRGYLARKAFAKKQQQLSALKVLQRNCAAYLKLRHWQWWRVFTKVKPLLQVTRQEEELQAKDEELLKVKEKQTKVEGELEEMERKHQQLLEEKNILAEQLQAETELFAEAEEMRARLAAKKQELEEILHDLESRVEEEEERNQILQNEKKKMQAHIQDLEEQLDEEEGARQKLQLEKVTAEAKIKKMEEEILLLEDQNSKFIKEKKLMEDRIAECSSQLAEEEEKAKNLAKIRNKQEVMISDLEERLKKEEKTRQELEKAKRKLDGETTDLQDQIAELQAQIDELKLQLAKKEEELQGALARGDDETLHKNNALKVVRELQAQIAELQEDFESEKASRNKAEKQKRDLSEELEALKTELEDTLDTTAAQQELRTKREQEVAELKKALEEETKNHEAQIQDMRQRHATALEELSEQLEQAKRFKANLEKNKQGLETDNKELACEVKVLQQVKAESEHKRKKLDAQVQELHAKVSEGDRLRVELAEKASKLQNELDNVSTLLEEAEKKGIKFAKDAASLESQLQDTQELLQEETRQKLNLSSRIRQLEEEKNSLQEQQEEEEEARKNLEKQVLALQSQLADTKKKVDDDLGTIESLEEAKKKLLKDAEALSQRLEEKALAYDKLEKTKNRLQQELDDLTVDLDHQRQVASNLEKKQKKFDQLLAEEKSISARYAEERDRAEAEAREKETKALSLARALEEALEAKEEFERQNKQLRADMEDLMSSKDDVGKNVHELEKSKRALEQQVEEMRTQLEELEDELQATEDAKLRLEVNMQAMKAQFERDLQTRDEQNEEKKRLLIKQVRELEAELEDERKQRALAVASKKKMEIDLKDLEAQIEAANKARDEVIKQLRKLQAQMKDYQRELEEARASRDEIFAQSKESEKKLKSLEAEILQLQEELASSERARRHAEQERDELADEITNSASGKSALLDEKRRLEARIAQLEEELEEEQSNMELLNDRFRKTTLQVDTLNAELAAERSAAQKSDNARQQLERQNKELKAKLQELEGAVKSKFKATISALEAKIGQLEEQLEQEAKERAAANKLVRRTEKKLKEIFMQVEDERRHADQYKEQMEKANARMKQLKRQLEEAEEEATRANASRRKLQRELDDATEANEGLSREVSTLKNRLRRGGPISFSSSRSGRRQLHLEGASLELSDDDTESKTSDVNETQPPQSE

SEQ ID NO: 22716 - protein, 211 aa, Artificial Sequence
  Synthetic polypeptide
TLEGLLRERSKVPYIVRQCVEEVEKRGIEEVGIYRISGVATDIQALKAVFDANNKDILLMLSDMDINAIAGTLKLYFRELPEPLLTDRLYPAFMEGIALSDPAAKENCMMHLLRSLPDPNLITFLFLLEHLKRVAEKEPINKMSLHNLATVFGPTLLRPSEVESKAHLTSAADIWSHDVMAQVQVLLYYLQHPPISFAELKRNTLYFSTDV

SEQ ID NO: 22717 - protein, 62 aa, Artificial Sequence
  Synthetic polypeptide
PAPKRWKVSCGSAPRCPTSSGSVWRRWRRGVSRRLASTGYRAWPRTSRRSRPSSMPITRTSC

SEQ ID NO: 22718 - protein, 56 aa, Artificial Sequence
  Synthetic polypeptide
QHLNAGRSLAGALQGALHRPAVCGGGGEEGYRGGWHLQDIGRGHGHPGAQGRLRCQ

SEQ ID NO: 22719 - protein, 54 aa, Artificial Sequence
  Synthetic polypeptide
TLEGLLRERSKVPYIVRQCVEEAVRLLRKHHRLNGGGMHMPRWVSRVAGRQLSS

SEQ ID NO: 22720 - protein, 30 aa, Artificial Sequence
  Synthetic polypeptide
PAPKRWKVSCGSAPRCPTSSGSVWRRRSGC

SEQ ID NO: 22721 - protein, 58 aa, Artificial Sequence
  Synthetic polypeptide
QHLNAGRSLAGALQGALHRPAVCGGGGQAAEETPQAERGRNAHATLGVPGRGEAAQLL

SEQ ID NO: 22722 - protein, 285 aa, Artificial Sequence
  Synthetic polypeptide
FLHFHLSGTAELFATCAKKDIRVWHTSSNRELLRITVPNMTCHGIDFMRDGKSIISAWNDGKIRAFAPETGRLMYVINNAHRIGVTAIATTSDCKRVISGGGEGEVRVWQIGCQTQKLEEALKEHKSSVSCIRVKRNNEECVTASTDGTCIIWDLVRLRRNQMILANTLFQCVCYHPEEFQIITSGTDRKIAYWEVFDGTVIRELEGSLSGSINGMDITQEGVHFVTGGNDHLVKVWDYNEGEVTHVGVGHSGNITRIRISPGNQYIVSVSADGAILRWKYPYTS

SEQ ID NO: 22723 - protein, 35 aa, Artificial Sequence
  Synthetic polypeptide
GRSQDGRIGTAPVYSSQRERRRRRVISAFPSEWHC

SEQ ID NO: 22724 - protein, 16 aa, Artificial Sequence
  Synthetic polypeptide
RNANQNHNEISRQSEW

SEQ ID NO: 22725 - protein, 26 aa, Artificial Sequence
  Synthetic polypeptide
RNANQNHNEISRQSEWRCRNYQRPFS

SEQ ID NO: 22726 - protein, 46 aa, Artificial Sequence
  Synthetic polypeptide
KEDIQPRNMKNSSSSLIIREMQIKTTMRSHASQNGDAETTRGRSAN

SEQ ID NO: 22727 - protein, 233 aa, Artificial Sequence
  Synthetic polypeptide
DLTPVRMEMQKLPEAVQLIEKASMMYLENGTPDTAAMALERAGKLIENVDPEKAVQLYQQTANVFENEERLRQAVELLGKASRLLVRGRRFDEAALSIQKEKNIYKEIENYPTCYKKTIAQVLVHLHRNDYVAAERCVRESYSIPGFNGSEDCAALEQLLEGYDQQDQDQVSDVCNSPLFKYMDNDYAKLGLSLVVPGGGIKKKSPATPQAKPDGVTATAADEEEDEYSGGLC

SEQ ID NO: 22728 - protein, 43 aa, Artificial Sequence
  Synthetic polypeptide
DLTPVRMEMQKLPEAVQLIEKASMMYLENGTPDTAAMALERAG

SEQ ID NO: 22729 - protein, 26 aa, Artificial Sequence
  Synthetic polypeptide
NQKYHLTQQSHYWAYAQRNINHSIET

SEQ ID NO: 22730 - protein, 36 aa, Artificial Sequence
  Synthetic polypeptide
NQKYHLTQQSHYWAYAQRNINHSIETRCRNYQRPFS

SEQ ID NO: 22731 - protein, 13 aa, Artificial Sequence
  Synthetic polypeptide
KRDAETTRGRSAN

SEQ ID NO: 22732 - protein, 304 aa, Artificial Sequence
  Synthetic polypeptide
DLTPVRMVMIKKSGNNRCWPGCGEIGKFLYCWWECKLVQPLWKTVWGFLKDLEPEIPFDPAIPLLGICPKEHKSFYRNEMQKLPEAVQLIEKASMMYLENGTPDTAAMALERAGKLIENVDPEKAVQLYQQTANVFENEERLRQAVELLGKASRLLVRGRRFDEAALSIQKEKNIYKEIENYPTCYKKTIAQVLVHLHRNDYVAAERCVRESYSIPGFNGSEDCAALEQLLEGYDQQDQDQVSDVCNSPLFKYMDNDYAKLGLSLVVPGGGIKKKSPATPQAKPDGVTATAADEEEDEYSGGLC

SEQ ID NO: 22733 - protein, 114 aa, Artificial Sequence
  Synthetic polypeptide
DLTPVRMVMIKKSGNNRCWPGCGEIGKFLYCWWECKLVQPLWKTVWGFLKDLEPEIPFDPAIPLLGICPKEHKSFYRNEMQKLPEAVQLIEKASMMYLENGTPDTAAMALERAG

SEQ ID NO: 22734 - protein, 2587 aa, Artificial Sequence
  Synthetic polypeptide
GLPSHAELLKGADAGNGIRVFVPDIGMFIASLTIWLLCRNIVQKPVTDEAAQSNPEFENEELAEGEKIDSEEALIYEEDFNGGDGVEGELEESTKLKMFRRLASVASKLKEFIGNMITTAGKVVVTILLGSSGMMLPSLTSSVYFFVFLGLCTWWSWCRTFDPLLFSCLCVLLAIFTAGHLIGLYLYQFQFFQEAVPPNDYYARLFGIKSVIQTDCSSTWKIIVNPDLSWYHHANPILLLVMYYTLATLIRIWLQEPLVQDEGTKEEDKALACSPIQITAGRRRSLWYATHYPTDERKLLSMTQDDYKPSDGLLVTVNGNPVDYHTIHPSLPMENGPGKADLYSTPQYRWEPSDESSEKREEEEEEKEEFEEERSREEKRSIKVHAMVSVFQFIMKQSYICALIAMMAWSITYHSWLTFVLLIWSCTLWMIRNRRKYAMISSPFMVVYGNLLLILQYIWSFELPEIKKVPGFLEKKEPGELASKILFTITFWLLLRQHLTEQKALQEKEALLSEVKIGSQENEEKDEELQDIQVEGEPKEEEEEEAKEEKQERKKVEQEEAEEEDEQDIMKVLGNLVVAMFIKYWIYVCGGMFFFVSFEGKIVMYKIIYMVLFLFCVALYQVHYEWWRKILKYFWMSVVIYTMLVLIFIYTYQFENFPGLWQNMTGLKKEKLEDLGLKQFTVAELFTRIFIPTSFLLVCILHLHYFHDRFLELTDLKSIPSKEDNTIYRLAHPEGSLPDLTMMHLTASLEKPEVRKLAEPGEEKLEGYSEKAQKGDLGKDSEESEEDGEEEEESEEEEETSDLRNKWHLVIDRLTVLFLKFLEYFHKLQVFMWWILELHIIKIVSSYIIWVSVKEVSLFNYVFLISWAFALPYAKLRRLASSVCTVWTCVIIVCKMLYQLQTIKPENFSVNCSLPNENQTNIPFNELNKSLLYSAPIDPTEWVGLRKSSPLLVYLRNNLLMLAILAFEVTIYRHQEYYRGRNNLTAPVSRTIFHDITRLHLDDGLINCAKYFINYFFYKFGLETCFLMSVNVIGQRMDFYAMIHACWLIAVLYRRRRKAIAEIWPKYCCFLACIITFQYFICIGIPPAPCRDYPWRFKGASFNDNIIKWLYFPDFIVRPNPVFLVYDFMLLLCASLQRQIFEDENKAAVRIMAGDNVEICMNLDAASFSQHNPVPDFIHCRSYLDMSKVIIFSYLFWFVLTIIFITGTTRISIFCMGYLVACFYFLLFGGDLLLKPIKSILRYWDWLIAYNVFVITMKNILSIGACGYIGTLVHNSCWLIQAFSLACTVKGYQMPAANSPCTLPSGEAGIIWDSICFAFLLLQRRVFMSYYFLHVVADIKASQILASRGAELFQATIVKAVKARIEEEKKSMDQLKRQMDRIKARQQKYKKGKERMLSLTQEPGEGQDMQKLSEEDDEREADKQKAKGKKKQWWRPWVDHASMVRSGDYYLFETDSEEEEEEELKKEDEEPPRRSAFQFVYQAWITDPKTALRQRHKEKKRSAREERKRRRKGSKEGPVEWEDREDEPIKKKSDGPDNIIKRIFNILKFTWVLFLATVDSFTTWLNSISREHIDISTVLRIERCMLTREIKKGNVPTRESIHMYYQNHIMNLSRESGLDTIDEHPGAASGAQTAHRMDSLDSHDSISSEPTQCTMLYSRQGTTETIEEVEAEQEEEAGSTAPEPREAKEYEATGYDVGAMGAEEASLTPEEELTQFSTLDGDVEAPPSYSKAVSFEHLSFGSQDDSAGKNRMAVSPDDSRTDKLGSSILPPLTHELTASELLLKKMFHDDELEESEKFYVGQPRFLLLFYAMYNTLVARSEMVCYFVIILNHMVSASMITLLLPILIFLWAMLSVPRPSRRFWMMAIVYTEVAIVVKYFFQFGFFPWNKNVEVNKDKPYHPPNIIGVEKKEGYVLYDLIQLLALFFHRSILKCHGLWDEDDMTESGMAREESDDELSLGHGRRDSSDSLKSINLAASVESVHVTFPEQQTAVRRKRSGSSSEPSQRSSFSSNRSQRGSTSTRNSSQKGSSVLSIKQKGKRELYMEKLQEHLIKAKAFTIKKTLEIYVPIKQFFYNLIHPEYSAVTDVYVLMFLADTVDFIIIVFGFWAFGKHSAAADITSSLSEDQVPGPFLVMVLIQFGTMVVDRALYLRKTVLGKVIFQVILVFGIHFWMFFILPGVTERKFSQNLVAQLWYFVKCVYFGLSAYQIRCGYPTRVLGNFLTKSYNYVNLFLFQGFRLVPFLTELRAVMDWVWTDTTLSLSSWICVEDIYAHIFILKCWRESEKPIFTMSAQQSQLKVMDQQSFNKFIQAFSRDTGAMQFLENYEKEDITVAELEGNSNSLWTISPPSKQKMIHELLDPNSSFSVVFSWSIQRNLSLGAKSEIATDKLSFPLKNITRKNIAKMIAGNSTESSKTPVTIEKIYPYYVKAPSDSNSKPIKQLLSENNFMDITIILSRDNTTKYNSEWWVLNLTGNRIYNPNSQALELVVFNDKVSPPSLGFLAGYGIMGLYASVVLVIGKFVREFFSGISHSIMFEELPNVDRILKLCTDIFLVRETGELELEEDLYAKLIFLYRSPETMIKWTREKTN

SEQ ID NO: 22735 - protein, 41 aa, Artificial Sequence
  Synthetic polypeptide
GDFPPLHTARLLLPPCEEGCVCFFFCHDFKFPEASPAMLNS

SEQ ID NO: 22736 - protein, 5 aa, Artificial Sequence
  Synthetic polypeptide
TLKGS

SEQ ID NO: 22737 - protein, 2650 aa, Artificial Sequence
  Synthetic polypeptide
GLPSHAELLKGADAGNGIRVFVPDIGMFIASLTIWLLCRNIVQKPVTDEAAQSNPEFENEELAEGEKIDSEEALIYEEDFNGGDGVEGELEESTKLKMFRRLASVASKLKEFIGNMITTAGKVVVTILLGSSGMMLPSLTSSVYFFVFLGLCTWWSWCRTFDPLLFSCLCVLLAIFTAGHLIGLYLYQFQFFQEAVPPNDYYARLFGIKSVIQTDCSSTWKIIVNPDLSWYHHANPILLLVMYYTLATLIRIWLQEPLVQDEGTKEEDKALACSPIQITAGRRRSLWYATHYPTDERKLLSMTQDDYKPSDGLLVTVNGNPVDYHTIHPSLPMENGPGKADLYSTPQYRWEPSDESSEKREEEEEEKEEFEEERSREEKRSIKVHAMVSVFQFIMKQSYICALIAMMAWSITYHSWLTFVLLIWSCTLWMIRNRRKYAMISSPFMVVYGNLLLILQYIWSFELPEIKKVPGFLEKKEPGELASKILFTITFWLLLRQHLTEQKALQEKEALLSEVKIGSQENEEKDEELQDIQVEGEPKEEEEEEAKEEKQERKKVEQEEAEEEDEQDIMKVLGNLVVAMFIKYWIYVCGGMFFFVSFEGKIVMYKIIYMVLFLFCVALYQVHYEWWRKILKYFWMSVVIYTMLVLIFIYTYQFENFPGLWQNMTGLKKEKLEDLGLKQFTVAELFTRIFIPTSFLLVCILHLHYFHDRFLELTDLKSIPSKEDNTIYRLAHPEGSLPDLTMMHLTASLEKPEVRKLAEPGEEKLEGYSEKAQKGDLGKDSEESEEDGEEEEESEEEEETSDLRNKWHLVIDRLTVLFLKFLEYFHKLQVFMWWILELHIIKIVSSYIIWVSVKEVSLFNYVFLISWAFALPYAKLRRLASSVCTVWTCVIIVCKMLYQLQTIKPENFSVNCSLPNENQTNIPFNELNKSLLYSAPIDPTEWVGLRKSSPLLVYLRNNLLMLAILAFEVTIYRHQEYYRGRNNLTAPVSRTIFHDITRLHLDDGLINCAKYFINYFFYKFGLETCFLMSVNVIGQRMDFYAMIHACWLIAVLYRRRRKAIAEIWPKYCCFLACIITFQYFICIGIPPAPCRDYPWRFKGASFNDNIIKWLYFPDFIVRPNPVFLVYDFMLLLCASLQRQIFEDENKAAVRIMAGDNVEICMNLDAASFSQHNPVPDFIHCRSYLDMSKVIIFSYLFWFVLTIIFITGTTRISIFCMGYLVACFYFLLFGGDLLLKPIKSILRYWDWLIAYNVFVITMKNILSIGACGYIGTLVHNSCWLIQAFSLACTVKGYQMPAANSPCTLPSGEAGIIWDSICFAFLLLQRRVFMSYYFLHVVADIKASQILASRGAELFQATIVKAVKARIEEEKKSMDQLKRQMDRIKARQQKYKKGKERMLSLTQEPGEGQDMQKLSEEDDEREADKQKAKGKKKQWWRPWVDHASMVRSGDYYLFETDSEEEEEEELKKEDEEPPRRSAFQFVYQAWITDPKTALRQRHKEKKRSAREERKRRRKGSKEGPVEWEDREDEPIKKKSDGPDNIIKRIFNILKFTWVLFLATVDSFTTWLNSISREHIDISTVLRIERCMLTREIKKGNVPTRESIHMYYQNHIMNLSRESGLDTIDEHPGAASGAQTAHRMDSLDSHDSISSEPTQCTMLYSRQGTTETIEEVEAEQEEEAGSTAPEPREAKEYEATGYDVGAMGAEEASLTPEEELTQFSTLDGDVEAPPSYSKAVSFEHLSFGSQDDSAGKNRMAVSPDDSRTDKLGSSILPPLTHELTASELLLKKMFHDDELEESEKFYVGQPRFLLLFYAMYNTLVARSEMVCYFVIILNHMVSASMITLLLPILIFLWAMLSVPRPSRRFWMMAIVYTEVAIVVKYFFQFGFFPWNKNVEVNKDKPYHPPNIIGVEKKEGYVLYDLIQLLALFFHRSILKCHGLWDEDDMTESGMAREESDDELSLGHGRRDSSDSLKSINLAASVESVHVTFPEQQTAVRRKRSGSSSEPSQRSSFSSNRSQRGSTSTRNSSQKGSSVLSIKQKGKRELYMEKLQEHLIKAKAFTIKKTLEIYVPIKQFFYNLIHPEYSAVTDVYVLMFLADTVDFIIIVFGFWAFGKHSAAADITSSLSEDQVPGPFLVMVLIQFGTMVVDRALYLRKTVLGKVIFQVILVFGIHFWMFFILPGVTERKFSQNLVAQLWYFVKCVYFGLSAYQIRCGYPTRVLGNFLTKSYNYVNLFLFQGFRLVPFLTELRAVMDWVWTDTTLSLSSWICVEDIYAHIFILKCWRESEKRYPQPRGQKKKKVVKYGMGGMIIVLLICIVWFPLLFMSLIKSVAGVINQPLDVSVTITLGGYQPIFTMSAQQSQLKVMDQQSFNKFIQAFSRDTGAMQFLENYEKEDITVAELEGNSNSLWTISPPSKQKMIHELLDPNSSFSVVFSWSIQRNLSLGAKSEIATDKLSFPLKNITRKNIAKMIAGNSTESSKTPVTIEKIYPYYVKAPSDSNSKPIKQLLSENNFMDITIILSRDNTTKYNSEWWVLNLTGNRIYNPNSQALELVVFNDKVSPPSLGFLAGYGIMGLYASVVLVIGKFVREFFSGISHSIMFEELPNVDRILKLCTDIFLVRETGELELEEDLYAKLIFLYRSPETMIKWTREKTN

SEQ ID NO: 22738 - protein, 2675 aa, Artificial Sequence
  Synthetic polypeptide
GLPSHAELLKGADAGNGIRVFVPDIGMFIASLTIWLLCRNIVQKPVTDEAAQSNPEFENEELAEGEKIDSEEALIYEEDFNGGDGVEGELEESTKLKMFRRLASVASKLKEFIGNMITTAGKVVVTILLGSSGMMLPSLTSSVYFFVFLGLCTWWSWCRTFDPLLFSCLCVLLAIFTAGHLIGLYLYQFQFFQEAVPPNDYYARLFGIKSVIQTDCSSTWKIIVNPDLSWYHHANPILLLVMYYTLATLIRIWLQEPLVQDEGTKEEDKALACSPIQITAGRRRSLWYATHYPTDERKLLSMTQDDYKPSDGLLVTVNGNPVDYHTIHPSLPMENGPGKADLYSTPQYRWEPSDESSEKREEEEEEKEEFEEERSREEKRSIKVHAMVSVFQFIMKQSYICALIAMMAWSITYHSWLTFVLLIWSCTLWMIRNRRKYAMISSPFMVVYGNLLLILQYIWSFELPEIKKVPGFLEKKEPGELASKILFTITFWLLLRQHLTEQKALQEKEALLSEVKIGSQENEEKDEELQDIQVEGEPKEEEEEEAKEEKQERKKVEQEEAEEEDEQDIMKVLGNLVVAMFIKYWIYVCGGMFFFVSFEGKIVMYKIIYMVLFLFCVALYQVHYEWWRKILKYFWMSVVIYTMLVLIFIYTYQFENFPGLWQNMTGLKKEKLEDLGLKQFTVAELFTRIFIPTSFLLVCILHLHYFHDRFLELTDLKSIPSKEDNTIYSHAKVNGRVYLIINSIKKKLPIHQNELAHPEGSLPDLTMMHLTASLEKPEVRKLAEPGEEKLEGYSEKAQKGDLGKDSEESEEDGEEEEESEEEEETSDLRNKWHLVIDRLTVLFLKFLEYFHKLQVFMWWILELHIIKIVSSYIIWVSVKEVSLFNYVFLISWAFALPYAKLRRLASSVCTVWTCVIIVCKMLYQLQTIKPENFSVNCSLPNENQTNIPFNELNKSLLYSAPIDPTEWVGLRKSSPLLVYLRNNLLMLAILAFEVTIYRHQEYYRGRNNLTAPVSRTIFHDITRLHLDDGLINCAKYFINYFFYKFGLETCFLMSVNVIGQRMDFYAMIHACWLIAVLYRRRRKAIAEIWPKYCCFLACIITFQYFICIGIPPAPCRDYPWRFKGASFNDNIIKWLYFPDFIVRPNPVFLVYDFMLLLCASLQRQIFEDENKAAVRIMAGDNVEICMNLDAASFSQHNPVPDFIHCRSYLDMSKVIIFSYLFWFVLTIIFITGTTRISIFCMGYLVACFYFLLFGGDLLLKPIKSILRYWDWLIAYNVFVITMKNILSIGACGYIGTLVHNSCWLIQAFSLACTVKGYQMPAANSPCTLPSGEAGIIWDSICFAFLLLQRRVFMSYYFLHVVADIKASQILASRGAELFQATIVKAVKARIEEEKKSMDQLKRQMDRIKARQQKYKKGKERMLSLTQEPGEGQDMQKLSEEDDEREADKQKAKGKKKQWWRPWVDHASMVRSGDYYLFETDSEEEEEEELKKEDEEPPRRSAFQFVYQAWITDPKTALRQRHKEKKRSAREERKRRRKGSKEGPVEWEDREDEPIKKKSDGPDNIIKRIFNILKFTWVLFLATVDSFTTWLNSISREHIDISTVLRIERCMLTREIKKGNVPTRESIHMYYQNHIMNLSRESGLDTIDEHPGAASGAQTAHRMDSLDSHDSISSEPTQCTMLYSRQGTTETIEEVEAEQEEEAGSTAPEPREAKEYEATGYDVGAMGAEEASLTPEEELTQFSTLDGDVEAPPSYSKAVSFEHLSFGSQDDSAGKNRMAVSPDDSRTDKLGSSILPPLTHELTASELLLKKMFHDDELEESEKFYVGQPRFLLLFYAMYNTLVARSEMVCYFVIILNHMVSASMITLLLPILIFLWAMLSVPRPSRRFWMMAIVYTEVAIVVKYFFQFGFFPWNKNVEVNKDKPYHPPNIIGVEKKEGYVLYDLIQLLALFFHRSILKCHGLWDEDDMTESGMAREESDDELSLGHGRRDSSDSLKSINLAASVESVHVTFPEQQTAVRRKRSGSSSEPSQRSSFSSNRSQRGSTSTRNSSQKGSSVLSIKQKGKRELYMEKLQEHLIKAKAFTIKKTLEIYVPIKQFFYNLIHPEYSAVTDVYVLMFLADTVDFIIIVFGFWAFGKHSAAADITSSLSEDQVPGPFLVMVLIQFGTMVVDRALYLRKTVLGKVIFQVILVFGIHFWMFFILPGVTERKFSQNLVAQLWYFVKCVYFGLSAYQIRCGYPTRVLGNFLTKSYNYVNLFLFQGFRLVPFLTELRAVMDWVWTDTTLSLSSWICVEDIYAHIFILKCWRESEKRYPQPRGQKKKKVVKYGMGGMIIVLLICIVWFPLLFMSLIKSVAGVINQPLDVSVTITLGGYQPIFTMSAQQSQLKVMDQQSFNKFIQAFSRDTGAMQFLENYEKEDITVAELEGNSNSLWTISPPSKQKMIHELLDPNSSFSVVFSWSIQRNLSLGAKSEIATDKLSFPLKNITRKNIAKMIAGNSTESSKTPVTIEKIYPYYVKAPSDSNSKPIKQLLSENNFMDITIILSRDNTTKYNSEWWVLNLTGNRIYNPNSQALELVVFNDKVSPPSLGFLAGYGIMGLYASVVLVIGKFVREFFSGISHSIMFEELPNVDRILKLCTDIFLVRETGELELEEDLYAKLIFLYRSPETMIKWTREKTN

SEQ ID NO: 22739 - protein, 1371 aa, Artificial Sequence
  Synthetic polypeptide
GLPSHAELLKGADAGNGIRVFVPDIGMFIASLTIWLLCRNIVQKPVTDEAAQSNPEFENEELAEGEKIDSEEALIYEEDFNGGDGVEGELEESTKLKMFRRLASVASKLKEFIGNMITTAGKVVVTILLGSSGMMLPSLTSSVYFFVFLGLCTWWSWCRTFDPLLFSCLCVLLAIFTAGHLIGLYLYQFQFFQEAVPPNDYYARLFGIKSVIQTDCSSTWKIIVNPDLSWYHHANPILLLVMYYTLATLIRIWLQEPLVQDEGTKEEDKALACSPIQITAGRRRSLWYATHYPTDERKLLSMTQDDYKPSDGLLVTVNGNPVDYHTIHPSLPMENGPGKADLYSTPQYRWEPSDESSEKREEEEEEKEEFEEERSREEKRSIKVHAMVSVFQFIMKQSYICALIAMMAWSITYHSWLTFVLLIWSCTLWMIRNRRKYAMISSPFMVVYGNLLLILQYIWSFELPEIKKVPGFLEKKEPGELASKILFTITFWLLLRQHLTEQKALQEKEALLSEVKIGSQENEEKDEELQDIQVEGEPKEEEEEEAKEEKQERKKVEQEEAEEEDEQDIMKVLGNLVVAMFIKYWIYVCGGMFFFVSFEGKIVMYKIIYMVLFLFCVALYQVHYEWWRKILKYFWMSVVIYTMLVLIFIYTYQFENFPGLWQNMTGLKKEKLEDLGLKQFTVAELFTRIFIPTSFLLVCILHLHYFHDRFLELTDLKSIPSKEDNTIYSHAKVNGRVYLIINRLAHPEGSLPDLTMMHLTASLEKPEVRKLAEPGEEKLEGYSEKAQKGDLGKDSEESEEDGEEEEESEEEEETSDLRNKWHLVIDRLTVLFLKFLEYFHKLQVFMWWILELHIIKIVSSYIIWVSVKEVSLFNYVFLISWAFALPYAKLRRLASSVCTVWTCVIIVCKMLYQLQTIKPENFSVNCSLPNENQTNIPFNELNKSLLYSAPIDPTEWVGLRKSSPLLVYLRNNLLMLAILAFEVTIYRHQEYYRGRNNLTAPVSRTIFHDITRLHLDDGLINCAKYFINYFFYKFGLETCFLMSVNVIGQRMDFYAMIHACWLIAVLYRRRRKAIAEIWPKYCCFLACIITFQYFICIGIPPAPCRDYPWRFKGASFNDNIIKWLYFPDFIVRPNPVFLVYDFMLLLCASLQRQIFEDENKAAVRIMAGDNVEICMNLDAASFSQHNPVPDFIHCRSYLDMSKVIIFSYLFWFVLTIIFITGTTRISIFCMGYLVACFYFLLFGGDLLLKPIKSILRYWDWLIAYNVFVITMKNILSIGACGYIGTLVHNSCWLIQAFSLACTVKGYQMPAANSPCTLPSGEAGIIWDSICFAFLLLQRRVFMSYYFLHVVADIKASQILASRWLNFSRPQL

SEQ ID NO: 22740 - protein, 97 aa, Artificial Sequence
  Synthetic polypeptide
GQARWLTPVIPALWEAEVGRSQAQKYVPRAALVDLEPGTMDSVRSGPFGQLFRPDNFIFGQTGAGNNWAKGHYTEGAELVDAVLDVVRKECEHCDCL

SEQ ID NO: 22741 - protein, 25 aa, Artificial Sequence
  Synthetic polypeptide
SQHFGRPRWADHKLRNMCPGPPWWT

SEQ ID NO: 22742 - protein, 53 aa, Artificial Sequence
  Synthetic polypeptide
PGTVAHPCNPSTLGGRGGQITSSEICAQGRPGGLRARHHGQRAVWAFWAAFPA

SEQ ID NO: 22743 - protein, 413 aa, Artificial Sequence
  Synthetic polypeptide
GQARWLTPVIPALWEAEVGRSQAQKYVPRAALVDLEPGTMDSVRSGPFGQLFRPDNFIFGQTGAGNNWAKGHYTEGAELVDAVLDVVRKECEHCDCLQGFQLTHSLGGGTGSGMGTLLISKIREEFPDRIMNTFSVMPSPKVSDTVVEPYNATLSVHQLVENTDETYCIDNEALYDICFRTLKLTTPTYGDLNHLVSATMSGVTTSLRFPGQLNADLRKLAVNMVPFPRLHFFMPGFAPLTSRGSQQYRALTVPELTQQMFDARNMMAACDPRHGRYLTVATVFRGPMSMKEVDEQMLAIQSKNSSYFVEWIPNNVKVAVCDIPPRGLKMASTFIGNSTAIQELFKRISEQFSAMFRRKAFLHWFTGEGMDEMEFTEAESNMNDLVSEYQQYQDATANDGEEAFEDEEEEIDG

SEQ ID NO: 22744 - protein, 71 aa, Artificial Sequence
  Synthetic polypeptide
GQARWLTPVIPALWEAEVGRSQAQKYVPRAALVDLEPGTMDSVRSGPFGQLFRPDNFIFAHLHRGTEEKQE

SEQ ID NO: 22745 - protein, 77 aa, Artificial Sequence
  Synthetic polypeptide
GQARWLTPVIPALWEAEVGRSQAQKYVPRAALVDLEPGTMDSVRSGPFGQLFRPDNFIFATYFEDLSISQVWLPHSC

SEQ ID NO: 22746 - protein, 63 aa, Artificial Sequence
  Synthetic polypeptide
GQARWLTPVIPALWEAEVGRSQAQKYVPRAALVDLEPGTMDSVRSGPFGQLFRPDNFIFELPL

SEQ ID NO: 22747 - protein, 108 aa, Artificial Sequence
  Synthetic polypeptide
GQARWLTPVIPALWEAEVGRSQAQKYVPRAALVDLEPGTMDSVRSGPFGQLFRPDNFIFGMFRQTHIFTHIQWSQLYTLFSTLVFLPGSPATYFEDLSISQVWLPHSC

SEQ ID NO: 22748 - protein, 71 aa, Artificial Sequence
  Synthetic polypeptide
GQARWLTPVIPALWEAEVGRSQAQKYVPRAALVDLEPGTMDSVRSGPFGQLFRPDNFIFAHHGITSHPPCR

SEQ ID NO: 22749 - protein, 82 aa, Artificial Sequence
  Synthetic polypeptide
GQARWLTPVIPALWEAEVGRSQAQKYVPRAALVDLEPGTMDSVRSGPFGQLFRPDNFIFVTFLRATGAGTVSTSAHHIATPA

SEQ ID NO: 22750 - protein, 103 aa, Artificial Sequence
  Synthetic polypeptide
GQARWLTPVIPALWEAEVGRSQAQKYVPRAALVDLEPGTMDSVRSGPFGQLFRPDNFIFGQTGAGNNWAKGASSSRTRWAAARAQAWARCSSARSVRSSRTAS

SEQ ID NO: 22751 - protein, 180 aa, Artificial Sequence
  Synthetic polypeptide
ECVHMDVESGTSDDGDSEGHPWDTVIQAAMRKYPNPMNPSVLGVDVLQRRVDGRGRLHSLRLLSTEWGLPSLVRAILGTSRTLTYIREHSVVDPVEKKMELCSTNITLTNLVSVNERLVYTPHPENPEMTVLTQEAIITVKGISLGSYLESLMANTISSNAKKGWAAIEWIIEHSESAVS

SEQ ID NO: 22752 - protein, 56 aa, Artificial Sequence
  Synthetic polypeptide
VKPGPERQVSHVPTPKWVLKNVFTWMWRVERQMMETLKATRGTRSSRRPCASTRTR

SEQ ID NO: 22753 - protein, 62 aa, Artificial Sequence
  Synthetic polypeptide
RPPVGHGHPGGHAQVPEPDEPERAGRGCATAPRGRPRPPAQLAPAQHRVGAAQPRESDFGNQ

SEQ ID NO: 22754 - protein, 127 aa, Artificial Sequence
  Synthetic polypeptide
ECVHMDVESGTSDDGDSEGHPWDTVIQAAMRKYPNPMNPSVLGVDVLQRRVDGRGRLHSLRLLSTEWGLPSLVRAILGTSRTLTYIREHSVVDPVEKKMELCSTNITLTNLVSVNERLVYTPHPENP

SEQ ID NO: 22755 - protein, 168 aa, Artificial Sequence
  Synthetic polypeptide
ECVHMDVESGTSDDGDSEGHPWDTVIQAAMRKYPNPMNPSVLGVDVLQRRVDGRGRLHSLRLLSTEWGLPSLVRAILGTSRTLTYIREHSVVDPVEKKMELCSTNITLTNLVSVNERLVYTPHPENPEMTVLTQEAIITVKGISLGSYLESLMANTISSNAKKGWAAI

SEQ ID NO: 22756 - protein, 64 aa, Artificial Sequence
  Synthetic polypeptide
VIQPPVGHGHPGGHAQVPEPDEPERAGRGCATAPRGRPRPPAQLAPAQHRVGAAQPRESDFGNQ

SEQ ID NO: 22757 - protein, 164 aa, Artificial Sequence
  Synthetic polypeptide
SFSHPWDTVIQAAMRKYPNPMNPSVLGVDVLQRRVDGRGRLHSLRLLSTEWGLPSLVRAILGTSRTLTYIREHSVVDPVEKKMELCSTNITLTNLVSVNERLVYTPHPENPEMTVLTQEAIITVKGISLGSYLESLMANTISSNAKKGWAAIEWIIEHSESAVS

SEQ ID NO: 22758 - protein, 20 aa, Artificial Sequence
  Synthetic polypeptide
HSATRGTRSSRRPCASTRTR

SEQ ID NO: 22759 - protein, 111 aa, Artificial Sequence
  Synthetic polypeptide
SFSHPWDTVIQAAMRKYPNPMNPSVLGVDVLQRRVDGRGRLHSLRLLSTEWGLPSLVRAILGTSRTLTYIREHSVVDPVEKKMELCSTNITLTNLVSVNERLVYTPHPENP

SEQ ID NO: 22760 - protein, 152 aa, Artificial Sequence
  Synthetic polypeptide
SFSHPWDTVIQAAMRKYPNPMNPSVLGVDVLQRRVDGRGRLHSLRLLSTEWGLPSLVRAILGTSRTLTYIREHSVVDPVEKKMELCSTNITLTNLVSVNERLVYTPHPENPEMTVLTQEAIITVKGISLGSYLESLMANTISSNAKKGWAAI

SEQ ID NO: 22761 - protein, 108 aa, Artificial Sequence
  Synthetic polypeptide
VIQILGTSRTLTYIREHSVVDPVEKKMELCSTNITLTNLVSVNERLVYTPHPENPEMTVLTQEAIITVKGISLGSYLESLMANTISSNAKKGWAAIEWIIEHSESAVS

SEQ ID NO: 22762 - protein, 10 aa, Artificial Sequence
  Synthetic polypeptide
SFRFWEPVGH

SEQ ID NO: 22763 - protein, 7 aa, Artificial Sequence
  Synthetic polypeptide
HSDFGNQ

SEQ ID NO: 22764 - protein, 55 aa, Artificial Sequence
  Synthetic polypeptide
VIQILGTSRTLTYIREHSVVDPVEKKMELCSTNITLTNLVSVNERLVYTPHPENP

SEQ ID NO: 22765 - protein, 90 aa, Artificial Sequence
  Synthetic polypeptide
VIQILGTSRTLTYIREHSVVDPVEKKMELCSTNITLTNLVSVNERLVYTPHPENPEMTVLTQEAIITVKGISLGSYLESLMANTISSNAK

SEQ ID NO: 22766 - protein, 96 aa, Artificial Sequence
  Synthetic polypeptide
VIQILGTSRTLTYIREHSVVDPVEKKMELCSTNITLTNLVSVNERLVYTPHPENPEMTVLTQEAIITVKGISLGSYLESLMANTISSNAKKGWAAI

SEQ ID NO: 22767 - protein, 645 aa, Artificial Sequence
  Synthetic polypeptide
AKIVLPHSSLGDRVIESLGIIIYKALDYGLKENEERELSPPLEQLIDHMANTVEADGSNDEGYEAAEEGLGDEDEKRKISAIRSYRDVMKLCAAHLPTESDAPNHYQAVCRALFAETMELHTFLTKIKSAKENLKKIQEMEKSDESSTDLEELKNADWARFWVQVMRDLRNGVKLKKVQERQYNPLPIEYQLTPYEMLMDDIRCKRYTLRKVMVNGDIPPRLKKSAHEIILDFIRSRPPLNPVSARKLKPTPPRPRSLHERILEEIKAERKLRPVSPEEIRRSRLAMRPLSMSYSFDLSDVTTPESTKNLVESSMVNGGLTSQTKENGLSTSQQVPAQRKKLLRAPTLAELDSSESEEETLHKSTSSSSVSPSFPEEPVLEAVSTRKKPPKFLPISSTPQPERRQPPQRRHSIEKETPTNVRQFLPPSRQSSRSLEEFCYPVECLALTVEEVMHIRQVLVKAELEKYQQYKDIYTALKKGKLCFCCRTRRFSFFTWSYTCQFCKRPVCSQCCKKMRLPSKPYSTLPIFSLGPSALQRGESSMRSEKPSTAHHRPLRSIARFSSKSKSMDKSDEELQFPKELMEDWSTMEVCVDCKKFISEIISSSRRSLVLANKRARLKRKTQSFYMSSPGPSEYCPSERTISEI

SEQ ID NO: 22768 - protein, 51 aa, Artificial Sequence
  Synthetic polypeptide
SQLLGRLRQKNHLNLGGGGCSEPRSCYRIPAWATESLNLWELLFIKHWTMV

SEQ ID NO: 22769 - protein, 23 aa, Artificial Sequence
  Synthetic polypeptide
TWEVEVAVSQDRATAFQPGRQSH

SEQ ID NO: 22770 - protein, 631 aa, Artificial Sequence
  Synthetic polypeptide
AKIVLPHSSLGDRVIESLGIIIYKALDYGLKENEERELSPPLEQLIDHMANTVEADGSNDEGYEAAEEGLGDEDEKRKISAIRSYRDVMKLCAAHLPTESDAPNHYQAVCRALFAETMELHTFLTKIKSAKENLKKIQEMEKSDESSTDLEELKNADWARFWVQVMRDLRNGVKLKKVQERQYNPLPIEYQLTPYEMLMDDIRCKRYTLRKVMVNGDIPPRLKKSAHEIILDFIRSRPPLNPVSARKLKPTPPRPRSLHERILEEIKAERKLRPVSPEEIRRSRLDVTTPESTKNLVESSMVNGGLTSQTKENGLSTSQQVPAQRKKLLRAPTLAELDSSESEEETLHKSTSSSSVSPSFPEEPVLEAVSTRKKPPKFLPISSTPQPERRQPPQRRHSIEKETPTNVRQFLPPSRQSSRSLEEFCYPVECLALTVEEVMHIRQVLVKAELEKYQQYKDIYTALKKGKLCFCCRTRRFSFFTWSYTCQFCKRPVCSQCCKKMRLPSKPYSTLPIFSLGPSALQRGESSMRSEKPSTAHHRPLRSIARFSSKSKSMDKSDEELQFPKELMEDWSTMEVCVDCKKFISEIISSSRRSLVLANKRARLKRKTQSFYMSSPGPSEYCPSERTISEI

SEQ ID NO: 22771 - protein, 206 aa, Artificial Sequence
  Synthetic polypeptide
AKIVLPHSSLGDRVIESLGIIIYKALDYGLKENEERELSPPLEQLIDHMANTVEADGSNDEGYEAAEEGLGDEDEKRKISAIRSYRDVMKLCAAHLPTESDAPNHYQAVCRALFAETMELHTFLTKIKSAKENLKKIQEMEKSDESSTDLEELKNADWARFWVQVMRDLRNGVKLKKVQERQYNPLPIEYQLTPYEMLMDDIRCKR

SEQ ID NO: 22772 - protein, 138 aa, Artificial Sequence
  Synthetic polypeptide
AKIVLPHSSLGDRVIESLGIIIYKALDYGLKENEERELSPPLEQLIDHMANTVEADGSNDEGYEAAEEGLGDEDEKRKISAIRSYRDVMKLCAAHLPTESDAPNHYQAVCRALFAETMELHTFLTKIKSAKENLKKIQ

SEQ ID NO: 22773 - protein, 131 aa, Artificial Sequence
  Synthetic polypeptide
AKIVLPHSSLGDRVIESLGIIIYKALDYGLKENEERELSPPLEQLIDHMANTVEADGSNDEGYEAAEEGLGDEDEKRKISAIRSYRDVMKLCAAHLPTESDAPNHYQAVCRALFAETMELHTFLTKIKSAK

SEQ ID NO: 22774 - protein, 56 aa, Artificial Sequence
  Synthetic polypeptide
GQVGGLTPIIPALWEAEAGGSLEPRNSKPASTTKLNVHSTGQQMTKRCCLKKQDSV

SEQ ID NO: 22775 - protein, 25 aa, Artificial Sequence
  Synthetic polypeptide
SQHFGRLRQEGHLSPGIQNQPRQQS

SEQ ID NO: 22776 - protein, 278 aa, Artificial Sequence
  Synthetic polypeptide
AQEFKTSLDNKVKCAQYWPTDDQEMLFKETGFSVKLLSEDVKSYYTVHLLQLENINSGETRTISHFHYTTWPDFGVPESPASFLNFLFKVRESGSLNPDHGPAVIHCSAGIGRSGTFSLVDTCLVLMEKGDDINIKQVLLNMRKYRMGLIQTPDQLRFSYMAIIEGAKCIKGDSSIQKRWKELSKEDLSPAFDHSPNKIMTEKYNGNRIGLEEEKLTGDRCTGLSSKMQDTMEENSESALRKRIREDRKATTAQKVQQMKQRLNENERKRKRPRLTDT

SEQ ID NO: 22777 - protein, 301 aa, Artificial Sequence
  Synthetic polypeptide
AQEFKTSLDNKVKCAQYWPTDDQEMLFKETGFSVKLLSEDVKSYYTVHLLQLENINYIENLWITLYLKLLMLDVKRSLKSGETRTISHFHYTTWPDFGVPESPASFLNFLFKVRESGSLNPDHGPAVIHCSAGIGRSGTFSLVDTCLVLMEKGDDINIKQVLLNMRKYRMGLIQTPDQLRFSYMAIIEGAKCIKGDSSIQKRWKELSKEDLSPAFDHSPNKIMTEKYNGNRIGLEEEKLTGDRCTGLSSKMQDTMEENSESALRKRIREDRKATTAQKVQQMKQRLNENERKRKRPRLTDT

SEQ ID NO: 22778 - protein, 244 aa, Artificial Sequence
  Synthetic polypeptide
AQEFKTSLDNKVKCAQYWPTDDQEMLFKETGFSVKLLSEDVKSYYTVHLLQLENINSGETRTISHFHYTTWPDFGVPESPASFLNFLFKVRESGSLNPDHGPAVIHCSAGIGRSGTFSLVDTCLVLMEKGDDINIKQVLLNMRKYRMGLIQTPDQLRFSYMAIIEGAKCIKGDSSIQKRWKELSKEDLSPAFDHSPNKIMTEKYNGNRIGLEEEKLTGDRCTGLSSKMQDTMEENSERPRLTDT

SEQ ID NO: 22779 - protein, 306 aa, Artificial Sequence
  Synthetic polypeptide
AQEFKTSLDNKVKCAQYWPTDDQEMLFKETGFSVKLLSEDVKSYYTVHLLQLENINSGETRTISHFHYTTWPDFGVPESPASFLNFLFKVRESGSLNPDHGPAVIHCSAGIGRSGTFSLVDTCLVLMEKGDDINIKQVLLNMRKYRMGLIQTPDQLRFSYMAIIEGAKCIKGDSSIQKRWKELSKEDLSPAFDHSPNKIMTEKYNGNRIGLEEEKLTGDRCTGLSSKMQDTMEENSESALRKRIREDRKATTAQKVQQMKQRLNENERKRKRWLYWQPILTKMGFMSVILVGAFVGWTLFFQQNAL

SEQ ID NO: 22780 - protein, 56 aa, Artificial Sequence
  Synthetic polypeptide
AQEFKTSLDNKVKCAQYWPTDDQEMLFKETGFSVKLLSEDVKSYYTVHLLQLENIN

SEQ ID NO: 22781 - protein, 58 aa, Artificial Sequence
  Synthetic polypeptide
AQEFKTSLDNKVKCAQYWPTDDQEMLFKETGFSVKLLSEDVKSYYTVHLLQLENINVR

SEQ ID NO: 22782 - protein, 43 aa, Artificial Sequence
  Synthetic polypeptide
TGLELNRGQSAVFFYRIHCLFVGGENPPHIWSQMSSVLMILRM

SEQ ID NO: 22783 - protein, 631 aa, Artificial Sequence
  Synthetic polypeptide
RTVSCFFLQNSLLICWWRKSSTHLVADVFCFNDFEDVSSVESTFSLFGKPTTENSQSTKVEEDFNLTTKEGATKTVTGQQERDIGIIERAPQDQTNKMPTSELGRKEDTKSTSDSEIISVSDTQNYECLPEATYQKEIKTTNGKIEESPEKPSHFEPATEMQNSVPNKGLEWKNKQTLRADSTTLSKILDALPSCERGRELKKDNCEQITAKMEQTKNKFCVLQKELSEAKEIKSQLENQKAKWEQELCSVRLTLNQEEEKRRNVDILKEKIRPEEQLRKKLEVKQQLEQTLRIQDIELKSVTSNLNQVSHTHESENDLFHENCMLKKEIAMLKLEVATLKHQHQVKENKYFEDIKILQEKNAELQMTLKLKQKTVTKRASQYREQLKVLTAENTMLTSKLKEKQDKEILETEIESHHPRLASALQDHDQSVTSRKNQELAFHSAGDAPLQGIMNVDVSNTIYNNEVLHQPLYEAQRKSKSPKINLNYAGDDLRENALVSEHAQRDRCETQCQMKKAEHMYQNEQDNVDKHTEQQESLEQKLFQLESKNRWLRQQLVYAHKKVNKSKVTINIQFPEMKMQRHLNEKNEEVFNYGNHLKERIDQYEKEKAEREVSIKKYKYFSNFLKESGLG

SEQ ID NO: 22784 - protein, 455 aa, Artificial Sequence
  Synthetic polypeptide
CLPHDSTTLSKILDALPSCERGRELKKDNCEQITAKMEQTKNKFCVLQKELSEAKEIKSQLENQKAKWEQELCSVRLTLNQEEEKRRNVDILKEKIRPEEQLRKKLEVKQQLEQTLRIQDIELKSVTSNLNQVSHTHESENDLFHENCMLKKEIAMLKLEVATLKHQHQVKENKYFEDIKILQEKNAELQMTLKLKQKTVTKRASQYREQLKVLTAENTMLTSKLKEKQDKEILETEIESHHPRLASALQDHDQSVTSRKNQELAFHSAGDAPLQGIMNVDVSNTIYNNEVLHQPLYEAQRKSKSPKINLNYAGDDLRENALVSEHAQRDRCETQCQMKKAEHMYQNEQDNVDKHTEQQESLEQKLFQLESKNRWLRQQLVYAHKKVNKSKVTINIQFPEMKMQRHLNEKNEEVFNYGNHLKERIDQYEKEKAEREVSIKKYKYFSNFLKESGLG

SEQ ID NO: 22785 - protein, 58 aa, Artificial Sequence
  Synthetic polypeptide
YNAFHMIQLPYQKSWMHFLLVKEEGNLKKITVNKLQQKWNKRKISFVYYKRNCQKRKK

SEQ ID NO: 22786 - protein, 23 aa, Artificial Sequence
  Synthetic polypeptide
ADRSLKAWSSRPAWPMWFSSPTA

SEQ ID NO: 22787 - protein, 316 aa, Artificial Sequence
  Synthetic polypeptide
SQHFGMPRQTDHLRPGVRDQPGQCGSAPQQHSILSNQTSKSSDNRETPRNHSLPKCNSHLEITIPKDLKLKEAEKTDEKQLIIDAGQKRFGAVSCNVCGMLYTASNPEDETQHLLFHNQFISAVKYVGWKKERILAEYPDGRIIMVLPEDPKYALKKVDEIREMVDNDLGFQQAPLMCYSRTKTLLFISNDKKVVGCLIAEHIQWGYRVIEEKLPVIRSEEEKVRFERQKAWCCSTLPEPAICGISRIWVFSMMRRKKIASRMIECLRSNFIYGSYLSKEEIAFSDPTPDGKLFATQYCGTGQFLVYNFINGQNST

SEQ ID NO: 22788 - protein, 48 aa, Artificial Sequence
  Synthetic polypeptide
GLEFETSLANVVQLPNSIVFSVTRHLKAVITGRHHEIILCLSVIPIWR

SEQ ID NO: 22789 - protein, 177 aa, Artificial Sequence
  Synthetic polypeptide
SQHFGMPRQTDHLRPGVRDQPGQCGSAPQQHSILSNQTSKSSDNRETPRNHSLPKCNSHLEITIPKDLKLKEAEKTDEKQLIIDAGQKRFGAVSCNVCGMLYTASNPEDETQHLLFHNQFISAVKYVVLLINHHECGSEEEFITSLFLSMFNFRYTQRSFSFPIRFLEGLEERKNSG

SEQ ID NO: 22790 - protein, 63 aa, Artificial Sequence
  Synthetic polypeptide
PGVVAHAFNPRTFGRLRQLDHLRSGVRDQLGQHEFQPMFGIQARKQSSGKCYCCFDSAQSSKN

SEQ ID NO: 22791 - protein, 341 aa, Artificial Sequence
  Synthetic polypeptide
GQEFETSLDSMNFSQCLESKLENSPVENVTAASTLLSQAKIDTGENKFPGSAPQQHSILSNQTSKSSDNRETPRNHSLPKCNSHLEITIPKDLKLKEAEKTDEKQLIIDAGQKRFGAVSCNVCGMLYTASNPEDETQHLLFHNQFISAVKYVGWKKERILAEYPDGRIIMVLPEDPKYALKKVDEIREMVDNDLGFQQAPLMCYSRTKTLLFISNDKKVVGCLIAEHIQWGYRVIEEKLPVIRSEEEKVRFERQKAWCCSTLPEPAICGISRIWVFSMMRRKKIASRMIECLRSNFIYGSYLSKEEIAFSDPTPDGKLFATQYCGTGQFLVYNFINGQNST

SEQ ID NO: 22792 - protein, 202 aa, Artificial Sequence
  Synthetic polypeptide
GQEFETSLDSMNFSQCLESKLENSPVENVTAASTLLSQAKIDTGENKFPGSAPQQHSILSNQTSKSSDNRETPRNHSLPKCNSHLEITIPKDLKLKEAEKTDEKQLIIDAGQKRFGAVSCNVCGMLYTASNPEDETQHLLFHNQFISAVKYVVLLINHHECGSEEEFITSLFLSMFNFRYTQRSFSFPIRFLEGLEERKNSG

SEQ ID NO: 22793 - protein, 37 aa, Artificial Sequence
  Synthetic polypeptide
GQARWLTPVIPALWEAKAGGSQDVWFLTTEEWRGRIS

SEQ ID NO: 22794 - protein, 17 aa, Artificial Sequence
  Synthetic polypeptide
SQHFGKPRQADHKMCGF

SEQ ID NO: 22795 - protein, 261 aa, Artificial Sequence
  Synthetic polypeptide
PGTVAHACNPSTLGSQGRRITRCVVFNNRGVAGENLLTPRTYCCANTEDLETVIHHVHSLYPSAPFLAAGVSMGGMLLLNYLGKIGSKTPLMAAATFSVGWNTFACSESLEKPLNWLLFNYYLTTCLQSSVNKHRHMFVKQVDMDHVMKAKSIREFDKRFTSVMFGYQTIDDYYTDASPSPRLKSVGIPVLCLNSVDDVFSPSHAIPIETAKQNPNVALVLTSYGGHIGFLEGIWPRQSTYMDRVFKQFVQAMVEHGHELS

SEQ ID NO: 22796 - protein, 38 aa, Artificial Sequence
  Synthetic polypeptide
GQARWLTPVIPALWEAKAGGSQDVWFLTTEEWRGRISC

SEQ ID NO: 22797 - protein, 37 aa, Artificial Sequence
  Synthetic polypeptide
PGTVAHACNPSTLGSQGRRITRCVVFNNRGVAGENLL

SEQ ID NO: 22798 - protein, 32 aa, Artificial Sequence
  Synthetic polypeptide
SQHFGSPRRVDHLRSRVRDQPDQNETPVSDRG

SEQ ID NO: 22799 - protein, 366 aa, Artificial Sequence
  Synthetic polypeptide
GQEFETSLTKMKPQLVTGGESFSRFLQDHCPVVTETYYPTVWCWEGRGQTLLRPFITSKPPVQYRNELIKTADGGQISLDWFDNDNSTCYMDASTRPTILLLPGLTGTSKESYILHMIHLSEELGYRCVVFNNRGVAGENLLTPRTYCCANTEDLETVIHHVHSLYPSAPFLAAGVSMGGMLLLNYLGKIGSKTPLMAAATFSVGWNTFACSESLEKPLNWLLFNYYLTTCLQSSVNKHRHMFVKQVDMDHVMKAKSIREFDKRFTSVMFGYQTIDDYYTDASPSPRLKSVGIPVLCLNSVDDVFSPSHAIPIETAKQNPNVALVLTSYGGHIGFLEGIWPRQSTYMDRVFKQFVQAMVEHGHELS

SEQ ID NO: 22800 - protein, 313 aa, Artificial Sequence
  Synthetic polypeptide
GQEFETSLTKMKPQLVTGGESFSRFLQDHCPVVTETYYPTVWCWEGRGQTLLRPFITSKPPVQYRNELIKTADGGQISLDWFDNDNSTCYMDASTRPTILLLPGLTGTSKESYILHMIHLSEELGYRMLLLNYLGKIGSKTPLMAAATFSVGWNTFACSESLEKPLNWLLFNYYLTTCLQSSVNKHRHMFVKQVDMDHVMKAKSIREFDKRFTSVMFGYQTIDDYYTDASPSPRLKSVGIPVLCLNSVDDVFSPSHAIPIETAKQNPNVALVLTSYGGHIGFLEGIWPRQSTYMDRVFKQFVQAMVEHGHELS

SEQ ID NO: 22801 - protein, 811 aa, Artificial Sequence
  Synthetic polypeptide
GWARWLTPVIPALWEAQSDLKCVQDAKGGSFYRDHCPVLGEQNGNRNPGGLQIGDLVNIDLDLEIVQSLQHGHGGWTDGMFETLTTTGTVCGIDEDHDIVVQYPSGNRWTFNPAVLTKANIVRSGDAAQGAEGGTSQFQVGDLVQVCYDLERIKLLQRGHGEWAEAMLPTLGKVGRVQQIYSDSDLKVEVCGTSWTYNPAAVSKVASAGSAISNASGERLSQLLKKLFETQESGDLNEELVKAAANGDVAKVEDLLKRPDVDVNGQCAGHTAMQAASQNGHVDILKLLLKQNVDVEAEDKDGDRAVHHAAFGDEGAVIEVLHRGSADLNARNKRRQTPLHIAVNKGHLQVVKTLLDFGCHPSLQDSEGDTPLHDAISKKRDDILAVLLEAGADVTITNNNGFNALHHAALRGNPSAMRVLLSKLPRPWIVDEKKDDGYTALHLAALNNHVEVAELLVHQGNANLDIQNVNQQTALHLAVERQHTQIVRLLVRAGAKLDIQDKDGDTPLHEALRHHTLSQLRQLQDMQDVGKVDAAWEPSKNTLIMGLGTQGAEKKSAASIACFLAANGADLSIRNKKGQSPLDLCPDPNLCKALAKCHKEKVSGQVGSRSPSMISNDSETLEECMVCSDMKRDTLFGPCGHIATCSLCSPRVKKCLICKEQVQSRTKIEECVVCSDKKAAVLFQPCGHMCACENCANLMKKCVQCRAVVERRVPFIMCCGGKSSEDATDDISSGNIPVLQKDKDNTNVNADVQKLQQQLQDIKEQTMCPVCLDRLKNMIFLCGHGTCQLCGDRMSECPICRKAIERRILLY

SEQ ID NO: 22802 - protein, 10 aa, Artificial Sequence
  Synthetic polypeptide
SQHFGRPSLI

SEQ ID NO: 22803 - protein, 17 aa, Artificial Sequence
  Synthetic polypeptide
MGTVAHACNPSTLGGPV

SEQ ID NO: 22804 - protein, 37 aa, Artificial Sequence
  Synthetic polypeptide
FQLFGRLRHENHLNHEGRGAELSMSRDHAIVLQPSLI

SEQ ID NO: 22805 - protein, 11 aa, Artificial Sequence
  Synthetic polypeptide
AEITPLYSSLV

SEQ ID NO: 22806 - protein, 139 aa, Artificial Sequence
  Synthetic polypeptide
RNGITFISVVFTALSTLLRAGLCDRCAVTEEHMRKKQQEFENIRQQNLKLITELMNERNTLQEENKKLSEQLQQKIENDQQHQAAELECEEDVIPDSPITAFSFSGVNRLRRKENPHVRYIEQTHTKLEHSVCANEMRK

SEQ ID NO: 22807 - protein, 3 aa, Artificial Sequence
  Synthetic polypeptide
AHC

SEQ ID NO: 22808 - protein, 28 aa, Artificial Sequence
  Synthetic polypeptide
TISFLKKWHYLHLCCIYSTEHIVKSRLM

SEQ ID NO: 22809 - protein, 18 aa, Artificial Sequence
  Synthetic polypeptide
RNGITFISVVFTALSTLL

SEQ ID NO: 22810 - protein, 23 aa, Artificial Sequence
  Synthetic polypeptide
TISFLKKWHYLHLCCIYSTEHIV

SEQ ID NO: 22811 - protein, 831 aa, Artificial Sequence
  Synthetic polypeptide
RNGITFISVVFTALSTLLRAGLCDRCAVTEEHMRKKQQEFENIRQQNLKLITELMNERNTLQEENKKLSEQLQQKIENDQQHQAAELECEEDVIPDSPITAFSFSGVNRLRRKENPHVRYIEQTHTKLEHSVCANEMRKVSKSSTHPQHNPNENEILVADTYDQSQSPMAKAHGTSSYTPDKSSFNLATVVAETLGLGVQEESETQGPMSPLGDELYHCLEGNHKKQPFEESTRNTEDSLRFSDSTSKTPPQEELPTRVSSPVFGATSSIKSGLDLNTSLSPSLLQPGKKKHLKTLPFSNTCISRLEKTRSKSEDSALFTHHSLGSEVNKIIIQSSNKQILINKNISESLGEQNRTEYGKDSNTDKHLEPLKSLGGRTSKRKKTEEESEHEVSCPQASFDKENAFPFPMDNQFSMNGDCVMDKPLDLSDRFSAIQRQEKSQGSETSKNKFRQVTLYEALKTIPKGFSSSRKASDGNCTLPKDSPGEPCSQECIILQPLNKCSPDNKPSLQIKEENAVFKIPLRPRESLETENVLDDIKSAGSHEPIKIQTRSDHGGCELASVLQLNPCRTGKIKSLQNNQDVSFENIQWSIDPGADLSQYKMDVTVIDTKDGSQSKLGGETVDMDCTLVSETVLLKMKKQEQKGEKSSNEERKMNDSLEDMFDRTTHEEYESCLADSFSQAADEEEELSTATKKLHTHGDKQDKVKQKAFVEPYFKGDERETSLQNFPHIEVVRKKEERRKLLGHTCKECEIYYADMPAEEREKKLASCSRHRFRYIPPNTPENFWEVGFPSTQTCMERGYIKEDLDPCPRPKRRQPYNAIFSPKGKEQKT

SEQ ID NO: 22812 - protein, 801 aa, Artificial Sequence
  Synthetic polypeptide
RNGITFISVVFTALSTLLRAGLCDRCAVTEEHMRKKQQEFENIRQQNLKLITELMNERNTLQEENKKLSEQLQQKIENDQQHQAAELECEEDVIPDSPITAFSFSGVNRLRRKENPHVRYIEQTHTKLEHSVCANEMRKVSKSSTHPQHNPNENEILVADTYDQSQSPMAKAHGTSSYTPDKSSFNLATVVAETLGLGVQEESETQGPMSPLGDELYHCLEGNHKKQPFEESTRNTEDSLRFSDSTSKTPPQEELPTRVSSPVFGATSSIKSGLDLNTSLSPSLLQPGKKKHLKTLPFSNTCISRLEKTRSKSEDSALFTHHSLGSEVNKIIIQSSNKQILINKNISESLGEQNRTEYGKDSNTDKHLEPLKSLGGRTSKRKKTEEESEHEVSCPQASFDKENAFPFPMDNQFSMNGDCVMDKPLDLSDRFSAIQRQEKSQGSETSKNKFRQVTLYEALKTIPKGFSSSRKASDGNCTLPKDSPGEPCSQECIILQPLNKCSPDNKPSLQIKEENAVFKIPLRPRESLETENVLDDIKSAGSHEPIKIQTRSDHGGCELASVLQLNPCRTGKIKSLQNNQDVSFENIQWSIDPGADLSQYKMDVTVIDTKDGSQSKLGGETVDMDCTLVSETVLLKMKKQEQKGEKSSNEERKMNDSLEDMFDRTTHEEYESCLADSFSQAADEEEELSTATKKLHTHGDKQDKVKQKAFVEPYFKGDESIMQICQQKKEKRNWLPAQDTDSATFHPTHQRIFGKLVFLPLRLVWKEVILRKILILVLVQKDVSLTTQYFLQKARSRRHRR

SEQ ID NO: 22813 - protein, 514 aa, Artificial Sequence
  Synthetic polypeptide
RNGITFISVVFTALSTLLRAGLCDRCAVTEEHMRKKQQEFENIRQQNLKLITELMNERNTLQEENKKLSEQLQQKIENDQQHQAAELECEEDVIPDSPITAFSFSGVNRLRRKENPHVRYIEQTHTKLEHSVCANEMRKVSKSSTHPQHNPNENEILVADTYDQSQSPMAKAHGTSSYTPDKSSFNLATVVAETLGLGVQEESETQGPMSPLGDELYHCLEGNHKKQPFEESTRNTEDSLRFSDSTSKTPPQEELPTRVSSPVFGATSSIKSGLDLNTSLSPSLLQPGKKKHLKTLPFSNTCISRLEKTRSKSEDSALFTHHSLGSEVNKIIIQSSNKQILINKNISESLGEQNRTEYGKDSNTDKHLEPLKSLGGRTSKRKKTEEESEHEVSCPQASFDKENAFPFPMDNQFSMNGDCVMDKPLDLSDRFSAIQRQEKSQGSETSKNKFRQVTLYEALKTIPKGFSSSRKASDGNCTLPKDSPGEPCSQECIILQPLNKCSPDNKPSLQIKEE

SEQ ID NO: 22814 - protein, 836 aa, Artificial Sequence
  Synthetic polypeptide
RNGITFISVVFTALSTLLRAGLCDRCAVTEEHMRKKQQEFENIRQQNLKLITELMNERNTLQEENKKLSEQLQQKIENDQQHQAAELECEEDVIPDSPITAFSFSGVNRLRRKENPHVRYIEQTHTKLEHSVCANEMRKVSKSSTHPQHNPNENEILVADTYDQSQSPMAKAHGTSSYTPDKSSFNLATVVAETLGLGVQEESETQGPMSPLGDELYHCLEGNHKKQPFEESTRNTEDSLRFSDSTSKTPPQEELPTRVSSPVFGATSSIKSGLDLNTSLSPSLLQPGKKKHLKTLPFSNTCISRLEKTRSKSEDSALFTHHSLGSEVNKIIIQSSNKQILINKNISESLGEQNRTEYGKDSNTDKHLEPLKSLGGRTSKRKKTEEESEHEVSCPQASFDKENAFPFPMDNQFSMNGDCVMDKPLDLSDRFSAIQRQEKSQGSETSKNKFRQVTLYEALKTIPKGFSSSRKASDGNCTLPKDSPGEPCSQECIILQPLNKCSPDNKPSLQIKEENAVFKIPLRPRESLETENVLDDIKSAGSHEPIKIQTRSDHGGCELASVLQLNPCRTGKIKSLQNNQDVSFENIQWSIDPGADLSQYKMDVTVIDTKDGSQSKLGGETVDMDCTLVSETVLLKMKKQEQKGEKSSMLFYIDEERKMNDSLEDMFDRTTHEEYESCLADSFSQAADEEEELSTATKKLHTHGDKQDKVKQKAFVEPYFKGDERETSLQNFPHIEVVRKKEERRKLLGHTCKECEIYYADMPAEEREKKLASCSRHRFRYIPPNTPENFWEVGFPSTQTCMERGYIKEDLDPCPRPKRRQPYNAIFSPKGKEQKT

SEQ ID NO: 22815 - protein, 13 aa, Artificial Sequence
  Synthetic polypeptide
GQDFKTNLGNIRD

SEQ ID NO: 22816 - protein, 123 aa, Artificial Sequence
  Synthetic polypeptide
RPGLQDQPGQHKRLACKIFLILRWFGKKRREENCLGTRVRNVKFIMQICQQKKEKRNWLPAQDTDSATFHPTHQRIFGKLVFLPLRLVWKEVILRKILILVLVQKDVSLTTQYFLQKARSRRH

SEQ ID NO: 22817 - protein, 125 aa, Artificial Sequence
  Synthetic polypeptide
RPGLQDQPGQHKRLACKIFLILRWFGKKRREENCLGTRVRNVKFIMQICQQKKEKRNWLPAQDTDSATFHPTHQRIFGKLVFLPLRLVWKEVILRKILILVLVQKDVSLTTQYFLQKARSRRHRR

SEQ ID NO: 22818 - protein, 35 aa, Artificial Sequence
  Synthetic polypeptide
WLLKSVVVGIFTPQESANATAPHLPEIFLGDPGRY

SEQ ID NO: 22819 - protein, 367 aa, Artificial Sequence
  Synthetic polypeptide
NRLWWEYLHHRNRPMLRRLISQRSSLETLEDIEENAPLRRCRTLSGSPRPKNFKKIHFIKNMRQHDTRNGRIVLISGRRSFCSIFSVLPYRDSTQVGDLKLDGGRQSTGAVSLKEIIGLEGVELGADGKTVSYTQFLLPTNAFGARRNTIDSTSSFSQFRNLSHRSLSIGRASGTQGSLDTGSDLGDFMDYDPNLLDDPQWPCGKHKRVLIFPSYMTTVIDYVKPSDLKKDMNETFKEKFPHIKLTLSKIRSLKREMRKLAQEDCGLEEPTVAMAFVYFEKLALKGKLNKQNRKLCAGACVLLAAKIGSDLKKHEVKHLIDKLEEKFRLNRRELIAFEFPVLVALEFALHLPEHEVMPHYRRLVQSS

SEQ ID NO: 22820 - protein, 74 aa, Artificial Sequence
  Synthetic polypeptide
VAEIGCGGNIYTTGIGQCYGASSPRDLPWRPWKILRRTPLSGDVELSQVHPDQRILRRFILSRTCGNTIPGMAE

SEQ ID NO: 22821 - protein, 117 aa, Artificial Sequence
  Synthetic polypeptide
NRLWWEYLHHRNRPMLRRLISQRSSLETLEDIEENAPLRRCRTLSGSPRPKNFKKIHFIKNMRQHDTRNGRIVLISGRRSFCSIFSVLPYRDSTQVGYVYACMLCSSLGEKISHQCT

SEQ ID NO: 22822 - protein, 22 aa, Artificial Sequence
  Synthetic polypeptide
HLDFGLLAPRTNSPYQWQKILL

SEQ ID NO: 22823 - protein, 357 aa, Artificial Sequence
  Synthetic polypeptide
GKTGAQRHTGRMLCEDWSDAVTSHGATSSQETGLEQTPPQCLQMEHGPADTLILDFWPPELIVLISGRRSFCSIFSVLPYRDSTQVGDLKLDGGRQSTGAVSLKEIIGLEGVELGADGKTVSYTQFLLPTNAFGARRNTIDSTSSFSQFRNLSHRSLSIGRASGTQGSLDTGSDLGDFMDYDPNLLDDPQWPCGKHKRVLIFPSYMTTVIDYVKPSDLKKDMNETFKEKFPHIKLTLSKIRSLKREMRKLAQEDCGLEEPTVAMAFVYFEKLALKGKLNKQNRKLCAGACVLLAAKIGSDLKKHEVKHLIDKLEEKFRLNRRELIAFEFPVLVALEFALHLPEHEVMPHYRRLVQSS

SEQ ID NO: 22824 - protein, 89 aa, Artificial Sequence
  Synthetic polypeptide
GKTGAQRHTGRMLCEDWSDAVTSHGATSSQETGLEQTPPQCLQMEHGPADTLILDFWPPELIVLISGRRSFCSIFSVLPYRDSTQVGQQ

SEQ ID NO: 22825 - protein, 107 aa, Artificial Sequence
  Synthetic polypeptide
GKTGAQRHTGRMLCEDWSDAVTSHGATSSQETGLEQTPPQCLQMEHGPADTLILDFWPPELIVLISGRRSFCSIFSVLPYRDSTQVGYVYACMLCSSLGEKISHQCT

SEQ ID NO: 22826 - protein, 9 aa, Artificial Sequence
  Synthetic polypeptide
DSCASYTTR

SEQ ID NO: 22827 - protein, 60 aa, Artificial Sequence
  Synthetic polypeptide
VNGLGGVCGAWCNAGKGRCLCPGGSCVGANGYKCSASHVLEIPVPPTLHDNHSWLINIAV

SEQ ID NO: 22828 - protein, 69 aa, Artificial Sequence
  Synthetic polypeptide
MDWEESAEPGAMLGRAGVSVQVAAVWVLMGINAQQAMYLRFLCLLHYTIITAGLSILLFDAILTSATTG

SEQ ID NO: 22829 - protein, 89 aa, Artificial Sequence
  Synthetic polypeptide
MDWEESAEPGAMLGRAGVSVQVAAVWVLMGINAQQAMYLRFLCLLHYTIITAGLSILLFDAILTSATTGCLLLGALGEALLVFSERKSS

SEQ ID NO: 22830 - protein, 25 aa, Artificial Sequence
  Synthetic polypeptide
VVTSSPAFRRQKDLDNHSWLINIAV

SEQ ID NO: 22831 - protein, 33 aa, Artificial Sequence
  Synthetic polypeptide
QAAQHFGDRKTWIITAGLSILLFDAILTSATTG

SEQ ID NO: 22832 - protein, 14 aa, Artificial Sequence
  Synthetic polypeptide
SDKQPSISETERPG

SEQ ID NO: 22833 - protein, 53 aa, Artificial Sequence
  Synthetic polypeptide
QAAQHFGDRKTWIITAGLSILLFDAILTSATTGCLLLGALGEALLVFSERKSS

SEQ ID NO: 22834 - protein, 542 aa, Artificial Sequence
  Synthetic polypeptide
QTNTGTENQIPHDLTSKWELNVLPEKRSLKLLKSHNLNVNWYMYCPESAVILLSTTVLENVLQPFHFRAGTMSKLPKFEIELPAAPKSTKPSLSERDIAMATIYGQLYVLFLRHHSRTSNSTGAEVVLYHLPREGACKKMHILKLNRTGKFALNVVDNLVVVHHQDTETSVIFDIKLRGEFDGSVTFHHPVLPARSIQPYQIPITGPAAVTSQSPVPCKLYSSSWIVFQPDIIISASQGYLWNLQVKLEPIVNLLPDKGRLMDFLLQRKECKMVILSVCSQMLSESDRASLPVIATVFDKLNHEYKKYLDAEQSYAMAVEAGQSRSSPLLKRPVRTQAVLDQSDVYTHVLSAFVEKKEMPHKFVIAVLMEYIRSLNQFQIAVQHYLHELVIKTLVQHNLFYMLHQFLQYHVLSDSKPLACLLLSLESFYPPAHQLSLDMLKRLSTANDEIVEVLLSKHQVLAALRFIRGIGGHDNISARKFLDAAKQTEDNMLFYTIFRFFEQRNQRLRGSPNFTPGEHCEEHVAFFKQIFGDQALMRPTTF

SEQ ID NO: 22835 - protein, 50 aa, Artificial Sequence
  Synthetic polypeptide
VGAKCITRETESETLEEPQSQCELVHVLPRERRDLAVYHGPGECPAAFSL

SEQ ID NO: 22836 - protein, 218 aa, Artificial Sequence
  Synthetic polypeptide
QTNTGTENQIPHDLTSKWELNVLPEKRSLKLLKSHNLNVNWYMYCPESAVILLSTTVLENVLQPFHFRAGTMSKLPKFEIELPAAPKSTKPSLSERDIAMATIYGQLYVLFLRHHSRTSNSTGAEVVLYHLPREGACKKMHILKLNRTGKFALNVVDNLVVVHHQDTETSVIFDIKLRGEFDGSVTFHHPVLPARSIQPYQIPITGPAAVTSQSPNFL

SEQ ID NO: 22837 - protein, 22 aa, Artificial Sequence
  Synthetic polypeptide
GQAKWLTPVIPVLLEAEGTCCL

SEQ ID NO: 22838 - protein, 272 aa, Artificial Sequence
  Synthetic polypeptide
SQYFWRPRGHAAYSSAVNILLGHGTRVGATYFMTYHTVLQTSADFIDALKKARLIASNVTETMGINGSAYRVFPYSVFYVFYEQYLTIIDDTIFNLGVSLGAIFLVTMVLLGCELWSAVIMCATIAMVLVNMFGVMWLWGISLNAVSLVNLVMSCGISVEFCSHITRAFTVSMKGSRVERAEEALAHMGSSVFSGITLTKFGGIVVLAFAKSQIFQIFYFRMYLAMVLLGATHGLIFLPVLLSYIGPSVNKAKSCATEERYKGTERERLLNF

SEQ ID NO: 22839 - protein, 41 aa, Artificial Sequence
  Synthetic polypeptide
PGEVAHTCNPSTFGGRGDMLPIVLQLTSSLAMAPGSEPRTS

SEQ ID NO: 22840 - protein, 1018 aa, Artificial Sequence
  Synthetic polypeptide
VHVLCRDLDETGNHHSQQNIARTKNQTPHVLTHRKRYFVSEYTPIDSNIAFSVNASDKGEASCCDPVSAAFEGCLRRLFTRWGSFCVRNPGCVIFFSLVFITACSSGLVFVRVTTNPVDLWSAPSSQARLEKEYFDQHFGPFFRTEQLIIRAPLTDKHIYQPYPSGADVPFGPPLDIQILHQVLDLQIAIENITASYDNETVTLQDICLAPLSPYNTNCTILSVLNYFQNSHSVLDHKKGDDFFVYADYHTHFLYCVRAPASLNDTSLLHDPCLGTFGGPVFPWLVLGGYDDQNYNNATALVITFPVNNYYNDTEKLQRAQAWEKEFINFVKNYKNPNLTISFTAERSIEDELNRESDSDVFTVVISYAIMFLYISLALGHMKSCRRLLVDSKVSLGIAGILIVLSSVACSLGVFSYIGLPLTLIVIEVIPFLVLAVGVDNIFILVQAYQRDERLQGETLDQQLGRVLGEVAPSMFLSSFSETVAFFLGALSVMPAVHTFSLFAGLAVFIDFLLQITCFVSLLGLDIKRQEKNRLDIFCCVRGAEDGTSVQASESCLFRFFKNSYSPLLLKDWMRPIVIAIFVGVLSFSIAVLNKVDIGLDQSLSMPDDSYMVDYFKSISQYLHAGPPVYFVLEEGHDYTSSKGQNMVCGGMGCNNDSLVQQIFNAAQLDNYTRIGFAPSSWIDDYFDWVKPQSSCCRVDNITDQFCNASVVDPACVRCRPLTPEGKQRPQGGDFMRFLPMFLSDNPNPKCGKGGHAAYSSAVNILLGHGTRVGATYFMTYHTVLQTSADFIDALKKARLIASNVTETMGINGSAYRVFPYSVFYVFYEQYLTIIDDTIFNLGVSLGAIFLVTMVLLGCELWSAVIMCATIAMVLVNMFGVMWLWGISLNAVSLVNLVMSCGISVEFCSHITRAFTVSMKGSRVERAEEALAHMGSSVFSGITLTKFGGIVVLAFAKSQIFQIFYFRMYLAMVLLGATHGLIFLPVLLSYIGPSVNKAKSCATEERYKGTERERLLNF

SEQ ID NO: 22841 - protein, 124 aa, Artificial Sequence
  Synthetic polypeptide
LELEIPFDPAIPLLGIYPKDYKSCCYKDTCTRMFIAALFTIAKTWNQPKCPTTIDWIKKMWHIHTMEYSAAIKNDEFMSFVGTWMKLETIILSKISQGQKTKHRMFSLIENGILSPSTLPSIAI

SEQ ID NO: 22842 - protein, 967 aa, Artificial Sequence
  Synthetic polypeptide
VHVLCRDLDETGNHHSQQNIARTKNQTPHVLTHRKRYFVSEYTPIDSNIAFSVNASDKGTAWLLTSTFPSSPVLPGEASCCDPVSAAFEGCLRRLFTRWGSFCVRNPGCVIFFSLVFITACSSGLVFVRVTTNPVDLWSAPSSQARLEKEYFDQHFGPFFRTEQLIIRAPLTDKHIYQPYPSGADVPFGPPLDIQILHQVLDLQIAIENITASYDNETVTLQDICLAPLSPYNTNCTILSVLNYFQNSHSVLDHKKGDDFFVYADYHTHFLYCVRFINFVKNYKNPNLTISFTAERSIEDELNRESDSDVFTVVISYAIMFLYISLALGHMKSCRRLLVDSKVSLGIAGILIVLSSVACSLGVFSYIGLPLTLIVIEVIPFLVLAVGVDNIFILVQAYQRDERLQGETLDQQLGRVLGEVAPSMFLSSFSETVAFFLGALSVMPAVHTFSLFAGLAVFIDFLLQITCFVSLLGLDIKRQEKNRLDIFCCVRGAEDGTSVQASESCLFRFFKNSYSPLLLKDWMRPIVIAIFVGVLSFSIAVLNKVDIGLDQSLSMPDDSYMVDYFKSISQYLHAGPPVYFVLEEGHDYTSSKGQNMVCGGMGCNNDSLVQQIFNAAQLDNYTRIGFAPSSWIDDYFDWVKPQSSCCRVDNITDQFCNASVVDPACVRCRPLTPEGKQRPQGGDFMRFLPMFLSDNPNPKCGKGGHAAYSSAVNILLGHGTRVGATYFMTYHTVLQTSADFIDALKKARLIASNVTETMGINGSAYRVFPYSVFYVFYEQYLTIIDDTIFNLGVSLGAIFLVTMVLLGCELWSAVIMCATIAMVLVNMFGVMWLWGISLNAVSLVNLVMSCGISVEFCSHITRAFTVSMKGSRVERAEEALAHMGSSVFSGITLTKFGGIVVLAFAKSQIFQIFYFRMYLAMVLLGATHGLIFLPVLLSYIGPSVNKAKSCATEERYKGTERERLLNF

SEQ ID NO: 22843 - protein, 3003 aa, Artificial Sequence
  Synthetic polypeptide
SQHFGRQRWEDCLRPGVGNQPRQHTCNCHGHASNCYYDPDVERQQASLNTQGIYAGGGVCINCQHNTAGVNCEQCAKGYYRPYGVPVDAPDGCIPCSCDPEHADGCEQGSGRCHCKPNFHGDNCEKCAIGYYNFPFCLRIPIFPVSTPSSEDPVAGDIKGCDCNLEGVLPEICDAHGRCLCRPGVEGPRCDTCRSGFYSFPICQACWCSALGSYQMPCSSVTGQCECRPGVTGQRCDRCLSGAYDFPHCQGSSSACDPAGTINSNLGYCQCKLHVEGPTCSRCKLLYWNLDKENPSGCSECKCHKAGTVSGTGECRQGDGDCHCKSHVGGDSCDTCEDGYFALEKSNYFGCQGCQCDIGGALSSMCSGPSGVCQCREHVVGKVCQRPENNYYFPDLHHMKYEIEDGSTPNGRDLRFGFDPLAFPEFSWRGYAQMTSVQNDVRITLNVGKSSGSLFRVILRYVNPGTEAVSGHITIYPSWGAAQSKEIIFLPSKEPAFVTVPGNGFADPFSITPGIWVACIKAEGVLLDYLVLLPRDYYEASVLQLPVTEPCAYAGPPQENCLLYQHLPVTRFPCTLACEARHFLLDGEPRPVAVRQPTPAHPVMVDLSGREVELHLRLRIPQVGHYVVVVEYSTEAAQLFVVDVNVKSSGSVLAGQVNIYSCNYSVLCRSAVIDHMSRIAMYELLADADIQLKGHMARFLLHQVCIIPIEEFSAEYVRPQVHCIASYGRFVNQSATCVSLAHETPPTALILDVLSGRPFPHLPQQSSPSVDVLPGVTLKAPQNQVTLRGRVPHLGRYVFVIHFYQAAHPTFPAQVSVDGGWPRAGSFHASFCPHVLGCRDQVIAEGQIEFDISEPEVAATVKVPEGKSLVLVRVLVVPAENYDYQILHKKSMDKSLEFITNCGKNSFYLDPQTASRFCKNSARSLVAFYHKGALPCECHPTGATGPHCSPEGGQCPCQPNVIGRQCTRCATGHYGFPRCKPCSCGRRLCEEMTGQCRCPPRTVRPQCEVCETHSFSFHPMAGCEGCNCSRRGTIEAAMPECDRDSGQCRCKPRITGRQCDRCASGFYRFPECVPCNCNRDGTEPGVCDPGTGACLCKENVEGTECNVCREGSFHLDPANLKGCTSCFCFGVNNQCHSSHKRRTKFVDMLGWHLETADRVDIPVSFNPGSNSMVADLQELPATIHSASWVAPTSYLGDKVSSYGGYLTYQAKSFGLPGDMVLLEKKPDVQLTGQHMSIIYEETNTPRPDRLHHGRVHVVEGNFRHASSRAPVSREELMTVLSRLADVRIQGLYFTETQRLTLSEVGLEEASDTGSGRIALAVEICACPPAYAGDSCQGCSPGYYRDHKGLYTGRCVPCNCNGHSNQCQDGSGICVNCQHNTAGEHCERCQEGYYGNAVHGSCRACPCPHTNSFATGCVVNGGDVRCSCKAGYTGTQCERCAPGYFGNPQKFGGSCQPCSCNSNGQLGSCHPLTGDCINQEPKDSSPAEECDDCDSCVMTLLNDLATMGEQLRLVKSQLQGLSASAGLLEQMRHMETQAKDLRNQLLNYRSAISNHGSKIEGLERELTDLNQEFETLQEKAQVNSRKAQTLNNNVNRATQSAKELDVKIKNVIRNVHILLKQISGTDGEGNNVPSGDFSREWAEAQRMMRELRNRNFGKHLREAEADKRESQLLLNRIRTWQKTHQGENNGLANSIRDSLNEYEAKLSDLRARLQEAAAQAKQANGLNQENERALGAIQRQVKEINSLQSDFTKYLTTADSSLLQTNIALQLMEKSQKEYEKLAASLNEARQELSDKVRELSRSAGKTSLVEEAEKHARSLQELAKQLEEIKRNASGDELVRCAVDAATAYENILNAIKAAEDAANRAASASESALQTVIKEDLPRKAKTLSSNSDKLLNEAKMTQKKLKQEVSPALNNLQQTLNIVTVQKEVIDTNLTTLRDGLHGIQRGDIDAMISSAKSMVRKANDITDEVLDGLNPIQTDVERIKDTYGRTQNEDFKKALTDADNSVNKLTNKLPDLWRKIESINQQLLPLGNISDNMDRIRELIQQARDAASKVAVPMRFNGKSGVEVRLPNDLEDLKGYTSLSLFLQRPNSRENGGTENMFVMYLGNKDASRDYIGMAVVDGQLTCVYNLGDREAELQVDQILTKSETKEAVMDRVKFQRIYQFARLNYTKGATSSKPETPGVYDMDGRNSNTLLNLDPENVVFYVGGYPPDFKLPSRLSFPPYKGCIELDDLNENVLSLYNFKKTFNLNTTEVEPCRRRKEESDKNYFEGTGYARVPTQPHAPIPTFGQTIQTTVDRGLLFFAENGDRFISLNIEDGKLMVRYKLNSELPKERGVGDAINNGRDHSIQIKIGKLQKRMWINVDVQNTIIDGEVFDFSTYYLGGIPIAIRERFNISTPAFRGCMKNLKKTSGVVRLNDTVGVTKKCSEDWKLVRSASFSRGGQLSFTDLGLPPTDHLQASFGFQTFQPSGILLDHQTWTRNLQVTLEDGYIELSTSDSGSPIFKSPQTYMDGLLHYVSVISDNSGLRLLIDDQLLRNSKRLKHISSSRQSLRLGGSNFEGCISNVFVQRLSLSPEVLDLTSNSLKRDVSLGGCSLNKPPFLMLLKGSTRFNKTKTFRINQLLQDTPVASPRSVKVWQDACSPLPKTQANHGALQFGDIPTSHLLFKLPQELLKPRSQFAVDMQTTSSRGLVFHTGTKNSFMALYLSKGRLVFALGTDGKKLRIKSKEKCNDGKWHTVVFGHDGEKGRLVVDGLRAREGSLPGNSTISIRAPVYLGSPPSGKPKSLPTNSFVGCLKNFQLDSKPLYTPSSSFGVSSCLGGPLEKGIYFSEEGGHVVLAHSVLLGPEFKLVFSIRPRSLTGILIHIGSQPGKHLCVYLEAGKVTASMDSGAGGTSTSVTPKQSLCDGQWHSVAVTIKQHILHLELDTDSSYTAGQIPFPPASTQEPLHLGGAPANLTTLRIPVWKSFFGCLRNIHVNHIPVPVTEALEVQGPVSLNGCPDQ

SEQ ID NO: 22844 - protein, 34 aa, Artificial Sequence
  Synthetic polypeptide
GQELETSLGNIHATATAMPATVTMIQMLSGSRQA

SEQ ID NO: 22845 - protein, 15 aa, Artificial Sequence
  Synthetic polypeptide
ATYMQLPRPCQQLLL

SEQ ID NO: 22846 - protein, 246 aa, Artificial Sequence
  Synthetic polypeptide
SQHFGRQRWEDCLRPGVGNQPRQHTCNCHGHASNCYYDPDVERQQASLNTQGIYAGGGVCINCQHNTAGVNCEQCAKGYYRPYGVPVDAPDGCIPCSCDPEHADGCEQGSGRCHCKPNFHGDNCEKCAIGYYNFPFCLRIPIFPVSTPSSEDPVAGDIKGCDCNLEGVLPEICDAHGRCLCRPGVEGPRCDTCRSGFYSFPICQGPSEKVAIYKPESRPSAETEPASTWILDFPASRTGEINFYCL

SEQ ID NO: 22847 - protein, 2947 aa, Artificial Sequence
  Synthetic polypeptide
SQHFGRQRWEDCLRPGVGNQPRQHTCNCHGHASNCYYDPDVERQQASLNTQGIYAGGGVCINCQHNTAGVNCEQCAKGYYRPYGVPVDAPDGCIPCSCDPEHADGCEQGSGRCHCKPNFHGDNCEKCAIGYYNFPFCLRIPIFPVSTPSSEDPVAGDIKGCDCNLEGVLPEICDAHGRCLCRPGVEGPRCDTCRSGFYSFPICQACWCSALGSYQMPCSSVTGQCECRPGVTGQRCDRCLSGAYDFPHCQGSSSACDPAGTINSNLGYCQCKLHVEGPTCSRCKLLYWNLDKENPSGCSECKCHKAGTVSGTGECRQGDGDCHCKSHVGGDSCDTCEDGYFALEKSNYFGCQGCQCDIGGALSSMCSGPSGVCQCREHVVGKVCQRPENNYYFPDLHHMKYEIEDGSTPNGRDLRFGFDPLAFPEFSWRGYAQMTSVQNDVRITLNVGKSSGSLFRVILRYVNPGTEAVSGHITIYPSWGAAQSKEIIFLPSKEPAFVTVPGNGFADPFSITPGIWVACIKAEGVLLDYLVLLPRDYYEASVLQLPVTEPCAYAGPPQENCLLYQHLPVTRFPCTLACEARHFLLDGEPRPVAVRQPTPAHPVMVDLSGREVELHLRLRIPQVGHYVVVVEYSTEAAQLFVVDVNVKSSGSVLAGQVNIYSCNYSVLCRSAVIDHMSRIAMYELLADADIQLKGHMARFLLHQVCIIPIEEFSAEYVRPQVHCIASYGRFVNQSATCVSLAHETPPTALILDVLSGRPFPHLPQQSSPSVDVLPGVTLKAPQNQVTLRGRVPHLGRYVFVIHFYQAAHPTFPAQVSVDGGWPRAGSFHASFCPHVLGCRDQVIAEGQIEFDISEPEVAATVKVPEGKSLVLVRVLVVPAENYDYQILHKKSMDKSLEFITNCGKNSFYLDPQTASRFCKNSARSLVAFYHKGALPCECHPTGATGPHCSPEGGQCPCQPNVIGRQCTRCATGHYGFPRCKPCSCGRRLCEEMTGQCRCPPRTVRPQCEVCETHSFSFHPMAGCEGCNCSRRGTIEAAMPECDRDSGQCRCKPRITGRQCDRCASGFYRFPECVPCNCNRDGTEPGVCDPGTGACLCKENVEGTECNVCREGSFHLDPANLKGCTSCFCFGVNNQCHSSHKRRTKFVDMLGWHLETADRVDIPVSFNPGSNSMVADLQELPATIHSASWVAPTSYLGDKVSSYGGYLTYQAKSFGLPGDMVLLEKKPDVQLTGQHMSIIYEETNTPRPDRLHHGRVHVVEGNFRHASSRAPVSREELMTVLSRLADVRIQGLYFTETQRLTLSEVGLEEASDTGSGRIALAVEICACPPAYAGDSCQGCSPGYYRDHKGLYTGRCVPCNCNGHSNQCQDGSGICVNCQHNTAGEHCERCQEGYYGNAVHGSCRACPCPHTNSFATGCVVNGGDVRCSCKAGYTGTQCERCAPGYFGNPQKFGGSCQPCSCNSNGQLGSCHPLTGDCINQEPKDSSPAEECDDCDSCVMTLLNDLATMGEQLRLVKSQLQGLSASAGLLEQMRHMETQAKDLRNQLLNYRSAISNHGSKIEGLERELTDLNQEFETLQEKAQVNSRKAQTLNNNVNRATQSAKELDVKIKNVIRNVHMLNRIRTWQKTHQGENNGLANSIRDSLNEYEAKLSDLRARLQEAAAQAKQANGLNQENERALGAIQRQVKEINSLQSDFTKYLTTADSSLLQTNIALQLMEKSQKEYEKLAASLNEARQELSDKVRELSRSAGKTSLVEEAEKHARSLQELAKQLEEIKRNASGDELVRCAVDAATAYENILNAIKAAEDAANRAASASESALQTVIKEDLPRKAKTLSSNSDKLLNEAKMTQKKLKQEVSPALNNLQQTLNIVTVQKEVIDTNLTTLRDGLHGIQRGDIDAMISSAKSMVRKANDITDEVLDGLNPIQTDVERIKDTYGRTQNEDFKKALTDADNSVNKLTNKLPDLWRKIESINQQLLPLGNISDNMDRIRELIQQARDAASKVAVPMRFNGKSGVEVRLPNDLEDLKGYTSLSLFLQRPNSRENGGTENMFVMYLGNKDASRDYIGMAVVDGQLTCVYNLGDREAELQVDQILTKSETKEAVMDRVKFQRIYQFARLNYTKGATSSKPETPGVYDMDGRNSNTLLNLDPENVVFYVGGYPPDFKLPSRLSFPPYKGCIELDDLNENVLSLYNFKKTFNLNTTEVEPCRRRKEESDKNYFEGTGYARVPTQPHAPIPTFGQTIQTTVDRGLLFFAENGDRFISLNIEDGKLMVRYKLNSELPKERGVGDAINNGRDHSIQIKIGKLQKRMWINVDVQNTIIDGEVFDFSTYYLGGIPIAIRERFNISTPAFRGCMKNLKKTSGVVRLNDTVGVTKKCSEDWKLVRSASFSRGGQLSFTDLGLPPTDHLQASFGFQTFQPSGILLDHQTWTRNLQVTLEDGYIELSTSDSGSPIFKSPQTYMDGLLHYVSVISDNSGLRLLIDDQLLRNSKRLKHISSSRQSLRLGGSNFEGCISNVFVQRLSLSPEVLDLTSNSLKRDVSLGGCSLNKPPFLMLLKGSTRFNKTKTFRINQLLQDTPVASPRSVKVWQDACSPLPKTQANHGALQFGDIPTSHLLFKLPQELLKPRSQFAVDMQTTSSRGLVFHTGTKNSFMALYLSKGRLVFALGTDGKKLRIKSKEKCNDGKWHTVVFGHDGEKGRLVVDGLRAREGSLPGNSTISIRAPVYLGSPPSGKPKSLPTNSFVGCLKNFQLDSKPLYTPSSSFGVSSCLGGPLEKGIYFSEEGGHVVLAHSVLLGPEFKLVFSIRPRSLTGILIHIGSQPGKHLCVYLEAGKVTASMDSGAGGTSTSVTPKQSLCDGQWHSVAVTIKQHILHLELDTDSSYTAGQIPFPPASTQEPLHLGGAPANLTTLRIPVWKSFFGCLRNIHVNHIPVPVTEALEVQGPVSLNGCPDQ

SEQ ID NO: 22848 - protein, 41 aa, Artificial Sequence
  Synthetic polypeptide
QGSPNPRPWTDTGLWPVRNRAAKQEVSSSHPHRICLWVLEG

SEQ ID NO: 22849 - protein, 81 aa, Artificial Sequence
  Synthetic polypeptide
RGPQTLGHGLIRVCGLLGTGLQSRRLAAATHTEYAYGSWRDESERPSPTSTLSQHAFRWNGRWGSSCTAHAEPDERPDAWA

SEQ ID NO: 22850 - protein, 343 aa, Artificial Sequence
  Synthetic polypeptide
QQPPTQNMPMGPGGMNQSGPPPPPRSHNMPSDGMVGGGPPAPHMQNQMNGQMPGPNHMPMQGPGPNQLNMTNSSMNMPSSSHGSMGGYNHSVPSSQSMPVQNQMTMSQGQPMGNYGPRPNMSMQPNQGPMMHQQPPSQQYNMPQGGGQHYQGQQPPMGMMGQVNQGNHMMGQRQIPPYRPPQQGPPQQYSGQEDYYGDQYSHGGQGPPEGMNQQYYPDGHNDYGYQQPSYPEQGYDRPYEDSSQHYYEGGNSQYGQQQDAYQGPPPQQGYPPQQQQYPGQQGYPGQQQGYGPSQGGPGPQYPNYPQGQGQQYGGYRPTQPGPPQPPQQRPYGYDQGQYGNYQQ

SEQ ID NO: 22851 - protein, 312 aa, Artificial Sequence
  Synthetic polypeptide
QQPPTQNMPMGPGGMNQSGPPPPPRSHNMPSDGMVGGGPPAPHMQNQMNGQMPGPNHMPMQGPGPNQLNMTNSSMNMPSSSHGSMGGYNHSVPSSQSMPVQNQMTMSQGQPMGNYGPRPNMSMQPNQGPMMHQQPPSQQYNMPQGGGQHYQGQQPPMGMMGQVNQGNHMMGQRQIPPYRPPQQGPPQQYSGQEDYYGDQYSHGGQGPPEGMNQQYYPDGNSQYGQQQDAYQGPPPQQGYPPQQQQYPGQQGYPGQQQGYGPSQGGPGPQYPNYPQGQGQQYGGYRPTQPGPPQPPQQRPYGYDQGQYGNYQQ

SEQ ID NO: 22852 - protein, 41 aa, Artificial Sequence
  Synthetic polypeptide
RGPQTLGHGLIRVCGLLGTGLQSRRLAAATHTEYAYGSWRD

SEQ ID NO: 22853 - protein, 15 aa, Artificial Sequence
  Synthetic polypeptide
QQPPTQNMPMGPGGM

SEQ ID NO: 22854 - protein, 100 aa, Artificial Sequence
  Synthetic polypeptide
QQPPTQNMPMGPGGMNQSGPPPPPRSHNMPSDGMVGGGPPAPHMQNQMNGQMPGPNHMPMQGPGPNQLNMTNSSMNMPSSSHGSMGGYNHSVPSSQSMPV

SEQ ID NO: 22855 - protein, 78 aa, Artificial Sequence
  Synthetic polypeptide
QQPPTQNMPMGPGGMNQSGPPPPPRSHNMPSDGMVGGGPPAPHMQNQMNGQMPGPNHMPMQGPGPNQLNMTNSSMNMP

SEQ ID NO: 22856 - protein, 44 aa, Artificial Sequence
  Synthetic polypeptide
RGPQTLGHGLIRVCGLLGTGLQSRRLAAATHTEYAYGSWRDESE

SEQ ID NO: 22857 - protein, 18 aa, Artificial Sequence
  Synthetic polypeptide
QQPPTQNMPMGPGGMNQS

SEQ ID NO: 22858 - protein, 27 aa, Artificial Sequence
  Synthetic polypeptide
AKIAPLHSSLADSISRCCTQTWYTLLQ

SEQ ID NO: 22859 - protein, 20 aa, Artificial Sequence
  Synthetic polypeptide
LTVSADVAHKLGIPCYNSRF

SEQ ID NO: 22860 - protein, 38 aa, Artificial Sequence
  Synthetic polypeptide
TSDFKFFSSGTHTGSPCSSACRWPIVGPCDHDLLLMLE

SEQ ID NO: 22861 - protein, 64 aa, Artificial Sequence
  Synthetic polypeptide
AKQAEKCEKRNWPSLPAYIFLPCWMPPVLEHQTSSSSVLELILALLARQPADGLLWDLVIMTYC

SEQ ID NO: 22862 - protein, 71 aa, Artificial Sequence
  Synthetic polypeptide
FSSVYLMPPSTVLAHRLKRQPSCFWDIQPDSHQTVASSKNHENLPQGLDILYGTGTGDEVFSSSIPGPSEV

SEQ ID NO: 22863 - protein, 70 aa, Artificial Sequence
  Synthetic polypeptide
SVLYILCRLAQFLPIGLKDNLLASGTSSLTATKQLHRPRITRICLRDLIFCMEQEREMKYSRALYLALLK

SEQ ID NO: 22864 - protein, 18 aa, Artificial Sequence
  Synthetic polypeptide
TSSGLPLILHYADGFTTE

SEQ ID NO: 22865 - protein, 355 aa, Artificial Sequence
  Synthetic polypeptide
FYIMLMDLQLSDSNFRRHILLQYLILFQYLKGQVKFKSSNYVLTDEQSLWIEDTTKSVYQLLSENPPDGERFSKMVEHILNTEENWNSWKNEGCPSFVKERTSDTKPTRIIRKRTAPEDFLGKGPTKKILMGNEELTRLWNLCPDNMEACKSETREHMPTLEEFFEEAIEQADPENMVENEYKAVNNSNYGWRALRLLARRSPHFFQPTNQQFKSLPEYLENMVIKLAKELPPPSEEIKTGEDEDEEDNDALLKENESPDVRRDKPVTGEQIEVFANKLGEQWKILAPYLEMKDSEIRQIECDSEDMKMRAKQLLVAWQDQEGVHATPENLINALNKSGLSDLAESLTNDNETNS

SEQ ID NO: 22866 - protein, 15 aa, Artificial Sequence
  Synthetic polypeptide
LQVNKLRASTDSTLC

SEQ ID NO: 22867 - protein, 239 aa, Artificial Sequence
  Synthetic polypeptide
FYIMLMDLQLSDSNFRRHILLQYLILFQYLKGQVKFKSSNYVLTDEQSLWIEDTTKSVYQLLSENPPDGERFSKMVEHILNTEENWNSWKNEGCPSFVKESVCFVHDRTSDTKPTRIIRKRTAPEDFLGKGPTKKILMGNEELTRLWNLCPDNMEACKSETREHMPTLEEFFEEAIEQADPENMVENEYKAVNNSNYGWRALRLLARRSPHFFQPTNQQFKSLPEYLENMVIKLAKELP

SEQ ID NO: 22868 - protein, 400 aa, Artificial Sequence
  Synthetic polypeptide
RAVPLHTLPLACHHIRQAFALPLPSAMIVRPPQPCGTNPKFHMPEDVREKKENLLLNSERSTRLLTKTSHSQGGDQALSKSTGSPTEKLIEKRQGAKTVFNKFSNMNWPVDIHPLNKSLVKDNKWKKTEETQEKRRSFLQEFCKKYGGVSHHQSHLFHTVSRIYVEDKHKILYCEVPKAGCSNWKRILMVLNGLASSAYNISHNAVHYGKHLKKLDSFDLKGIYTRLNTYTKAVFVRDPMERLVSAFRDKFEHPNSYYHPVFGKAIIKKYRPNACEEALINGSGVKFKEFIHYLLDSHRPVGMDIHWEKVSKLCYPCLINYDFVGKFETLEEDANYFLQMIGAPKELKFPNFKDRHSSDERTNAQVVRQYLKDLTRTERQLIYDFYYLDYLMFNYTTPFL

SEQ ID NO: 22869 - protein, 35 aa, Artificial Sequence
  Synthetic polypeptide
GLPSHVELTPSFTCLRMYEKKRKIFYSILRDLLGS

SEQ ID NO: 22870 - protein, 44 aa, Artificial Sequence
  Synthetic polypeptide
RAVPLHTLPLACHHIRQAFALPLPSAMIVRPPQPCGTNPKFHMP

SEQ ID NO: 22871 - protein, 15 aa, Artificial Sequence
  Synthetic polypeptide
GLPSHVELTPSFTCL

SEQ ID NO: 22872 - protein, 76 aa, Artificial Sequence
  Synthetic polypeptide
WLETINKQGLKAADNDPTAPPYDSLLVFDYEGSGSTAGSLSSLNSSSSGGEQDYDYLNDWGPRFKKLADMYGGGDD

SEQ ID NO: 22873 - protein, 25 aa, Artificial Sequence
  Synthetic polypeptide
GWRPLTNRALKRLTMTPQLHHMTPC

SEQ ID NO: 22874 - protein, 4 aa, Artificial Sequence
  Synthetic polypeptide
QTGP

SEQ ID NO: 22875 - protein, 1012 aa, Artificial Sequence
  Synthetic polypeptide
DRAQWLMPVIPALWKTEASGSPESCKDVAPVEKTIKLLPSSHVARLQIFSVEGQKAIQIKHQDEVNWIAGDIMHNLIFQMYDEGEREINITSALAEKIKVNWTPEINKEHLLQGLLPDVQVPTSVKDMRYCQVSFQDDHVSLESAFTVRPLPDEPKHLKCEMKGGKTVQMGQELQGEVVIIITDQYGNQIQAFSPSSLSSLSIAGVGLDSSNLKTTFQENTQSISVRGIKFIPGPPGNKDLCFTWREFSDFIRVQLISGPPAKLLLIDWPELKESIPVINGRDLQNPIIVQLCDQWDNPAPVQHVKISLTKASNLKLMPSNQQHKTDEKGRANLGVFSVFAPRGEHTLQVKAIYNKSIIEGPIIKLMILPDPEKPVRLNVKYDKDASFLAGGLFTDFMISVISEDDSIIKNINPARISMKMWKLSTSGNRPPANAETFSCNKIKDNDKEDGCFYFRDKVIPNKVGTYCIQFGFMMDKTNILNSEQVIVEVLPNQPVKLVPKIKPPTPAVSNVRSVASRTLVRDLHLSITDDYDNHTGIDLVGTIIATIKGSNEEDTDTPLFIGKVRTLEFPFVNGSAEIMSLVLAESSPGRDSTEYFIVFEPRLPLLSRTLEPYILPFMFYNDVKKQQQMAALTKEKDQLSQSIVMYKSLFEASQQLLNEMKCQVEEARLKEAQLRNELKIHNIDIPTTQQVPHIEALLKRKLSEQEELKKKPRRSCTLPNYTKGSGDVLGKIAHLAQIEDDRAAMVISWHLASDMDCVVTLTTDAARRIYDETQGRQQVLPLDSIYKKTLPDWKRSLPHFRNGKLYFKPIGDPVFARDLLTFPDNVEHCETVFGMLLGDTIILDNLDAANHYRKEVVKITHCPTLLTRDGDRIRSNGKFGGLQNKAPPMDKLRGMVFGAPVPKQCLILGEQIDLLQQYRSAVCKLDSVNKDLNSQLEYLRTPDMRKKKQELDEHEKNLKLIEEKLGMTPIRKCNDSLRHSPKVETTDCPVPPKRMRREATRQNRIITKTDV

SEQ ID NO: 22876 - protein, 41 aa, Artificial Sequence
  Synthetic polypeptide
SQHFGRPRPVDHLRVVKMWHLWRRLLSCFPVAMLQDYKYSV

SEQ ID NO: 22877 - protein, 924 aa, Artificial Sequence
  Synthetic polypeptide
DRAQWLMPVIPALWKTEASGSPESCKDVAPVEKTIKLLPSSHVARLQIFSVEGQKAIQIKHQDEVNWIAGDIMHNLIFQMYDEGEREINITSALAEKIKVNWTPEINKEHLLQGLLPDVQVPTSVKDMRYCQVSFQDDHVSLESAFTVRPLPDEPKHLKCEMKGGKTVQMGQELQGEVVIIITDQYGNQIQAFSPSSLSSLSIAGVGLDSSNLKTTFQENTQSISVRGIKFIPGPPGNKDLCFTWREFSDFIRVQLISGPPAKLLLIDWPELKESIPVINGRDLQNPIIVQLCDQWDNPAPVQHVKISLTKASNLKLMPSNQQHKTDEKGRANLGVFSVFAPRGEHTLQVKAIYNKSIIEGPIIKLMILPDPEKPVRLNVKYDKDASFLAGGLFTDFMISVISEDDSIIKNINPARISMKMWKLSTSGNRPPANAETFSCNKIKDNDKEDGCFYFRDKVIPNKVGTYCIQFGFMMDKTNILNSEQVIVEVLPNQPVKLVPKIKPPTPAVSNVRSVASRTLVRDLHLSITDDYDNHTGIDLVGTIIATIKGSNEEDTDTPLFIGKVRTLEFPFVNGSAEIMSLVLAESSPGRDSTEYFIVFEPRLPLLSRTLEPYILPFMFYNDVKKQQQMAALTKEKDQLSQSIVMYKSLFEASQQLLNEMKCQVEEARLKEAQLRNELKIHNIDIPTTQQVPHIEALLKRKLSEQEELKKKPRRSCTLPNYTKGSGDVLGKIAHLAQIEDDRAAMVISWHLASDMDCVVTLTTDAARRIYDETQGRQQVLPLDSIYKKTLPDWKRSLPHFRNGKLYFKPIGDPVFARDLLTFPDNVEHCETVFGMLLGDTIILDNLDAANHYRKEVVKITHCPTLLTRDGDRIRSNGKFGGLQNKAPPMDKLRGMVFGAPVPKQCLILGEQIVHACVPSYSGG

SEQ ID NO: 22878 - protein, 47 aa, Artificial Sequence
  Synthetic polypeptide
GRARWLTPVIPALWEAKAGGSRGQEIKTILANTPLFSTSHSFTFQLF

SEQ ID NO: 22879 - protein, 131 aa, Artificial Sequence
  Synthetic polypeptide
SQHFGRPRRADHEVRRSRPSWLTRLCLVPVTLLLSNCSKADVDVIVDLRHKTTSPEALEIHGSFTWLGQTQYKLQLKSQEIHSLQLKACFVHTGVYNLGTPRVFAKLSDQVTVFETSQQNSMPALIIISNV

SEQ ID NO: 22880 - protein, 4 aa, Artificial Sequence
  Synthetic polypeptide
HAFV

SEQ ID NO: 22881 - protein, 70 aa, Artificial Sequence
  Synthetic polypeptide
SQHFGRPRRADHEVRRSRPSWLTRLCLVPVTLLLSNCSKADVDVIVDLRHKTTRSTGNPWIIHMAWTNTV

SEQ ID NO: 22882 - protein, 25 aa, Artificial Sequence
  Synthetic polypeptide
GRARWLTPVIPALWEAKAGGSRAFV

SEQ ID NO: 22883 - protein, 27 aa, Artificial Sequence
  Synthetic polypeptide
SQHFGRPRRADHEPLFSTSHSFTFQLF

SEQ ID NO: 22884 - protein, 129 aa, Artificial Sequence
  Synthetic polypeptide
PGAVAHACNPSTLGGQGGRITSLCLVPVTLLLSNCSKADVDVIVDLRHKTTSPEALEIHGSFTWLGQTQYKLQLKSQEIHSLQLKACFVHTGVYNLGTPRVFAKLSDQVTVFETSQQNSMPALIIISNV

SEQ ID NO: 22885 - protein, 68 aa, Artificial Sequence
  Synthetic polypeptide
PGAVAHACNPSTLGGQGGRITSLCLVPVTLLLSNCSKADVDVIVDLRHKTTRSTGNPWIIHMAWTNTV

SEQ ID NO: 22886 - protein, 131 aa, Artificial Sequence; identical to SEQ ID NO: 22879
  Synthetic polypeptide

SEQ ID NO: 22887 - protein, 4 aa, Artificial Sequence
  Synthetic polypeptide
HAFV

SEQ ID NO: 22888 - protein, 70 aa, Artificial Sequence; identical to SEQ ID NO: 22881
  Synthetic polypeptide

SEQ ID NO: 22889 - protein, 47 aa, Artificial Sequence
  Synthetic polypeptide
GRAPWLTPVIPALWEAEAGRSRGQEIKTILANTPLFSTSHSFTFQLF

SEQ ID NO: 22890 - protein, 69 aa, Artificial Sequence
  Synthetic polypeptide
GWAQWLTPVVPALGGQAIGVKHPHLITQKLTKRIQVLLVILLLSVPCVKNQILPDSVYWITVTVITYFR

SEQ ID NO: 22891 - protein, 8 aa, Artificial Sequence
  Synthetic polypeptide
SQLWEAKQ

SEQ ID NO: 22892 - protein, 130 aa, Artificial Sequence
  Synthetic polypeptide
MGAVAHACSPSFGRPSNRSETSTSDNTETYQENTSSSGHPTFKCPLCQESNFTRQRLLDHCNSNHLFQIVPVTCPICVSLPWGDPSQITRNFVSHLNQRHQFDYGEFVNLQLDEETQYQTAVEESFQVNI

SEQ ID NO: 22893 - protein, 791 aa, Artificial Sequence
  Synthetic polypeptide
IRHGQFKLLEQDRDIKEPVQYFNSVEEVAKAFPERVYVMEDITFNVKVASGECNEDTEVYNITLCTGDELTLMGQAEILYAKTFKEKSRLNTIFKKIGKLNSISKLGKGKMPCLICMNHRTNESISLPFQCKGRFSTRSPLELQMQEGEHTIRNIVEKTRLPVNVTVPSPPPRNPYDLHFIREGHRYKFVNIQTKTVVVCCVLRNNKILPMHFPLHLTVPKFSLPEHLVKGESWPETLVHHWLGICQEQFDIDEYSRAVRDVKTDWNEECKSPKKGRCSGHNHVPNSLSYARDELTQSFHRLSVCVYGNNLHGNSEVNLHGCRDLGGDWAPFPHDILPYQDSGDSGSDYLFPEASEESAGIPGKSELPYEELWLEEGKPSHQPLTRSLSEKNRCDQFRGSVRSKCATSPLPIPGTLGAAVKSSDTALPPPPVPPKSEAVREECRLLNAPPVPPRSAKPLSTSPSIPPRTVKPARQQTRSPSPTLSYYSSGLHNIVTKTDTNPSESTPVSCYPCNRVKTDSVDLKSPFGSPSAEAVSSRLSWPNHYSGASESQTRSDFLLDPSRSYSYPRQKTPGTPKRNCPAPFDFDGCELLASPTSPVTAEFSSSVSGCPKSASYSLESTDVKSLAAGVTKQSTSCPALPPRAPKLVEEKVASETSPLPLKIDGAEEDPKSGSPDLSEDQYFVKKGMQDIFSASYPFSSPLHLQLAPRSCGDGSPWQPPADLSGLSIEEVSKSLRFIGLSEDVISFFVTEKIDGNLLVQLTEEILSEDFKLSKLQVKKIMQFINGWRPKI

SEQ ID NO: 22894 - protein, 32 aa, Artificial Sequence
  Synthetic polypeptide
HLGTCYRCVLDPHPTPSESDTGNSSCWNKTEI

SEQ ID NO: 22895 - protein, 46 aa, Artificial Sequence
  Synthetic polypeptide
TWELVIDAFLIPIRHLLNQTRAIQAAGTRPRYKGASAIFQQCGGGG

SEQ ID NO: 22896 - protein, 792 aa, Artificial Sequence
  Synthetic polypeptide
IRHGQFKLLEQDRDIKEPVQYFNSVEEVAKAFPERVYVMEDITFNVKVASGECNEDTEVYNITLCTGDELTLMGQAEILYAKTFKEKSRLNTIFKKIGKLNSISKLGKGKMPCLICMNHRTNESISLPFQCKGRFSTRSPLELQMQEGEHTIRNIVEKTRLPVNVTVPSPPPRNPYDLHFIREGHRYKFVNIQTKTVVVCCVLRNNKILPMHFPLHLTVPKFSLPEHLVKGESWPETLVHHWLGICQEQFDIDEYSRAVRDVKTDWNEECKSPKKGRCSGHNHVPNSLSYARDELTQSFHRLSVCVYGNNLHGNSEVNLHGCRDLGGDWAPFPHDILPYQDSGDSGSDYLFPEASEESAGIPGKSELPYEELWLEEGKPSHQPLTRSLSEKNRCDQFRGSVRSKCATSPLPIPGTLGAAVKSSDTALPPPPVPPKSEAVREECRLLNAPPVPPRSAKPLSTSPSIPPRTVKPARQQTRSPSPTLSYYSSGLHNISVTKTDTNPSESTPVSCYPCNRVKTDSVDLKSPFGSPSAEAVSSRLSWPNHYSGASESQTRSDFLLDPSRSYSYPRQKTPGTPKRNCPAPFDFDGCELLASPTSPVTAEFSSSVSGCPKSASYSLESTDVKSLAAGVTKQSTSCPALPPRAPKLVEEKVASETSPLPLKIDGAEEDPKSGSPDLSEDQYFVKKGMQDIFSASYPFSSPLHLQLAPRSCGDGSPWQPPADLSGLSIEEVSKSLRFIGLSEDVISFFVTEKIDGNLLVQLTEEILSEDFKLSKLQVKKIMQFINGWRPKI

SEQ ID NO: 22897 - protein, 852 aa, Artificial Sequence
  Synthetic polypeptide
LKPVIPALWEAEAGGSRGECVEGLRENDYLLIHSCRQWTTITAHSLEEGHYVIGPKIEIPVHYAGQFKLLEQDRDIKEPVQYFNSVEEVAKAFPERVYVMEDITFNVKVASGECNEDTEVYNITLCTGDELTLMGQAEILYAKTFKEKSRLNTIFKKIGKLNSISKLGKGKMPCLICMNHRTNESISLPFQCKGRFSTRSPLELQMQEGEHTIRNIVEKTRLPVNVTVPSPPPRNPYDLHFIREGHRYKFVNIQTKTVVVCCVLRNNKILPMHFPLHLTVPKFSLPEHLVKGESWPETLVHHWLGICQEQFDIDEYSRAVRDVKTDWNEECKSPKKGRCSGHNHVPNSLSYARDELTQSFHRLSVCVYGNNLHGNSEVNLHGCRDLGGDWAPFPHDILPYQDSGDSGSDYLFPEASEESAGIPGKSELPYEELWLEEGKPSHQPLTRSLSEKNRCDQFRGSVRSKCATSPLPIPGTLGAAVKSSDTALPPPPVPPKSEAVREECRLLNAPPVPPRSAKPLSTSPSIPPRTVKPARQQTRSPSPTLSYYSSGLHNIVTKTDTNPSESTPVSCYPCNRVKTDSVDLKSPFGSPSAEAVSSRLSWPNHYSGASESQTRSDFLLDPSRSYSYPRQKTPGTPKRNCPAPFDFDGCELLASPTSPVTAEFSSSVSGCPKSASYSLESTDVKSLAAGVTKQSTSCPALPPRAPKLVEEKVASETSPLPLKIDGAEEDPKSGSPDLSEDQYFVKKGMQDIFSASYPFSSPLHLQLAPRSCGDGSPWQPPADLSGLSIEEVSKSLRFIGLSEDVISFFVTEKIDGNLLVQLTEEILSEDFKLSKLQVKKIMQFINGWRPKI

SEQ ID NO: 22898 - protein, 16 aa, Artificial Sequence
  Synthetic polypeptide
SQHFGRLRRVDHEESA

SEQ ID NO: 22899 - protein, 15 aa, Artificial Sequence
  Synthetic polypeptide
GGWITRRVRRRAAGK

SEQ ID NO: 22900 - protein, 853 aa, Artificial Sequence
  Synthetic polypeptide
LKPVIPALWEAEAGGSRGECVEGLRENDYLLIHSCRQWTTITAHSLEEGHYVIGPKIEIPVHYAGQFKLLEQDRDIKEPVQYFNSVEEVAKAFPERVYVMEDITFNVKVASGECNEDTEVYNITLCTGDELTLMGQAEILYAKTFKEKSRLNTIFKKIGKLNSISKLGKGKMPCLICMNHRTNESISLPFQCKGRFSTRSPLELQMQEGEHTIRNIVEKTRLPVNVTVPSPPPRNPYDLHFIREGHRYKFVNIQTKTVVVCCVLRNNKILPMHFPLHLTVPKFSLPEHLVKGESWPETLVHHWLGICQEQFDIDEYSRAVRDVKTDWNEECKSPKKGRCSGHNHVPNSLSYARDELTQSFHRLSVCVYGNNLHGNSEVNLHGCRDLGGDWAPFPHDILPYQDSGDSGSDYLFPEASEESAGIPGKSELPYEELWLEEGKPSHQPLTRSLSEKNRCDQFRGSVRSKCATSPLPIPGTLGAAVKSSDTALPPPPVPPKSEAVREECRLLNAPPVPPRSAKPLSTSPSIPPRTVKPARQQTRSPSPTLSYYSSGLHNISVTKTDTNPSESTPVSCYPCNRVKTDSVDLKSPFGSPSAEAVSSRLSWPNHYSGASESQTRSDFLLDPSRSYSYPRQKTPGTPKRNCPAPFDFDGCELLASPTSPVTAEFSSSVSGCPKSASYSLESTDVKSLAAGVTKQSTSCPALPPRAPKLVEEKVASETSPLPLKIDGAEEDPKSGSPDLSEDQYFVKKGMQDIFSASYPFSSPLHLQLAPRSCGDGSPWQPPADLSGLSIEEVSKSLRFIGLSEDVISFFVTEKIDGNLLVQLTEEILSEDFKLSKLQVKKIMQFINGWRPKI

SEQ ID NO: 22901 - protein, 753 aa, Artificial Sequence
  Synthetic polypeptide
SQGKLENTLRSRTSSTKDLKEDWSVTTPVKEVKPGEKRDEKCPELKQEMETLLSEAIRLIKSLETDRADAEEALKQQRSRKNMINMKIDSWSVWKLQELPLAVQKEHEAYLSDVIELQWHLEDKANQLQHFEKQKTELEEANAKIQADIDYMNEHGPLLDSKQNQELQDLKNHYKKKMEVMDLHRKVNEELEEALEACENARLKAQQIKEEIDKDIYQDEKTIEAYKREIYQLNSLFDHYSSSVINVNTNIEEKEEEVTEAIRETKSSKNELHSLSKMLEDLRRVYDQLTWKQKSHENQYLEAVNDFYAAKKTWDIELSDVAKDFSAISLACTKLTEDNKKLEIDINKITVKTNESIRKKSKYESEIKYLTIMKLKNDKHLKNIYKEAYRIGTLFHLTKHKTDEMEDKIAEVRRKFKGREEFLKKLTQGEVAAGMVLQKKLYSIYEVQALERKELIKNRAICAMSLAELQEPLLQLEDEAERIRSLDKEHSVMLNNIIDQKDLIRRKVGKVKKKLRKKGKKTLDALIETESKRSAIFKDLEATKSKTMIFYAKINELNEELKAKEEEKKSFDQTLEILKNKFITMRFKREHAQTVFDHYMQEKKDCEERIFEEDQRFRVLLAVRQKTLQDTQKIIADSLEENLRLAQEYQQLQITFLKEKDNYFNIYDKQLSLDTSIRDKKQLCQLQRRMHTLWQEHFKLVVLFSQMRLANFQTDSQESIQKILAVQEESSNLMQHILGFFQTLTDGTCENDG

SEQ ID NO: 22902 - protein, 43 aa, Artificial Sequence
  Synthetic polypeptide
VKAVITGEIRKHLEEQNFFHKRPERRLECNYTSERGQTRRKER

SEQ ID NO: 22903 - protein, 715 aa, Artificial Sequence
  Synthetic polypeptide
SQGKLENTLRSRTSSTKDLKEDWSVTTPVKEVKPGEKRDEKCPELKQEMETLLSEAIRLIKSLETDRADAEEALKQQRSRKNMINMKIDSWSVWKLQELPLAVQKEHEAYLSDVIELQWHLEDKANQLQHFEKQKTELEEANAKIQADIDYMNEHGPLLDSKQNQELQDLKNHYKKKMEVMDLHRKVNEELEEALEACENARLKAQQIKEEIDKDIYQDEKTIEAYKREIYQLNSLFDHYSSSVINVNTNIEEKEEEVTEAIRETKSSKNELHSLSKMLEDLRRVYDQLTWKQKSHENQYLEAVNDFYAAKKTWDIELSDVAKDFSAISLACTKLTEDNKKLEIDINKITVKTNESIRKKSKYESEIKYLTIMKLKNDKHLKNIYKEAYRIGTLFHLTKHKTDEMEDKIAEVRRKFKGREEFLKKLTQGEVAAGMVLQKKLYSIYEVQALERKELIKNRAICAMSLAELQEPLLQLEDEAERIRSLDKEHSVSKRSAIFKDLEATKSKTMIFYAKINELNEELKAKEEEKKSFDQTLEILKNKFITMRFKREHAQTVFDHYMQEKKDCEERIFEEDQRFRVLLAVRQKTLQDTQKIIADSLEENLRLAQEYQQLQITFLKEKDNYFNIYDKQLSLDTSIRDKKQLCQLQRRMHTLWQEHFKLVVLFSQMRLANFQTDSQESIQKILAVQEESSNLMQHILGFFQTLTDGTCENDG

SEQ ID NO: 22904 - protein, 777 aa, Artificial Sequence
  Synthetic polypeptide
SQGKLENTLRSRTSSTKDLKEDWSVTTPVKEVKPGEKRDEKCPELKQEMETLLSEAIRLIKSLETDRADAEEALKQQRSRKNMINMKIDSWSVWKLQELPLAVQKEHEAYLSDVIELQWHLEDKANQLQHFEKQKTELEEANAKIQADIDYMNEHGPLLDSKQNQELQDLKNHYKKKMEVMDLHRKVNEELEEALEACENARLKAQQIKEEIDKDIYQDEKTIEAYKREIYQLNSLFDHYSSSVINVNTNIEEKEEEVTEAIRETKSSKNELHSLSKMLEDLRRVYDQLTWKQKSHENQYLEAVNDFYAAKKTWDIELSDVAKDFSAISLACTKLTEDNKKLEIDINKITVKTNESIRKKSKYESEIKYLTIMKLKNDKHLKNIYKEAYRIGTLFHLTKHKTDEMEDKIAEVRRKFKGREEFLKKLTQGEVAAGMVLQKKLYSIYEVQALERKELIKNRAICAMSLAELQEPLLQLEDEAERIRSLDKEHSVMLNNIIDQKDLIRRKVGKVKKKLRKKGKKTLDALIETESKRSAIFKDLEATKSKTMIFYAKINELNEELKAKEEEKKSFDQTLEILKNKFITMRFKREHAQTVFDHYMQEKKDCEERIFEEDQRFRVLLAVRQKTLQDTQKIIADSLEENLRLAQEYQQLQITFLKEKDNYFNIYDKQLSLDTSIRDKKQVAGFLPKKLPNSLPIISDELSNFQLCQLQRRMHTLWQEHFKLVVLFSQMRLANFQTDSQESIQKILAVQEESSNLMQHILGFFQTLTDGTCENDG

SEQ ID NO: 22905 - protein, 703 aa, Artificial Sequence
  Synthetic polypeptide
SQGKLENTLRSRTSSTKDLKEDWSVTTPVKEVKPGEKRDEKCPELKQEMETLLSEAIRLIKSLETDRADAEEALKQQRSRKNMINMKIDSWSVWKLQELPLAVQKEHEAYLSDVIELQWHLEDKANQLQHFEKQKTELEEANAKIQADIDYMNEHGPLLDSKQNQELQDLKNHYKKKMEVMDLHRKVNEELEEALEACENARLKAQQIKEEIDKDIYQDEKTIEAYKREIYQLNSLFDHYSSSVINVNTNIEEKEEEVTEAIRETKSSKNELHSLSKMLEDLRRVYDQLTWKQKSHENQYLEAVNDFYAAKKTWDIELSDVAKDFSAISLACTKLTEDNKKLEIDINKITVKTNESIRKKSKYESEIKYLTIMKLKNDKHLKNIYKEAYRIGTLFHLTKHKTDEMEDKIAEVRRKFKGREEFLKKLTQGEVAAGMVLQKKLYSIYEVQALERKELIKNRAICAMSLAELQEPLLQLEDEAERIRSLDKEHSVMLNNIIDQKDLIRRKVGKVKKKLRKKGKKTLDALIETESKRSAIFKDLEATKSKTMIFYAKINELNEELKAKEEEKKSFDQTLEILKNKFITMRFKREHAQTVFDHYMQEKKDCEERIFEEDQRFRVLLAVRQKTLQDTQLCQLQRRMHTLWQEHFKLVVLFSQMRLANFQTDSQESIQKILAVQEESSNLMQHILGFFQTLTDGTCENDG

SEQ ID NO: 22906 - protein, 735 aa, Artificial Sequence
  Synthetic polypeptide
SQGKLENTLRSRTSSTKDLKEDWSVTTPVKEVKPGEKRDEKCPELKQEMETLLSEAIRLIKSLETDRADAEEALKQQRSRKNMINMKIDSWSVWKLQELPLAVQKEHEAYLSDVIELQWHLEDKANQLQHFEKQKTELEEANAKIQADIDYMNEHGPLLDSKQNQELQDLKNHYKKKMEVMDLHRKVNEELEEALEACENARLKAQQIKEEIDKDIYQDEKTIEAYKREIYQLNSLFDHYSSSVINVNTNIEEKEEEVTEAIRETKSSKNELHSLSKMLEDLRRVYDQLTWKQKSHENQYLEAVNDFYAAKKTWDIELSDVAKDFSAISLACTKLTEDNKKLEIDINKITVKTNESIRKKSKYESEIKYLTIMKLKNDKHLKNIYKEAYRIGTLFHLTKHKTDEMEDKIAEVRRKFKGREEFLKKLTQGEVAAGMVLQKKLYSIYEVQALERKELIKNRAICAMSLAELQEPLLQLEDEAERIRSLDKEHSVMLNNIIDQKDLIRRKVGKVKKKLRKKGKKTLDALIETESKRSAIFKDLEATKSKTMIFYAKINELNEELKAKEEEKKSFDQTLEILKNKFITMRFKREHAQTVFDHYMQEKKDCEERIFEEDQRFRVLLAVRQKTLQDTQKIIADSLEENLRLAQEYQQLQITFLKEKDNYFNIYDKQLSLDTSIRDKKQLCQLQRRMHTLWQEHFKLVVLFSQMRLANFQTDSQESIQKILAVQNQYDLEKE

SEQ ID NO: 22907 - protein, 177 aa, Artificial Sequence
  Synthetic polypeptide
SQGKLENTLRSRTSSTKDLKEDWSVTTPVKEVKPGEKRDEKCPELKQEMETLLSEAIRLIKSLETDRADAEEALKQQRSRKNMINMKIDSWSVWKLQELPLAVQKEHEAYLSDVIELQWHLEDKANQLQHFEKQKTELEEANAKIQADIDYMNEHGPLLDSKQNQELQDLKNHYKKK

SEQ ID NO: 22908 - protein, 34 aa, Artificial Sequence
  Synthetic polypeptide
FQHFGRPRQVDHEVRSSRPACTSHRFRSSKRPST

SEQ ID NO: 22909 - protein, 44 aa, Artificial Sequence
  Synthetic polypeptide
MGAVAHACNSSTLGGRGRWITKSGVQDQPAQVTDSGVQRGLQHD

SEQ ID NO: 22910 - protein, 175 aa, Artificial Sequence
  Synthetic polypeptide
WVRWLTPVIPALWEAEAGGSRSQEFKTSLHKSQIQEFKEAFNMIDQNRDGFIDKEDLHDMLASLGKNPTDEYLDAMMNEAPGPINFTMFLTMFGEKLNGTDPEDVIRNAFACFDEEATGTIQEDYLRELLTTMGDRFTDEEVDELYREAPIDKKGNFNYIEFTRILKHGAKDKDD

SEQ ID NO: 22911 - protein, 118 aa, Artificial Sequence
  Synthetic polypeptide
WVRWLTPVIPALWEAEAGGSRSQEFKTSLHKSQIQEFKEAFNMIDQNRDGFIDKEDLHDMLASLGKNPTDEYLDAMMNEAPGPINFTMFLTMFGEKLNGTDPEDVIRNAFACFDEEAT

SEQ ID NO: 22912 - protein, 34 aa, Artificial Sequence; identical to SEQ ID NO: 22908
  Synthetic polypeptide

SEQ ID NO: 22913 - protein, 44 aa, Artificial Sequence; identical to SEQ ID NO: 22909
  Synthetic polypeptide

SEQ ID NO: 22914 - protein, 175 aa, Artificial Sequence
  Synthetic polypeptide
WVRWLTPVIPALWEAEAGGSRSQEFKTSLHKSQIQEFKEAFNMIDQNRDGFIDKEDLHDMLASLGKNPTDAYLDAMMNEAPGPINFTMFLTMFGEKLNGTDPEDVIRNAFACFDEEATGTIQEDYLRELLTTMGDRFTDEEVDELYREAPIDKKGNFNYIEFTRILKHGAKDKDD

SEQ ID NO: 22915 - protein, 20 aa, Artificial Sequence
  Synthetic polypeptide
SLELWQDGGWQSVDGKARNC

SEQ ID NO: 22916 - protein, 311 aa, Artificial Sequence
  Synthetic polypeptide
NYGRMVAGKVLMAKQEIVECVASAAMISPGKLPGETHSQRIAEEALGGLDNSKKQKGNAAGNKISQLPSQDRHFSLATFNRRIPTEHSVLESHESEGSFSMNSNDITQQSVDTREKLYECFDCGKAFCQSSKLIRHQRIHTGERPYACKECGKAFSLSSDLVRHQRIHSGEKPYECCECGKAFRGSSELIRHRRIHTGEKPYECGECGKAFSRSSALIQHKKIHTGDKSYECIACGKAFGRSSILIEHQRIHTGEKPYECNECGKSFNQSSALTQHQRIHTGEKPYECSECRKTFRHRSGLMQHQRTHTRV

SEQ ID NO: 22917 - protein, 20 aa, Artificial Sequence
  Synthetic polypeptide
HIDLGLLVSRIMAGWWLAKC

SEQ ID NO: 22918 - protein, 43 aa, Artificial Sequence
  Synthetic polypeptide
RYMHAYVHCSTTHNSKDMDSTQMPTSDRVDKENVMAGWWLAKC

SEQ ID NO: 22919 - protein, 313 aa, Artificial Sequence
  Synthetic polypeptide
RKCDGRMVAGKVLMAKQEIVECVASAAMISPGKLPGETHSQRIAEEALGGLDNSKKQKGNAAGNKISQLPSQDRHFSLATFNRRIPTEHSVLESHESEGSFSMNSNDITQQSVDTREKLYECFDCGKAFCQSSKLIRHQRIHTGERPYACKECGKAFSLSSDLVRHQRIHSGEKPYECCECGKAFRGSSELIRHRRIHTGEKPYECGECGKAFSRSSALIQHKKIHTGDKSYECIACGKAFGRSSILIEHQRIHTGEKPYECNECGKSFNQSSALTQHQRIHTGEKPYECSECRKTFRHRSGLMQHQRTHTRV

SEQ ID NO: 22920 - protein, 30 aa, Artificial Sequence
  Synthetic polypeptide
LILTYVPLAFRHDCEASPAAWKWYQHGSHE

SEQ ID NO: 22921 - protein, 159 aa, Artificial Sequence
  Synthetic polypeptide
HTCLLPSAMIVRPPQPRGNGISMEAMSENKMVPSEFSTGPVEKAAKPLPFKDPNFVHSGHGGAVAGKKNRTWKNLKQILASERALPWQLNDPNYFSIDAPPSFKPAKKYSDVSGLLANYTDPQSKLRFSTIEEFSYIRRLPSDVVTGYLALRKATSIVP

SEQ ID NO: 22922 - protein, 23 aa, Artificial Sequence
  Synthetic polypeptide
VKTLRDCWEGMIDFNIRASCLPP

SEQ ID NO: 22923 - protein, 126 aa, Artificial Sequence
  Synthetic polypeptide
HTCLLPSAMIVRPPQPRGNGISMEAMSENKMVPSEFSTGPVEKAAKPLPFKDPNFVHSGHGGAVAGKKNRTWKNLKQILASERALPWQLNDPNYFSIDAPPSFKPAKKYSDVSGLLANYTDPQSKL

SEQ ID NO: 22924 - protein, 24 aa, Artificial Sequence
  Synthetic polypeptide
VALAVTVRMVVLVVVMMENMMVRS

SEQ ID NO: 22925 - protein, 261 aa, Artificial Sequence
  Synthetic polypeptide
SAGCDCEDGGFGGGDDGEYDGKVMIAHAHPQEVYNEYVPRGCKNKCHSHFHDTLGQSDDLIHHHHDYHHILHHHHHQNHHPHSHSQRYSREELKDAGVATLAWMVIMGDGLHNFSDGLAIGAAFTEGLSSGLSTSVAVFCHELPHELGDFAVLLKAGMTVKQAVLYNALSAMLAYLGMATGIFIGHYAENVSMWIFALTAGLFMYVALVDMVPEMLHNDASDHGCSRWGYFFLQNAGMLLGFGIMLLISIFEHKIVFRINF

SEQ ID NO: 22926 - protein, 214 aa, Artificial Sequence
  Synthetic polypeptide
SAGCDCEDGGFGGGDDGEYDGKVMIAHAHPQEVYNEYVPRGCKNKCHSHFHDTLGQSDDLIHHHHDYHHILHHHHHQNHHPHSHSQRYSREELKDAGVATLAWMVIMGDGLHNFSDGLAIGAAFTEGLSSGLSTSVAVFCHELPHELGDFAVLLKAGMTVKQAVLYNALSAMLAYLGMATGIFIGHYAENVSMWIFALTAGLFMYVALVDMVSF

SEQ ID NO: 22927 - protein, 212 aa, Artificial Sequence
  Synthetic polypeptide
SAGCDCEDGGFGGGDDGEYDGKVMIAHAHPQEVYNEYVPRGCKNKCHSHFHDTLGQSDDLIHHHHDYHHILHHHHHQNHHPHSHSQRYSREELKDAGVATLAWMVIMGDGLHNFSDGLAIGAAFTEGLSSGLSTSVAVFCHELPHELGDFAVLLKAGMTVKQAVLYNALSAMLAYLGMATGIFIGHYAENVSMWIFALTAGLFMYVALVDMV

SEQ ID NO: 22928 - protein, 79 aa, Artificial Sequence
  Synthetic polypeptide
GLPSHDSYTACATELSILTMQVPPCSPRASSKASLVISWKTLMVILTARTSAASSPMTLWSRCATESWRTSTPPQKTTL

SEQ ID NO: 22929 - protein, 54 aa, Artificial Sequence
  Synthetic polypeptide
HLPLHKHLLSLCLSLSLLSPYEDVLASLSTKIVKFPEASPAMTPIQPVQLNCLS

SEQ ID NO: 22930 - protein, 218 aa, Artificial Sequence
  Synthetic polypeptide
GQEFKTSLDNMAILQLYKTIMLISQKNNCVMPEDVKNFYLMTNGFHMTWSVKLDEHIIPLGSMAINSISKLTQLTQSSMYSLPNAPTLADLEDDTHEASDDQPEKPHFDSRSVIFELDSCNGSGKVCLVYKSGKPALAEDTEIWFLDRALYWHFLTDTFTAYYRLLITHLGLPQWQYAFTSYGISPQAKALLGLFDGSSPPVDLNNPRGRTGIRSRRF

SEQ ID NO: 22931 - protein, 7 aa, Artificial Sequence
  Synthetic polypeptide
LARRITV

SEQ ID NO: 22932 - protein, 3 aa, Artificial Sequence
  Synthetic polypeptide
PEE

SEQ ID NO: 22933 - protein, 201 aa, Artificial Sequence
  Synthetic polypeptide
GQEFKTSLDNMAILQLYKTIMLISQKNNCVMPEDVKNFYLMTNGFHMTWSVKLDEHIIPLGSMAINSISKLTQLTQSSMYSLPNAPTLADLEDDTHEASDDQPEKPHFDSRSVIFELDSCNGSGKVCLVYKSGKPALAEDTEIWFLDRALYWHFLTDTFTAYYRLLITHLGLPQWQYAFTSYGISPQAKAWGLATSKESAA

SEQ ID NO: 22934 - protein, 274 aa, Artificial Sequence
  Synthetic polypeptide
GQEFKTSLDNMAILQLYKTIMLISQKNNCVMPEDVKNFYLMTNGFHMTWSVKLDEHIIPLGSMAINSISKLTQLTQSSMYSLPNAPTLADLEDDTHEASDDQPEKPHFDSRSVIFELDSCNGSGKVCLVYKSGKPALAEDTEIWFLDRALYWHFLTDTFTAYYRLLITHLGLPQWQYAFTSYGISPQAKITYNIKMNRRKCVHWKLAVEPLQWELRSCVSAGMGTGHKQRVSSMKPRSCSVCSRRQSNSMGTTVSQSFLSYGKNVLFFTVRCCF

SEQ ID NO: 22935 - protein, 190 aa, Artificial Sequence
  Synthetic polypeptide
GQEFKTSLDNMAILQLYKTIMLISQKNNCVMPEDVKNFYLMTNGFHMTWSVKLDEHIIPLGSMAINSISKLTQLTQSSMYSLPNAPTLADLEDDTHEASDDQPEKPHFDSRSVIFELDSCNGSGKVCLVYKSGKPALAEDTEIWFLDRALYWHFLTDTFTAYYRLLITHLGLPQWQYAFTSYGISPQAKV

SEQ ID NO: 22936 - protein, 270 aa, Artificial Sequence
  Synthetic polypeptide
GQEFKTSLDNMAILQLYKTIMLISQKNNCVMPEDVKNFYLMTNGFHMTWSVKLDEHIIPLGSMAINSISKLTQLTQSSMYSLPNAPTLADLEDDTHEASDDQPEKPHFDSRSVIFELDSCNGSGKVCLVYKSGKPALAEDTEIWFLDRALYWHFLTDTFTAYYRLLITHLGLPQWQYAFTSYGISPQAKQWFSMYKPITYNTNLLTEETDSFVNKLDPSKVFKSKNKIVIPKKKGPVQPAGGQKGPSGPSGPSTSSTSKSSSGSGNPTRK

SEQ ID NO: 22937 - protein, 235 aa, Artificial Sequence
  Synthetic polypeptide
GQEFKTSLDNMAILQLYKTIMLISQKNNCVMPEDVKNFYLMTNGFHMTWSVKLDDLEDDTHEASDDQPEKPHFDSRSVIFELDSCNGSGKVCLVYKSGKPALAEDTEIWFLDRALYWHFLTDTFTAYYRLLITHLGLPQWQYAFTSYGISPQAKQWFSMYKPITYNTNLLTEETDSFVNKLDPSKVFKSKNKIVIPKKKGPVQPAGGQKGPSGPSGPSTSSTSKSSSGSGNPTRK

SEQ ID NO: 22938 - protein, 227 aa, Artificial Sequence
  Synthetic polypeptide
GQEFKTSLDNMAILQLYKTIMLISQKNNCVMPEDVKNFYLMTNGFHMTWSVKLDASDDQPEKPHFDSRSVIFELDSCNGSGKVCLVYKSGKPALAEDTEIWFLDRALYWHFLTDTFTAYYRLLITHLGLPQWQYAFTSYGISPQAKQWFSMYKPITYNTNLLTEETDSFVNKLDPSKVFKSKNKIVIPKKKGPVQPAGGQKGPSGPSGPSTSSTSKSSSGSGNPTRK

SEQ ID NO: 22939 - protein, 197 aa, Artificial Sequence
  Synthetic polypeptide
GQEFKTSLDNMAILQLYKTIMLISQKNNCVMPEDVKNFYLMTNGFHMTWSVKLDEHIIPLGSMAINSISKLTQLTQSSMYSLPNAPTLADLEDDTHEASDDQPEKPHFDSRSVIFELDSCNGSGKVCLVYKSGKPALAEDTEIWFLDRALYWHFLTDTFTAYYRLLITHLGLPQWQYAFTSYGISPQAKVREEHLPL

SEQ ID NO: 22940 - protein, 89 aa, Artificial Sequence
  Synthetic polypeptide
GQEFKTSLDNMAILQLYKTIMLISQKNNCVMPEDVKNFYLMTNGFHMTWSVKLDVFSANKENMELPSLYLHPNHRRLEPSKKTAKFSSL

SEQ ID NO: 22941 - protein, 11 aa, Artificial Sequence
  Synthetic polypeptide
STQYTTGGYSK

SEQ ID NO: 22942 - protein, 462 aa, Artificial Sequence
  Synthetic polypeptide
KNEGHDQLSIPLEAIVSEEKEVTEERLKAEQESFEKKIRQLEEQNELIIKEREALQLQYRECQELLSLYQKYLSEQQEKLTMSLSELGAARMQEQQVSSRKSTLQCSSVELDGSYLSIARPQTYYQTKQRPKSAVQDSASESLIAFRNNSLKPVTLHHPKDDLDKIPSETTTCNCESPGRKPAVPTEKMPQEELHMKECPHLKPTPSQCCGHRLAADRVHDSHPTNMTPQHPKTHPESCSYCRLSWASLVHGGGALQPIETLKKQISEDRKQQLMLQKMELEIEKERLQHLLAQQETKLLLKQQQLHQSRLDYNCLLKSNCDGWLLGTSSSIKKHQDPPNSGENRKERKTVGFHSHMKDDAQWSCQKKDTCRPQRGTVTGVRKDASTSPMPTGSLKDFVTTASPSLQHTTSRYETSLLDLVQSLSPNSAPKPQRYPSREAGAWNHVNLQEVSSPSRRGGLHL

SEQ ID NO: 22943 - protein, 17 aa, Artificial Sequence
  Synthetic polypeptide
KNEGHDQLSIPLEAIVS

SEQ ID NO: 22944 - protein, 481 aa, Artificial Sequence
  Synthetic polypeptide
KNEGHDQLSIPLEAIVSEEKEVTEERLKAEQESFEKKIRQLEEQNELIIKEREALQLQYRECQELLSLYQKYLSEQQEKLTMSLSELGAARMQEQQVSSRKSTLQCSSVELDGSYLSIARPQTYYQTKQRPKSAVQDSASESLIAFRNNSLKPVTLHHPKDDLDKIPSETTTCNCESPGRKPAVPTEKMPQEELHMKECPHLKPTPSQCCGHRLAADRVHDSHPTNMTPQHPKTHPESCSYCRLSWASLVHGGGALQPIETLKKQISEDRKQQLMLQKMELEIEKERLQHLLAQQETKLLLKQQQLHQSRLDYNCLLKSNCDGWLLGTSSSIKKHQDPPNSGENRKERKTVGFHSHMKDDAQWSCQKKDTCRPQRGTVTGVRKDASTSPMPTGSLKDFVTTASPSLQHTTSRYETSLLDLVQSLSPNSAPKPQRYPSREAGAWNHGTFRLSPLKSTRKKMGMHRTPEELEENQILEDIFFI

SEQ ID NO: 22945 - protein, 67 aa, Artificial Sequence
  Synthetic polypeptide
KNEGHDQLSIPLEAIVSEEKEVTEERLKAEQESFEKKIRQLEEQNELIIKEREDILLKVLFFNVQEV

SEQ ID NO: 22946 - protein, 517 aa, Artificial Sequence
  Synthetic polypeptide
KNEGHDQLSIPLEAIVSEEKEVTEERLKAEQESFEKKIRQLEEQNELIIKEREALQLQYRECQELLSLYQKYLSEQQEKLTMSLSELGAARMQEQQVSSRKSTLQCSSVELDGSYLSIARPQTYYQTKQRPKSAVQDSASESLIAFRNNSLKPVTLHHPKDDLDKIPSETTTCNCESPGRKPAVPTEKMPQEELHMKECPHLKPTPSQCCGHRLAADRVHDSHPTNMTPQHPKTHPESCSYCRLSWASLVHGGGALQPIETLKKQISEDRKQQLMLQKMELEIEKERLQHLLAQQETKLLLKQQQLHQSRLDYNWLKAQALFKSRELVAEKQLTKPQELKLDMNGSDSGPSLLKSNCDGWLLGTSSSIKKHQDPPNSGENRKERKTVGFHSHMKDDAQWSCQKKDTCRPQRGTVTGVRKDASTSPMPTGSLKDFVTTASPSLQHTTSRYETSLLDLVQSLSPNSAPKPQRYPSREAGAWNHGTFRLSPLKSTRKKMGMHRTPEELEENQILEDIFFI

SEQ ID NO: 22947 - protein, 8 aa, Artificial Sequence
  Synthetic polypeptide
LKQNLPQV

SEQ ID NO: 22948 - protein, 8 aa, Artificial Sequence
  Synthetic polypeptide
NRIFPRCD

SEQ ID NO: 22949 - protein, 255 aa, Artificial Sequence
  Synthetic polypeptide
KRKDDLKGRALSPQVWTLKSQRMFFPGWIMKLTKTESSPGVTEVTIIEKPPAERHMISSWEQKNNCVMPEDVKNFYLMTNGFHMTWSVKLDEHIIPLGSMAINSISKLTQLTQSSMYSLPNAPTLADLEDDTHEASDDQPEKPHFDSRSVIFELDSCNGSGKVCLVYKSGKPALAEDTEIWFLDRALYWHFLTDTFTAYYRLLITHLGLPQWQYAFTSYGISPQAKALLGLFDGSSPPVDLNNPRGRTGIRSRRF

SEQ ID NO: 22950 - protein, 311 aa, Artificial Sequence
  Synthetic polypeptide
KRKDDLKGRALSPQVWTLKSQRMFFPGWIMKLTKTESSPGVTEVTIIEKPPAERHMISSWEQKNNCVMPEDVKNFYLMTNGFHMTWSVKLDEHIIPLGSMAINSISKLTQLTQSSMYSLPNAPTLADLEDDTHEASDDQPEKPHFDSRSVIFELDSCNGSGKVCLVYKSGKPALAEDTEIWFLDRALYWHFLTDTFTAYYRLLITHLGLPQWQYAFTSYGISPQAKITYNIKMNRRKCVHWKLAVEPLQWELRSCVSAGMGTGHKQRVSSMKPRSCSVCSRRQSNSMGTTVSQSFLSYGKNVLFFTVRCCF

SEQ ID NO: 22951 - protein, 227 aa, Artificial Sequence
  Synthetic polypeptide
KRKDDLKGRALSPQVWTLKSQRMFFPGWIMKLTKTESSPGVTEVTIIEKPPAERHMISSWEQKNNCVMPEDVKNFYLMTNGFHMTWSVKLDEHIIPLGSMAINSISKLTQLTQSSMYSLPNAPTLADLEDDTHEASDDQPEKPHFDSRSVIFELDSCNGSGKVCLVYKSGKPALAEDTEIWFLDRALYWHFLTDTFTAYYRLLITHLGLPQWQYAFTSYGISPQAKV

SEQ ID NO: 22952 - protein, 307 aa, Artificial Sequence
  Synthetic polypeptide
KRKDDLKGRALSPQVWTLKSQRMFFPGWIMKLTKTESSPGVTEVTIIEKPPAERHMISSWEQKNNCVMPEDVKNFYLMTNGFHMTWSVKLDEHIIPLGSMAINSISKLTQLTQSSMYSLPNAPTLADLEDDTHEASDDQPEKPHFDSRSVIFELDSCNGSGKVCLVYKSGKPALAEDTEIWFLDRALYWHFLTDTFTAYYRLLITHLGLPQWQYAFTSYGISPQAKQWFSMYKPITYNTNLLTEETDSFVNKLDPSKVFKSKNKIVIPKKKGPVQPAGGQKGPSGPSGPSTSSTSKSSSGSGNPTRK

SEQ ID NO: 22953 - protein, 272 aa, Artificial Sequence
  Synthetic polypeptide
KRKDDLKGRALSPQVWTLKSQRMFFPGWIMKLTKTESSPGVTEVTIIEKPPAERHMISSWEQKNNCVMPEDVKNFYLMTNGFHMTWSVKLDDLEDDTHEASDDQPEKPHFDSRSVIFELDSCNGSGKVCLVYKSGKPALAEDTEIWFLDRALYWHFLTDTFTAYYRLLITHLGLPQWQYAFTSYGISPQAKQWFSMYKPITYNTNLLTEETDSFVNKLDPSKVFKSKNKIVIPKKKGPVQPAGGQKGPSGPSGPSTSSTSKSSSGSGNPTRK

SEQ ID NO: 22954 - protein, 264 aa, Artificial Sequence
  Synthetic polypeptide
KRKDDLKGRALSPQVWTLKSQRMFFPGWIMKLTKTESSPGVTEVTIIEKPPAERHMISSWEQKNNCVMPEDVKNFYLMTNGFHMTWSVKLDASDDQPEKPHFDSRSVIFELDSCNGSGKVCLVYKSGKPALAEDTEIWFLDRALYWHFLTDTFTAYYRLLITHLGLPQWQYAFTSYGISPQAKQWFSMYKPITYNTNLLTEETDSFVNKLDPSKVFKSKNKIVIPKKKGPVQPAGGQKGPSGPSGPSTSSTSKSSSGSGNPTRK

SEQ ID NO: 22955 - protein, 234 aa, Artificial Sequence
  Synthetic polypeptide
KRKDDLKGRALSPQVWTLKSQRMFFPGWIMKLTKTESSPGVTEVTIIEKPPAERHMISSWEQKNNCVMPEDVKNFYLMTNGFHMTWSVKLDEHIIPLGSMAINSISKLTQLTQSSMYSLPNAPTLADLEDDTHEASDDQPEKPHFDSRSVIFELDSCNGSGKVCLVYKSGKPALAEDTEIWFLDRALYWHFLTDTFTAYYRLLITHLGLPQWQYAFTSYGISPQAKVREEHLPL

SEQ ID NO: 22956 - protein, 126 aa, Artificial Sequence
  Synthetic polypeptide
KRKDDLKGRALSPQVWTLKSQRMFFPGWIMKLTKTESSPGVTEVTIIEKPPAERHMISSWEQKNNCVMPEDVKNFYLMTNGFHMTWSVKLDVFSANKENMELPSLYLHPNHRRLEPSKKTAKFSSL

SEQ ID NO: 22957 - protein, 82 aa, Artificial Sequence
  Synthetic polypeptide
KRKDDLKGRALSPQVWTLKSQRMFFPGWIMKLTKTESSPGVTEVTIIEKPPAERHMISSWEQMKKQRLKEFKEFGRHSGSCL

SEQ ID NO: 22958 - protein, 29 aa, Artificial Sequence
  Synthetic polypeptide
NPVSTKNTKLSWVWSGVPVVPATRDAEVS

SEQ ID NO: 22959 - protein, 16 aa, Artificial Sequence
  Synthetic polypeptide
SQLLGTLRCHKTEFCS

SEQ ID NO: 22960 - protein, 668 aa, Artificial Sequence
  Synthetic polypeptide
NYFGLLASTTVPQDEWTGYTPRGKDDEIPCRRMRSGSYIKAMGDEDSGDSDTSPKPSPKVAARRESYLKATQPSLTELTTLKISNEHSPKLQIRSHSYLRAVSEVSINRSLDSLDPAGLLTSPKFRSRNESYMRAMSTISQVSEMEVNGQFESVCESVFSELESQAVEALDLPMPGCFRMRSHSYVRAIEKGCSQDDECVSLRSSSPPRTTTTVRTIQSSTVSSCITTYKKTPPPVPPRTTTKPFISITAQSSTESAQDAYMDGQGQRGDIISQSGLSNSTESLDSMKALTAAIEAANAQIHGPASQHMGNNTATVTTTTTIATVTTEDRKKDHFKKNRCLSIGIQVDDAEEPDKTGENKAPSKFQSVGVQVEEEKCFRRFTRSNSVTTAVQADLDFHDNLENSLESIEDNSCPGPMARQFSRDASTSTVSIQGSGNHYHACAADDDFDTDFDPSILPPPDPWIDSITEDPLEAVQRSVCHRDGHWFLKLLQAERDRMEGWCQQMEREERENNLPEDILGKIRTAVGSAQLLMAQKFYQFRELCEENLNPNAHPRPTSQDLAGFWDMLQLSIENISMKFDELHQLKANNWKQMDPLDKKERRAPPPVPKKPAKGPAPLIRERSLESSQRQEARKRLMAAKRAASVRQNSATESAESIEIYIPEAQTRL

SEQ ID NO: 22961 - protein, 134 aa, Artificial Sequence
  Synthetic polypeptide
RWRKGPWDKGKRQGNGFSPRASRGRPALLSWFQLSETILDFWPPQLFHKMNGQGTPHEVKMMKFHAEECGVAVISRPWGMKTVETQTRVLSLLQKLLRGEKAISRLLSHPLQNSPHSKSPMNTHPNSRSGVIVT

SEQ ID NO: 22962 - protein, 57 aa, Artificial Sequence
  Synthetic polypeptide
RCFALGCEDGERDHGTRGKGREMDSPLEPPEDAQLCYLGFSSVKLFWTSGLHNCSTR

SEQ ID NO: 22963 - protein, 650 aa, Artificial Sequence
  Synthetic polypeptide
NYFGLLASTTVPQDEWTGYTPRGKDDEIPCRRMRSGSYIKAMGDEDSGDSDTSPKPSPKVAARRESYLKATQPSLTELTTLKISNEHSPKLQIRSHSYLRAVSEVSINRSLDSLDPAGLLTSPKFRSRNESYMRAMSTISQVSEMEVNGQFESVCESVFSELESQAVEALDLPMPGCFRMRSHSYVRAIEKGCSQDDECVSLRSSSPPRTTTTVRTIQSSTGVIKLSSAVEAQSSTESAQDAYMDGQGQRGDIISQSGLSNSTESLDSMKALTAAIEAANAQIHGPASQHMGNNTATVTTTTTIATVTTEDRKKDHFKKNRCLSIGIQVDDAEEPDKTGENKAPSKFQSVGVQVEEEKCFRRFTRSNSVTTAVQADLDFHDNLENSLESIEDNSCPGPMARQFSRDASTSTVSIQGSGNHYHACAADDDFDTDFDPSILPPPDPWIDSITEDPLEAVQRSVCHRDGHWFLKLLQAERDRMEGWCQQMEREERENNLPEDILGKIRTAVGSAQLLMAQKFYQFRELCEENLNPNAHPRPTSQDLAGFWDMLQLSIENISMKFDELHQLKANNWKQMDPLDKKERRAPPPVPKKPAKGPAPLIRERSLESSQRQEARKRLMAAKRAASVRQNSATESAESIEIYIPEAQTRL

SEQ ID NO: 22964 - protein, 678 aa, Artificial Sequence
  Synthetic polypeptide
NYFGLLASTTVPQDEWTGYTPRGKDDEIPCRRMRSGSYIKAMGDEDSGDSDTSPKPSPKVAARRESYLKATQPSLTELTTLKISNEHSPKLQIRSHSYLRAVSEVSINRSLDSLDPAGLLTSPKFRSRNESYMRAMSTISQVSEMEVNGQFESVCESVFSELESQAVEALDLPMPGCFRMRSHSYVRAIEKGCSQDDECVSLRSSSPPRTTTTVRTIQSSTGVIKLSSAVEVSSCITTYKKTPPPVPPRTTTKPFISITAQSSTESAQDAYMDGQGQRGDIISQSGLSNSTESLDSMKALTAAIEAANAQIHGPASQHMGNNTATVTTTTTIATVTTEDRKKDHFKKNRCLSIGIQVDDAEEPDKTGENKAPSKFQSVGVQVEEEKCFRRFTRSNSVTTAVQADLDFHDNLENSLESIEDNSCPGPMARQFSRDASTSTVSIQGSGNHYHACAADDDFDTDFDPSILPPPDPWIDSITEDPLEAVQRSVCHRDGHWFLKLLQAERDRMEGWCQQMEREERENNLPEDILGKIRTAVGSAQLLMAQKFYQFRELCEENLNPNAHPRPTSQDLAGFWDMLQLSIENISMKFDELHQLKANNWKQMDPLDKKERRAPPPVPKKPAKGPAPLIRERSLESSQRQEARKRLMAAKRAASVRQNSATESAESIEIYIPEAQTRL

SEQ ID NO: 22965 - protein, 640 aa, Artificial Sequence
  Synthetic polypeptide
NYFGLLASTTVPQDEWTGYTPRGKDDEIPCRRMRSGSYIKAMGDEDSGDSDTSPKPSPKVAARRESYLKATQPSLTELTTLKISNEHSPKLQIRSHSYLRAVSEVSINRSLDSLDPAGLLTSPKFRSRNESYMRAMSTISQVSEMEVNGQFESVCESVFSELESQAVEALDLPMPGCFRMRSHSYVRAIEKGCSQDDECVSLRSSSPPRTTTTVRTIQSSTAQSSTESAQDAYMDGQGQRGDIISQSGLSNSTESLDSMKALTAAIEAANAQIHGPASQHMGNNTATVTTTTTIATVTTEDRKKDHFKKNRCLSIGIQVDDAEEPDKTGENKAPSKFQSVGVQVEEEKCFRRFTRSNSVTTAVQADLDFHDNLENSLESIEDNSCPGPMARQFSRDASTSTVSIQGSGNHYHACAADDDFDTDFDPSILPPPDPWIDSITEDPLEAVQRSVCHRDGHWFLKLLQAERDRMEGWCQQMEREERENNLPEDILGKIRTAVGSAQLLMAQKFYQFRELCEENLNPNAHPRPTSQDLAGFWDMLQLSIENISMKFDELHQLKANNWKQMDPLDKKERRAPPPVPKKPAKGPAPLIRERSLESSQRQEARKRLMAAKRAASVRQNSATESAESIEIYIPEAQTRL

SEQ ID NO: 22966 - protein, 620 aa, Artificial Sequence
  Synthetic polypeptide
NYFGLLASTTVPQDEWTGYTPRGKDDEIPCRRMRSGSYIKAMGDEDSGDSDTSPKPSPKVAARRESYLKATQPSLTELTTLKISNEHSPKLQIRSHSYLRAVSEVSINRSLDSLDPAGLLTSPKFRSRNESYMRAMSTISQVSEMEVNGQFESVCESVFSELESQAVEALDLPMPGCFRMRSHSYVRAIEKGCSQDDECVSLRSSSPPRTTTTVRTIQSSTVSSCITTYKKTPPPVPPRTTTKPFISITAQSSTESAQDAYMDGQGQRGDIISQSGLSNSTESLDSMKALTAAIEAANAQIHGPASQHMGNNTATVTTTTTIATVTTEDRKKDHFKKNRCLSIGIQVDDAEEPDKTGENKAPSKFQSVGVQVEEEKCFRRFTRSNSVTTAVQADLDFHDNLENSLESIEDNSCPGPMARQFSRDASTSTVSIQGSGNHYHACAADDDFDTDFDPSILPPPDPWIDSITEDPLEAVQRSVCHRDGHWFLKLLQAERDRMEGWCQQMEREERENNLPEDILGKIRTAVGSAQLLMAQKFYQFRELCEENLNPNAHPRPTSQDLAGFWDMLQLSIENISMKFDELHQLKANNWKQMDPLDKKVEQCRFCMVHLKTCTNTGQSK

SEQ ID NO: 22967 - protein, 46 aa, Artificial Sequence
  Synthetic polypeptide
KTTWRGSSTENTWGKRGPTTLVSRLSPPFITKVLEISPKLIDKDTW

SEQ ID NO: 22968 - protein, 18 aa, Artificial Sequence
  Synthetic polypeptide
KSHQSSSTRTHGESRLAG

SEQ ID NO: 22969 - protein, 736 aa, Artificial Sequence
  Synthetic polypeptide
EYVGKERPYHPGIPAKPTLYHQGVRNLTKAHRQGHMVKVDWLDRLTFREIEMINESEKRSSNFMYLMVEFRCVKCDDKEYGIVYYEKDGDESSPILTSFELVKVPDPQMSMENLVESKHHKLARSLRSGPSDHDLKPNAATRDQLNIIVSYPPTKQLTYEEQDLVWKFRYYLTNQEKALTKFLKCVNWDLPQEAKQALELLGKWKPMDVEDSLELLSSHYTNPTVRRYAVARLRQADDEDLLMYLLQLVQALKYENFDDIKNGLEPTKKDSQSSVSENVSNSGINSAEIDSSQIITSPLPSVSSPPPASKTKEVPDGENLEQDLCTFLISRACKNSTLANYLYWYVIVECEDQDTQQRDPKTHEMYLNVMRRFSQALLKGDKSVRVMRSLLAAQQTFVDRLVHLMKAVQRESGNRKKKNERLQALLGDNEKMNLSDVELIPLPLEPQVKIRGIIPETATLFKSALMPAQLFFKTEDGGKYPVIFKHGDDLRQDQLILQIISLMDKLLRKENLDLKLTPYKVLATSTKHGFMQFIQSVPVAEVLDTEGSIQNFFRKYAPSENGPNGISAEVMDTYVKSCAGYCVITYILGVGDRHLDNLLLTKTGKLFHIDFGYILGRDPKPLPPPMKLNKEMVEGMGGTQSEQYQEFRKQCYTAFLHLRRYSNLILNLFSLMVDANIPDIALEPDKTVKKVQDKFRLDLSDEEAVHYMQSLIDESVHALFAAVVEQIHKFAQYWRK

SEQ ID NO: 22970 - protein, 16 aa, Artificial Sequence
  Synthetic polypeptide
RMVIYLTGIIKQLDIA

SEQ ID NO: 22971 - protein, 23 aa, Artificial Sequence
  Synthetic polypeptide
LASLNSWILRDHLYTWSWRQAPG

SEQ ID NO: 22972 - protein, 159 aa, Artificial Sequence
  Synthetic polypeptide
TAGYCVITYILGVGDRHLDNLLLTKTGKLFHIDFGYILGRDPKPLPPPMKLNKEMVEGMGGTQSEQYQEFRKQCYTAFLHLRRYSNLILNLFSLMVDANIPDIALEPDKTVKKVQDKFRLDLSDEEAVHYMQSLIDESVHALFAAVVEQIHKFAQYWRK

SEQ ID NO: 22973 - protein, 29 aa, Artificial Sequence
  Synthetic polypeptide
TAGYCVITYILGVGDRHLDNLLLTKTGNN

SEQ ID NO: 22974 - protein, 28 aa, Artificial Sequence
  Synthetic polypeptide
TAGYCVITYILGVGDRHLDNLLLTKTGG

SEQ ID NO: 22975 - protein, 581 aa, Artificial Sequence
  Synthetic polypeptide
DMPFIFHHDCEASPATWNYKLLPGDAGALWLHLMHYCEACTAPKMPEFILYAFHSTYRKLPWKDLHPDQMLMEAFFKVERGSPKSCFLFLGSVLCEVNWVSVLSDAWNSSPHPETRSMIVCLLFMMILLAKEVQLVDQTDSPLLSLLGQTSSLSWHLVDIVSYQSVLSYFSSHYPPSIILAKESYAELIMKLLKVSAGLSIPTDSQKHLDAVPKCQAFTHQMVQFLSTLEQNGKITLAVLEQEMSKLLDDIIVFNPPDMDSQTRHMALSSLFMEVLMMMNNATIPTAEFLRGSIRTWIGQKMHGLVVLPLLTAACQSLASVRHMAETTEACITAYFKESPLNQNSGWGPILVSLQVPELTMEEFLQECLTLGSYLTLYVYLLQCLNSEQTLRNEMKVLLILSKWLEQVYPSSVEEEAKLFLWWHQVLQLSLIQTEQNDSVLTESVIRILLLVQSRQNLVAEERLSSGILGAIGFGRKSPLSNRFRVVARSMAAFLSVQVPMEDQIRLRPGSELHLTPKAQQALNALESMASSKQYVEYQDQILQATQFIRHPGHCLQDGKSFLALLVNCLYPEVHYLDHIR

SEQ ID NO: 22976 - protein, 76 aa, Artificial Sequence
  Synthetic polypeptide
LNHGGGFPHTVLLVVNESHEIWWFDKGFPVLLGSHSLSCLLPCKTCLSSSTMIVRPPQPHGTISCCQVMQEPFGCT

SEQ ID NO: 22977 - protein, 8 aa, Artificial Sequence
  Synthetic polypeptide
GLPSHMEL

SEQ ID NO: 22978 - protein, 19 aa, Artificial Sequence
  Synthetic polypeptide
DMPFIFHHDCEASPATWNY

SEQ ID NO: 22979 - protein, 63 aa, Artificial Sequence
  Synthetic polypeptide
LNHGGGFPHTVLLVVNESHEIWWFDKGFPVLLGSHSLSCLLPCKTCLSSSTMIVRPPQPHGTI

SEQ ID NO: 22980 - protein, 57 aa, Artificial Sequence
  Synthetic polypeptide
ASGISPAWTHSILPPLKKVPASSLPSAMIVSFLRPPQQCGTVFRKEHNVPNVKITGH

SEQ ID NO: 22981 - protein, 18 aa, Artificial Sequence
  Synthetic polypeptide
GLPSNVELYSGRNTMYQM

SEQ ID NO: 22982 - protein, 774 aa, Artificial Sequence
  Synthetic polypeptide
VHLTRSGGFISIWHFPCLDSLHPATFEEGACLFFAFCHDCKFPEASPAMWNCIQEGTQCTKCKNNWALKFSIILLYILCALLTITVAILGYKVVEKMDNVTGGMETSRQTYDDKLTAVESDLKKLGDQTGKKAISTNSELSTFRSDILDLRQQLREITEKTSKNKDTLEKLQASGDALVDRQSQLKETLENNSFLITTVNKTLQAYNGYVTNLQQDTSVLQGNLQNQMYSHNVVIMNLNNLNLTQVQQRNLITNLQRSVDDTSQAIQRIKNDFQNLQQVFLQAKKDTDWLKEKVQSLQTLAANNSALAKANNDTLEDMNSQLNSFTGQMENITTISQANEQNLKDLQDLHKDAENRTAIKFNQLEERFQLFETDIVNIISNISYTAHHLRTLTSNLNEVRTTCTDTLTKHTDDLTSLNNTLANIRLDSVSLRMQQDLMRSRLDTEVANLSVIMEEMKLVDSKHGQLIKNFTILQGPPGPRGPRGDRGSQGPPGPTGNKGQKGEKGEPGPPGPAGERGPIGPAGPPGERGGKGSKGSQGPKGSRGSPGKPGPQGSSGDPGPPGPPGKEGLPGPQGPPGFQGLQGTVGEPGVPGPRGLPGLPGVPGMPGPKGPPGPPGPSGAVVPLALQNEPTPAPEDNGCPPHWKNFTDKCYYFSVEKEIFEDAKLFCEDKSSHLVFINTREEQQWIKKQMVGRESHWIGLTDSERENEWKWLDGTSPDYKNWKAGQPDNWGHGHGPGEDCAGLIYAGQWNDFQCEDVNNFICEKDRETVLSSAL

SEQ ID NO: 22983 - protein, 29 aa, Artificial Sequence
  Synthetic polypeptide
CSKHRIQLNHIQTGNPQNCEIINHPEAGP

SEQ ID NO: 22984 - protein, 5 aa, Artificial Sequence
  Synthetic polypeptide
DNKSP

SEQ ID NO: 22985 - protein, 20 aa, Artificial Sequence
  Synthetic polypeptide
CSKHRIQLNHIQTGNPQNSP

SEQ ID NO: 22986 - protein, 16 aa, Artificial Sequence
  Synthetic polypeptide
TIFRLAIHRTHPEAGP

SEQ ID NO: 22987 - protein, 264 aa, Artificial Sequence
  Synthetic polypeptide
LQPVMLQAQDPAKPYSDWQSTELTLKRALEVFKQQVDNVAQCHIQLAQSLREEARKMEEFREKQKLQRKKTELIMDAIHKQKSLQFKKTMDAKKNYEQKCRDKDEAEQAVSRSANLVNPKQQEKLFVKLATSKTAVEDSDKAYMLHIGTLDKVREEWQSEHIKACEAFEAQECERINFFRNALWLHVNQLSQQCVTSDEHPSCMRISTPPRRMQSQQERLQGLTWQGEDPSQFLKAHQMIPITLWLMTTVCSISKINETRAFSG

SEQ ID NO: 22988 - protein, 286 aa, Artificial Sequence
  Synthetic polypeptide
LQPVMLQAQDPAKPYSDWQSTELTLKRALEVFKQQVDNVAQCHIQLAQSLREEARKMEEFREKQKLQRKKTELIMDAIHKQKSLQFKKTMDAKKNYEQKCRDKDEAEQAVSRSANLVNPKQQEKLFVKLATSKTAVEDSDKAYMLHIGTLDKVREEWQSEHIKACEAFEAQECERINFFRNALWLHVNQLSQQCVTSDEMYEQVRKSLEMCSIQRDIEYFVNQRKTGQIPPAPIMYENFYSSQKNAVPAGKATGPNLARRGPLPIPKSSPDDPNYSLVDDYSLLYQ

SEQ ID NO: 22989 - protein, 12 aa, Artificial Sequence
  Synthetic polypeptide
ATKFVGYFLAGI

SEQ ID NO: 22990 - protein, 53 aa, Artificial Sequence
  Synthetic polypeptide
PSDTLTADFWAPELQKNKFLLFEPPSLWDISWLASELCRCEGQLPRRDLPLPV

SEQ ID NO: 22991 - protein, 288 aa, Artificial Sequence
  Synthetic polypeptide
LQTSGLQNSKRINFCYLSHQVCGIFPGWHLSYVDVKDNSRDETFHFQCDCWLSKSEGDGQTVRDFACANNKICDELEETTYEIVIETGNGGETRENVWLILEGRKNRSKEFLMENSSRQRAFRKGTTDTFEFDSIYLGDIASLCVGHLAREDRFIPKRELAWHVKTITITEMEYGNVYFFNCDCLIPLKRKRKYFKVFEVTKTTESFASKVQSLVPVKYEVIVTTGYEPGAGTDANVFVTIFGANGDTGKRELKQKMRNLFERGSTDRFFLETLELVVTRLGLAAECG

SEQ ID NO: 22992 - protein, 281 aa, Artificial Sequence
  Synthetic polypeptide
LQTSGLQNSKRINFCYLSHQVCGIFPGWHLSYVDVKDNSRDETFHFQCDCWLSKSEGDGQTVRDFACANNKICDELEETTYEIVIETGNGGETRENVWLILEGRKNRSKEFLMENSSRQRAFRKGTTDTFEFDSIYLGDIASLCVGHLAREDRFIPKRELAWHVKTITITEMEYGNVYFFNCDCLIPLKRKRKYFKVFEVTKTTESFASKVQSLVPVKYEVIVTTGYEPGAGTDANVFVTIFGANGDTGKRELKQKMRNLFERGSTDRFFLETLELGELRK

SEQ ID NO: 22993 - protein, 336 aa, Artificial Sequence
  Synthetic polypeptide
LQTSGLQNSKRINFCYLSHQVCGIFPGWHLSYVDVKDNSRDETFHFQCDCWLSKSEGDGQTVRDFACANNKICDELEETTYEIVIETGNGGETRENVWLILEGRKNRSKEFLMENSSRQRAFRKGTTDTFEFDSIYLGDIASLCVGHLAREDRFIPKRELAWHVKTITITEMEYGNVYFFNCDCLIPLKRKRKYFKVFEVTKTTESFASKVQSLVPVKYEVIVTTGYEPGAGTDANVFVTIFGANGDTGKRELKQKMRNLFERGSTDRFFLETLELGELRKVRLEHDSSGYCSGWLVEKVEVTNTSTGVATIFNCGRWLDKKRGDGLTWRDLFPSV

SEQ ID NO: 22994 - protein, 11 aa, Artificial Sequence
  Synthetic polypeptide
KSLEGKRFSMK

SEQ ID NO: 22995 - protein, 12 aa, Artificial Sequence
  Synthetic polypeptide
LTEKAWRARGSL

SEQ ID NO: 22996 - protein, 476 aa, Artificial Sequence
  Synthetic polypeptide
LKKPGGQEVLYEMTVWTGDVVGGGTDSNIFMTLYGINGSTEEMQLDKKKARFEREQNDTFIMEILDIAPFTKMRIRIDGLGSRPEWFLERILLKNMNTGDLTMFYYGDWLSQRKGKKTLVCEMCAVIDEEEMMEWTSYTVAVKTSDILGAGTDANVFIIIFGENGDSGTLALKQSANWNKFERNNTDTFNFPDMLSLGHLCKLRVWHDNKGIFPGWHLSYVDVKDNSRDETFHFQCDCWLSKSEGDGQTVRDFACANNKICDELEETTYEIVIETGNGGETRENVWLILEGRKNRSKEFLMENSSRQRAFRKGTTDTFEFDSIYLGDIASLCVGHLAREDRFIPKRELAWHVKTITITEMEYGNVYFFNCDCLIPLKRKRKYFKVFEVTKTTESFASKVQSLVPVKYEVIVTTGYEPGAGTDANVFVTIFGANGDTGKRELKQKMRNLFERGSTDRFFLETLELVVTRLGLAAECG

SEQ ID NO: 22997 - protein, 469 aa, Artificial Sequence
  Synthetic polypeptide
LKKPGGQEVLYEMTVWTGDVVGGGTDSNIFMTLYGINGSTEEMQLDKKKARFEREQNDTFIMEILDIAPFTKMRIRIDGLGSRPEWFLERILLKNMNTGDLTMFYYGDWLSQRKGKKTLVCEMCAVIDEEEMMEWTSYTVAVKTSDILGAGTDANVFIIIFGENGDSGTLALKQSANWNKFERNNTDTFNFPDMLSLGHLCKLRVWHDNKGIFPGWHLSYVDVKDNSRDETFHFQCDCWLSKSEGDGQTVRDFACANNKICDELEETTYEIVIETGNGGETRENVWLILEGRKNRSKEFLMENSSRQRAFRKGTTDTFEFDSIYLGDIASLCVGHLAREDRFIPKRELAWHVKTITITEMEYGNVYFFNCDCLIPLKRKRKYFKVFEVTKTTESFASKVQSLVPVKYEVIVTTGYEPGAGTDANVFVTIFGANGDTGKRELKQKMRNLFERGSTDRFFLETLELGELRK

SEQ ID NO: 22998 - protein, 524 aa, Artificial Sequence
  Synthetic polypeptide
LKKPGGQEVLYEMTVWTGDVVGGGTDSNIFMTLYGINGSTEEMQLDKKKARFEREQNDTFIMEILDIAPFTKMRIRIDGLGSRPEWFLERILLKNMNTGDLTMFYYGDWLSQRKGKKTLVCEMCAVIDEEEMMEWTSYTVAVKTSDILGAGTDANVFIIIFGENGDSGTLALKQSANWNKFERNNTDTFNFPDMLSLGHLCKLRVWHDNKGIFPGWHLSYVDVKDNSRDETFHFQCDCWLSKSEGDGQTVRDFACANNKICDELEETTYEIVIETGNGGETRENVWLILEGRKNRSKEFLMENSSRQRAFRKGTTDTFEFDSIYLGDIASLCVGHLAREDRFIPKRELAWHVKTITITEMEYGNVYFFNCDCLIPLKRKRKYFKVFEVTKTTESFASKVQSLVPVKYEVIVTTGYEPGAGTDANVFVTIFGANGDTGKRELKQKMRNLFERGSTDRFFLETLELGELRKVRLEHDSSGYCSGWLVEKVEVTNTSTGVATIFNCGRWLDKKRGDGLTWRDLFPSV

SEQ ID NO: 22999 - protein, 52 aa, Artificial Sequence
  Synthetic polypeptide
LKKPGGQEVLYEMTVWTGDVVGGGTDSNIFMTLYGINGSTEEMQLDKKKARF

SEQ ID NO: 23000 - protein, 20 aa, Artificial Sequence
  Synthetic polypeptide
LPDYSLLCVSHHWEAQGRGH

SEQ ID NO: 23001 - protein, 602 aa, Artificial Sequence
  Synthetic polypeptide
YLIIPYYVSVTTGKHKDAATDSRAFIFLIGEDDERSKRIWLDYPRGKRGFSRGSVEEFYVAGLDVGIIKKIELGHDGASPESCWLVEELCLAVPTQGTKYMLNCNCWLAKDRGDGITSRVFDLLDAMVVNIGVKVLYEMTVWTGDVVGGGTDSNIFMTLYGINGSTEEMQLDKKKARFEREQNDTFIMEILDIAPFTKMRIRIDGLGSRPEWFLERILLKNMNTGDLTMFYYGDWLSQRKGKKTLVCEMCAVIDEEEMMEWTSYTVAVKTSDILGAGTDANVFIIIFGENGDSGTLALKQSANWNKFERNNTDTFNFPDMLSLGHLCKLRVWHDNKGIFPGWHLSYVDVKDNSRDETFHFQCDCWLSKSEGDGQTVRDFACANNKICDELEETTYEIVIETGNGGETRENVWLILEGRKNRSKEFLMENSSRQRAFRKGTTDTFEFDSIYLGDIASLCVGHLAREDRFIPKRELAWHVKTITITEMEYGNVYFFNCDCLIPLKRKRKYFKVFEVTKTTESFASKVQSLVPVKYEVIVTTGYEPGAGTDANVFVTIFGANGDTGKRELKQKMRNLFERGSTDRFFLETLELVVTRLGLAAECG

SEQ ID NO: 23002 - protein, 595 aa, Artificial Sequence
  Synthetic polypeptide
YLIIPYYVSVTTGKHKDAATDSRAFIFLIGEDDERSKRIWLDYPRGKRGFSRGSVEEFYVAGLDVGIIKKIELGHDGASPESCWLVEELCLAVPTQGTKYMLNCNCWLAKDRGDGITSRVFDLLDAMVVNIGVKVLYEMTVWTGDVVGGGTDSNIFMTLYGINGSTEEMQLDKKKARFEREQNDTFIMEILDIAPFTKMRIRIDGLGSRPEWFLERILLKNMNTGDLTMFYYGDWLSQRKGKKTLVCEMCAVIDEEEMMEWTSYTVAVKTSDILGAGTDANVFIIIFGENGDSGTLALKQSANWNKFERNNTDTFNFPDMLSLGHLCKLRVWHDNKGIFPGWHLSYVDVKDNSRDETFHFQCDCWLSKSEGDGQTVRDFACANNKICDELEETTYEIVIETGNGGETRENVWLILEGRKNRSKEFLMENSSRQRAFRKGTTDTFEFDSIYLGDIASLCVGHLAREDRFIPKRELAWHVKTITITEMEYGNVYFFNCDCLIPLKRKRKYFKVFEVTKTTESFASKVQSLVPVKYEVIVTTGYEPGAGTDANVFVTIFGANGDTGKRELKQKMRNLFERGSTDRFFLETLELGELRK

SEQ ID NO: 23003 - protein, 588 aa, Artificial Sequence
  Synthetic polypeptide
YLIIPYYVSVTTGKHKDAATDSRAFIFLIGEDDERSKRIWLDYPRGKRGFSRGSVEEFYVAGLDVGIIKKIEVLYEMTVWTGDVVGGGTDSNIFMTLYGINGSTEEMQLDKKKARFEREQNDTFIMEILDIAPFTKMRIRIDGLGSRPEWFLERILLKNMNTGDLTMFYYGDWLSQRKGKKTLVCEMCAVIDEEEMMEWTSYTVAVKTSDILGAGTDANVFIIIFGENGDSGTLALKQSANWNKFERNNTDTFNFPDMLSLGHLCKLRVWHDNKGIFPGWHLSYVDVKDNSRDETFHFQCDCWLSKSEGDGQTVRDFACANNKICDELEETTYEIVIETGNGGETRENVWLILEGRKNRSKEFLMENSSRQRAFRKGTTDTFEFDSIYLGDIASLCVGHLAREDRFIPKRELAWHVKTITITEMEYGNVYFFNCDCLIPLKRKRKYFKVFEVTKTTESFASKVQSLVPVKYEVIVTTGYEPGAGTDANVFVTIFGANGDTGKRELKQKMRNLFERGSTDRFFLETLELGELRKVRLEHDSSGYCSGWLVEKVEVTNTSTGVATIFNCGRWLDKKRGDGLTWRDLFPSV

SEQ ID NO: 23004 - protein, 650 aa, Artificial Sequence
  Synthetic polypeptide
YLIIPYYVSVTTGKHKDAATDSRAFIFLIGEDDERSKRIWLDYPRGKRGFSRGSVEEFYVAGLDVGIIKKIELGHDGASPESCWLVEELCLAVPTQGTKYMLNCNCWLAKDRGDGITSRVFDLLDAMVVNIGVKVLYEMTVWTGDVVGGGTDSNIFMTLYGINGSTEEMQLDKKKARFEREQNDTFIMEILDIAPFTKMRIRIDGLGSRPEWFLERILLKNMNTGDLTMFYYGDWLSQRKGKKTLVCEMCAVIDEEEMMEWTSYTVAVKTSDILGAGTDANVFIIIFGENGDSGTLALKQSANWNKFERNNTDTFNFPDMLSLGHLCKLRVWHDNKGIFPGWHLSYVDVKDNSRDETFHFQCDCWLSKSEGDGQTVRDFACANNKICDELEETTYEIVIETGNGGETRENVWLILEGRKNRSKEFLMENSSRQRAFRKGTTDTFEFDSIYLGDIASLCVGHLAREDRFIPKRELAWHVKTITITEMEYGNVYFFNCDCLIPLKRKRKYFKVFEVTKTTESFASKVQSLVPVKYEVIVTTGYEPGAGTDANVFVTIFGANGDTGKRELKQKMRNLFERGSTDRFFLETLELGELRKVRLEHDSSGYCSGWLVEKVEVTNTSTGVATIFNCGRWLDKKRGDGLTWRDLFPSV

SEQ ID NO: 23005 - protein, 15 aa, Artificial Sequence
  Synthetic polypeptide
LTSVIPAFWEAEHLL

SEQ ID NO: 23006 - protein, 396 aa, Artificial Sequence
  Synthetic polypeptide
SQHFGRLSTCSEIWGLSTPNTIDQWDTTGLYSFSEQTRSLDGRLQVSHRKGLPHVIYCRLWRWPDLHSHHELKAIENCEYAFNLKKDEVCVNPYHYQRVETPVLPPVLVPRHTEILTELPPLDDYTHSIPENTNFPAGIEPQSNYIPETPPPGYISEDGETSDQQLNQSMDTGSPAELSPTTLSPVNHSLDLQPVTYSEPAFWCSIAYYELNQRVGETFHASQPSLTVDGFTDPSNSERFCLGLLSNVNRNATVEMTRRHIGRGVRLYYIGGEVFAECLSDSAIFVQSPNCNQRYGWHPATVCKIPPGCNLKIFNNQEFAALLAQSVNQGFEAVYQLTRMCTIRMSFVKGWGAEYRRQTVTSTPCWIELHLNGPLQWLDKVLTQMGSPSVRCSSMS

SEQ ID NO: 23007 - protein, 146 aa, Artificial Sequence
  Synthetic polypeptide
SQHFGRLSTCSEIWGLSTPNTIDQWDTTGLYSFSEQTRSLDGRLQVSHRKGLPHVIYCRLWRWPDLHSHHELKAIENCEYAFNLKKDEVCVNPYHYQRVETPVLPPVLVPRHTEILTELPPLDDYTHSIPENTNFPAGIEPQSNYI

SEQ ID NO: 23008 - protein, 66 aa, Artificial Sequence
  Synthetic polypeptide
SQHFGRLSTCSEIWGLSTPNTIDQWDTTGLYSFSEQTRSLDGRLQVSHRKGLPHVIYCRLWRWPDL

SEQ ID NO: 23009 - protein, 38 aa, Artificial Sequence
  Synthetic polypeptide
SQHFGRLSTCSEIWGLSTPNTIDQWDTTGLYSFSEQTR

SEQ ID NO: 23010 - protein, 37 aa, Artificial Sequence
  Synthetic polypeptide
SQHFGRLSTCSEIWGLSTPNTIDQWDTTGLYSFSEQT

SEQ ID NO: 23011 - protein, 41 aa, Artificial Sequence
  Synthetic polypeptide
TVLAWRRRSAALAISGCEGRCCPLLLYGAAEYRPAAGGTAA

SEQ ID NO: 23012 - protein, 142 aa, Artificial Sequence
  Synthetic polypeptide
MHHSAYRHLIEMFIGLFSAFPPPRSCISTALEQGLVCLVLCSELCWPGAGARQLLQSQDVKEDAVLCCSMELQSTGRLLEEQLPEMMTELLASARDKMLCPSESMLTRSLLLEVIELHANSWNPLTPPITQYYNRTIQKLTA

SEQ ID NO: 23013 - protein, 49 aa, Artificial Sequence
  Synthetic polypeptide
RCLLVCFLHFHRPGAAFPPPWSRAWSVLFSAVNCAGLAQALGSSCNLRM

SEQ ID NO: 23014 - protein, 17 aa, Artificial Sequence
  Synthetic polypeptide
NPVSTKTTKISQQSQRW

SEQ ID NO: 23015 - protein, 45 aa, Artificial Sequence
  Synthetic polypeptide
SQHFRRRRWEDCLNPGVQDQPGQCGETLYLQKLQKLASNHRGGKM

SEQ ID NO: 23016 - protein, 91 aa, Artificial Sequence
  Synthetic polypeptide
PAITEVVKCEHERAVHLFVDSLVNQDKPSFAFQCTDSNRFKKGICLSCRKNRCNSIGYNAKKMRNKRNSKMYLKTRAGMPFRGNLQSLECP

SEQ ID NO: 23017 - protein, 237 aa, Artificial Sequence
  Synthetic polypeptide
PAITEVVKCEHERAVHLFVDSLVNQDKPSFAFQCTDSNRFKKGICLSCRKNRCNSIGYNAKKMRNKRNSKMYLKTRAGMPFRVYHYQMKIHVFSYKNMGEIEPTFYVTLYGTNADSQTLPLEIVERIEQNATNTFLVYTEEDLGDLLKIQLTWEGASQSWYNLWKEFRSYLSQPRNPGRELNIRRIRVKSGETQRKLTFCTEDPENTSISPGRELWFRKCRDGWRMKNETSPTVELP

SEQ ID NO: 23018 - protein, 58 aa, Artificial Sequence
  Synthetic polypeptide
SQHFRRRRWEDCLNPGVQDQPGQCGETLYLQKLQKLARCGGHVPVVPDTGEAEQSQRW

SEQ ID NO: 23019 - protein, 24 aa, Artificial Sequence
  Synthetic polypeptide
PGVVVMCLSSQILGRLSNHRGGKM

SEQ ID NO: 23020 - protein, 26 aa, Artificial Sequence
  Synthetic polypeptide
LQENKLRAPTDSTLCELQTWSKKMLS

SEQ ID NO: 23021 - protein, 42 aa, Artificial Sequence
  Synthetic polypeptide
SVTVSHHPQIGPSSCRKTSSGLPLILHYASCRPGARKCSLER

SEQ ID NO: 23022 - protein, 837 aa, Artificial Sequence
  Synthetic polypeptide
FYIMRVADLEQENALLKDEKEQLNNQILCQSKDEFAQNSVKENLMKKELEEERSRYQNLVKEYSQLEQRYDNLRDEMTIIKQTPGHRRNPSNQSSLESDSNYPSISTSEIGDTEDALQQVEEIGLEKAAMDMTVFLKLQKRVRELEQERKKLQVQLEKREQQDSKKVQAEPPQTDIDLDPNADLAYNSLKRQELESENKKLKNDLNELRKAVADQATQNNSSHGSPDSYSLLLNQLKLAHEELEVRKEEVLILRTQIVSADQRRLAGRNAEPNINARSSWPNSEKHVDQEDAIEAYHGVCQTNSKTEDWGYLNEDGELGLAYQGLKQVARLLEAQLQAQSLEHEEEVEHLKAQLEALKEEMDKQQQTFCQTLLLSPEAQVEFGVQQEISRLTNENLDLKELVEKLEKNERKLKKQLKIYMKKAQDLEAAQALAQSERKRHELNRQVTVQRKEKDFQGMLEYHKEDEALLIRNLVTDLKPQMLSGTVPCLPAYILYMCIRHADYTNDDLKVHSLLTSTINGIKKVLKKHNDDFEMTSFWLSNTCRLLHCLKQYSGDEGFMTQNTAKQNEHCLKNFDLTEYRQVLSDLSIQIYQQLIKIAEGVLQPMIVSAMLENESIQGLSGVKPTGYRKRSSSMADGDNSYCLEAIIRQMNAFHTVMCDQGLDPEIILQVFKQLFYMINAVTLNNLLLRKDVCSWSTGMQLRYNISQLEEWLRGRNLHQSGAVQTMEPLIQAAQLLQLKKKTQEDAEAICSLCTSLSTQQIVKILNLYTPLNEFEERVTVAFIRTIQAQLQERNDPQQLLLDAKHMFPVLFPFNPSSLTMDSIHIPACLNLEFLNEV

SEQ ID NO: 23023 - protein, 811 aa, Artificial Sequence
  Synthetic polypeptide
FYIMRVADLEQENALLKDEKEQLNNQILCQSKDEFAQNSVKENLMKKELEEERSRYQNLVKEYSQLEQRYDNLRDEMTIIKQTPGHRRNPSNQSSLESDSNYPSISTSEIGDTEDALQQVEEIGLEKAAMDMTVFLKLQKRVRELEQERKKLQVQLEKREQQDSKKVQAEPPQTDIDLDPNADLAYNSLKRQELESENKKLKNDLNELRKAVADQATQNNSSHGSPDSYSLLLNQLKLAHEELEVRKEEVLILRTQIVSADQRRLAGRNAEPNINARSSWPNSEKHVDQEDAIEAYHGVCQTNRLLEAQLQAQSLEHEEEVEHLKAQLEALKEEMDKQQQTFCQTLLLSPEAQVEFGVQQEISRLTNENLDLKELVEKLEKNERKLKKQLKIYMKKAQDLEAAQALAQSERKRHELNRQVTVQRKEKDFQGMLEYHKEDEALLIRNLVTDLKPQMLSGTVPCLPAYILYMCIRHADYTNDDLKVHSLLTSTINGIKKVLKKHNDDFEMTSFWLSNTCRLLHCLKQYSGDEGFMTQNTAKQNEHCLKNFDLTEYRQVLSDLSIQIYQQLIKIAEGVLQPMIVSAMLENESIQGLSGVKPTGYRKRSSSMADGDNSYCLEAIIRQMNAFHTVMCDQGLDPEIILQVFKQLFYMINAVTLNNLLLRKDVCSWSTGMQLRYNISQLEEWLRGRNLHQSGAVQTMEPLIQAAQLLQLKKKTQEDAEAICSLCTSLSTQQIVKILNLYTPLNEFEERVTVAFIRTIQAQLQERNDPQQLLLDAKHMFPVLFPFNPSSLTMDSIHIPACLNLEFLNEV

SEQ ID NO: 23024 - protein, 26 aa, Artificial Sequence
  Synthetic polypeptide
RDEISHHPAQSCSRAPQETGSEAKLS

SEQ ID NO: 23025 - protein, 44 aa, Artificial Sequence
  Synthetic polypeptide
MENFRNKQFISFELCAVLSSVMKSHTIPLSPAQEPHRRQDPKQS

SEQ ID NO: 23026 - protein, 542 aa, Artificial Sequence
  Synthetic polypeptide
NLTPSRSVLLKSPTGDRIRSKVELTRYLGPACDLTLFDFKQGILCYPAPKAHPVAVASKKRKKPSRPAKTRKRQVGPQSGEVRKEAPRDETKADTDTAPASFPAPGCCENCGISFSGDGTQRQRLKTLCKDCRAQRIAFNREQRMFKSRGCGVCRGCQTQEDCGHCPICLRPPRPGLRRQWKCVQRRCLRGKHARRKGGCDSKMAARRRPGAQPLPPPPPSQSPEPTEPHPRALAPSPPAEFIYYCVDEDELPYTNRRQNRKCGACAACLRRMDCGRCDFCCDKPKFGGSNQKRQKCRWRQCLQFAMKRLLPSVWSESEDGAGSPPPYRRRKRPSSARRHHLGPTLKPTLATRTAQPDHTQAPTKQEAGGGFVLPPPGTDLVFLREGASSPVQVPGPVAASTEALLQEAQCSGLSWVVALPQVKQEKADTQDEWTPGTAVLTSPVLVPGCPSKAVDPGLPSVKQEPPDPEEDKEENKDDSASKLAPEEEAGGAGTPVITEIFSLGGTRFRDTAVWLPRYYHLALDWKCNCGYHLCCRSVLVP

SEQ ID NO: 23027 - protein, 580 aa, Artificial Sequence
  Synthetic polypeptide
NLTPSRSVLLKSPTGDRIRSKVELTRYLGPACDLTLFDFKQGILCYPAPKAHPVAVASKKRKKPSRPAKTRKRQVGPQSGEVRKEAPRDETKADTDTAPASFPAPGCCENCGISFSGDGTQRQRLKTLCKDCRAQRIAFNREQRMFKRVGCGECAACQVTEDCGACSTCLLQLPHDVASGLFCKCERRRCLRIVERSRGCGVCRGCQTQEDCGHCPICLRPPRPGLRRQWKCVQRRCLRGKHARRKGGCDSKMAARRRPGAQPLPPPPPSQSPEPTEPHPRALAPSPPAEFIYYCVDEDELQPYTNRRQNRKCGACAACLRRMDCGRCDFCCDKPKFGGSNQKRQKCRWRQCLQFAMKRLLPSVWSESEDGAGSPPPYRRRKRPSSARRHHLGPTLKPTLATRTAQPDHTQAPTKQEAGGGFVLPPPGTDLVFLREGASSPVQVPGPVAASTEALLQEAQCSGLSWVVALPQVKQEKADTQDEWTPGTAVLTSPVLVPGCPSKAVDPGLPSVKQEPPDPEEDKEENKDDSASKLAPEEEAGGAGTPVITEIFSLGGTRFRDTAVWLPRSKDLKKPGARKQ

SEQ ID NO: 23028 - protein, 531 aa, Artificial Sequence
  Synthetic polypeptide
NLTPSRSVLLKSPTGDRIRSKVELTRYLGPACDLTLFDFKQGILCYPAPKAHPVAVASKKRKKPSRPAKTRKRQVGPQSGEVRKEAPRDETKADTDTAPASFPAPGCCENCGISFSGDGTQRQRLKTLCKDCRAQRIAFNREQRMFKSRGCGVCRGCQTQEDCGHCPICLRPPRPGLRRQWKCVQRRCLRGKHARRKGGCDSKMAARRRPGAQPLPPPPPSQSPEPTEPHPRALAPSPPAEFIYYCVDEDELQPYTNRRQNRKCGACAACLRRMDCGRCDFCCDKPKFGGSNQKRQKCRWRQCLQFAMKRLLPSVWSESEDGAGSPPPYRRRKRPSSARRHHLGPTLKPTLATRTAQPDHTQAPTKQEAGGGFVLPPPGTDLVFLREGASSPVQVPGPVAASTEALLQEAQCSGLSWVVALPQVKQEKADTQDEWTPGTAVLTSPVLVPGCPSKAVDPGLPSVKQEPPDPEEDKEENKDDSASKLAPEEEAGGAGTPVITEIFSLGGTRFRDTAVWLPRSKDLKKPGARKQ

SEQ ID NO: 23029 - protein, 525 aa, Artificial Sequence
  Synthetic polypeptide
NLTPSRSVLLKSPTGDRIRSKVELTRYLGPACDLTLFDFKQGILCYPAPKAHPVAVASKKRKKPSRPAKTRKRQVGPQSGEVRKEAPRDETKADTDTAPASFPAPGCCENCGISFSGDGTQRQRLKTLCKDCRAQRIAFNREQRMFKRVGCGECAACQVTEDCGACSTCLLQLPHDVASGLFCKCERRRCLRIVERSRGCGVCRGCQTQEDCGHCPICLRPPRPGLRRQWKCVQRRCLRGKHARRKGGCDSKMAARRRPGAQPLPPPPPSQSPEPTEPHPRALAPSPPAEFIYYCVDEDELQPYTNRRQNRKCGACAACLRRMDCGRCDFCCDKPKFGGSNQKRQKCRWRQCLQFAMKRLLPSVWSESEDGAGSPPPYRRRKRPSSARRHHLGPTLKPTLATRTAQPDHTQAPTKQEAGGGFVLPPPGTDLVFLREGASSPVQVPGPVAASTEALLQAVDPGLPSVKQEPPDPEEDKEENKDDSASKLAPEEEAGGAGTPVEPTTQPQYSGNFDNDLYEIYLIDI

SEQ ID NO: 23030 - protein, 561 aa, Artificial Sequence
  Synthetic polypeptide
NLTPSRSVLLKSPTGDRIRSKVELTRYLGPACDLTLFDFKQGILCYPAPKAHPVAVASKKRKKPSRPAKTRKRQVGPQSGEVRKEAPRDETKADTDTAPASFPAPGCCENCGISFSGDGTQRQRLKTLCKDCRAQRIAFNREQRMFKRVGCGECAACQVTEDCGACSTCLLQLPHDVASGLFCKCERRRCLRIVERSRGCGVCRGCQTQEDCGHCPICLRPPRPGLRRQWKCVQRRCLRGKHARRKGGCDSKMAARRRPGAQPLPPPPPSQSPEPTEPQPYTNRRQNRKCGACAACLRRMDCGRCDFCCDKPKFGGSNQKRQKCRWRQCLQFAMKRLLPSVWSESEDGAGSPPPYRRRKRPSSARRHHLGPTLKPTLATRTAQPDHTQAPTKQEAGGGFVLPPPGTDLVFLREGASSPVQVPGPVAASTEALLQAVDPGLPSVKQEPPDPEEDKEENKDDSASKLAPEEEAGGAGTPVITEIFSLGGTRFRDTAVWLPSLQGRHSGREDGCKVWETEDTVEPTSTSWNPRGWPGTHVSLSPPPASMMWVSCRRSWCPSSQS

SEQ ID NO: 23031 - protein, 524 aa, Artificial Sequence
  Synthetic polypeptide
NLTPSRSVLLKSPTGDRIRSKVELTRYLGPACDLTLFDFKQGILCYPAPKAHPVAVASKKRKKPSRPAKTRKRQVGPQSGEVRKEAPRDETKADTDTAPASFPAPGCCENCGISFSGDGTQRQRLKTLCKDCRAQRIAFNREQRMFKRVGCGECAACQVTEDCGACSTCLLQLPHDVASGLFCKCERRRCLRIVERSRGCGVCRGCQTQEDCGHCPICLRPPRPGLRRQWKCVQRRCLRGKHARRKGGCDSKMAARRRPGAQPLPPPPPSQSPEPTEPHPRALAPSPPAEFIYYCVDEDELKRLLPSVWSESEDGAGSPPPYRRRKRPSSARRHHLGPTLKPTLATRTAQPDHTQAPTKQEAGGGFVLPPPGTDLVFLREGASSPVQVPGPVAASTEALLQEAQCSGLSWVVALPQVKQEKADTQDEWTPGTAVLTSPVLVPGCPSKAVDPGLPSVKQEPPDPEEDKEENKDDSASKLAPEEEAGGAGTPVITEIFSLGGTRFRDTAVWLPRSKDLKKPGARKQ

SEQ ID NO: 23032 - protein, 478 aa, Artificial Sequence
  Synthetic polypeptide
NLTPSRSVLLKSPTGDRIRSKVELTRYLGPACDLTLFDFKQGILCYPAPKAHPVAVASKKRKKPSRPAKTRKRQVGPQSGEVRKEAPRDETKADTDTAPASFPAPGCCENCGISFSGDGTQRQRLKTLCKDCRAQRIAFNREQRMFKRVGCGECAACQVTEDCGACSTCLLQLPHDVASGLFCKCERRRCLRIVERSRGCGVCRGCQTQEDCGHCPICLRPPRPGLRRQWKCVQRRCLRGKHARRKGGCDSKMAARRRPGAQPLPPPPPSQSPEPTEPHPRALAPSPPAEFIYYCVDEDELKRLLPSVWSESEDGAGSPPPYRRRKRPSSARRHHLGPTLKPTLATRTAQPDHTQAPTKQEAGGGFVLPPPGTDLVFLREGASSPVQVPGPVAASTEALLQAVDPGLPSVKQEPPDPEEDKEENKDDSASKLAPEEEAGGAGTPVITEIFSLGGTRFRDTAVWLPRSKDLKKPGARKQ

SEQ ID NO: 23033 - protein, 511 aa, Artificial Sequence
  Synthetic polypeptide
NLTPSRSVLLKSPTGDRIRSKVELTRYLGPACDLTLFDFKQGILCYPAPKAHPVAVASKKRKKPSRPAKTRKRQVGPQSGEVRKEAPRDETKADTDTAPASFPAPGCCENCGISFSGDGTQRQRLKTLCKDCRAQRIAFNREQRMFKRVGCGECAACQVTEDCGACSTCLLQLPHDVASGLFCKCERRRCLRIVERSRGCGVCRGCQTQEDCGHCPICLRPPRPGLRRQWKCVQRRCLRGKHARRKGGCDSKMAARRRPGAQPLPPPPPSQSPEPTEPQPYTNRRQNRKCGACAACLRRMDCGRCDFCCDKPKFGGSNQKRQKCRWRQCLQFAMKRLLPSVWSESEDGAGSPPPYRRRKRPSSARRHHLGPTLKPTLATRTAQPDHTQAPTKQEAGGGFVLPPPGTDLVFLREGASSPVQVPGPVAASTEALLQAVDPGLPSVKQEPPDPEEDKEENKDDSASKLAPEEEAGGAGTPVITEIFSLGGTRFRDTAVWLPRSKDLKKPGARKQ

SEQ ID NO: 23034 - protein, 630 aa, Artificial Sequence
  Synthetic polypeptide
NLTPSRSVLLKSPTGDRIRSKVELTRYLGPACDLTLFDFKQGILCYPAPKAHPVAVASKKRKKPSRPAKTRKRQVGPQSGEVRKEAPRDETKADTDTAPASFPAPGCCENCGISFSGDGTQRQRLKTLCKDCRAQRIAFNREQRMFKRVGCGECAACQVTEDCGACSTCLLQLPHDVASGLFCKCERRRCLRIVERSRGCGVCRGCQTQEDCGHCPICLRPPRPGLRRQWKCVQRRCLRGKHARRKGGCDSKMAARRRPGAQPLPPPPPSQSPEPTEPHPRALAPSPPAEFIYYCVDEDELQPYTNRRQNRKCGACAACLRRMDCGRCDFCCDKPKFGGSNQKRQKCRWRQCLQFAMKRLLPSVWSESEDGAGSPPPYRRRKRPSSARRHHLGPTLKPTLATRTAQPDHTQAPTKQEAGGGFVLPPPGTDLVFLREGASSPVQVPGPVAASTEALLQEAQCSGLSWVVALPQVKQEKADTQDEWTPGTAVLTSPVLVPGCPSKAVDPGLPSVKQEPPDPEEDKEENKDDSASKLAPEEEAGGAGTPVITEIFSLGGTRFRDTAVWLPSLQGRHSGREDGCKVWETEDTVEPTSTSWNPRGWPGTHVSLSPPPASMMWVSCRRSWCPSSQS

SEQ ID NO: 23035 - protein, 510 aa, Artificial Sequence
  Synthetic polypeptide
NLTPSRSVLLKSPTGDRIRSKVELTRYLGPACDLTLFDFKQGILCYPAPKAHPVAVASKKRKKPSRPAKTRKRQVGPQSGEVRKEAPRDETKADTDTAPASFPAPGCCENCGISFSGDGTQRQRLKTLCKDCRAQRIAFNREQRMFKRVGCGECAACQVTEDCGACSTCLLQLPHDVASGLFCKCERRRCLRIVERSRGCGVCRGCQTQEDCGHCPICLRPPRPGLRRQWKCVQRRCLRGKHARRKGGCDSKMAARRRPGAQPLPPPPPSQSPEPTEPHPRALAPSPPAEFIYYCVDEDELKRLLPSVWSESEDGAGSPPPYRRRKRPSSARRHHLGPTLKPTLATRTAQPDHTQAPTKQEAGGGFVLPPPGTDLVFLREGASSPVQVPGPVAASTEALLQAVDPGLPSVKQEPPDPEEDKEENKDDSASKLAPEEEAGGAGTPVITEIFSLGGTRFRDTAVWLPRAGTREGKMDVKCGRPRTQWSPRARAGTHEDGLEPMSVSHHLQLR

SEQ ID NO: 23036 - protein, 605 aa, Artificial Sequence
  Synthetic polypeptide
NLTPSRSVLLKSPTGDRIRSKVELTRYLGPACDLTLFDFKQGILCYPAPKAHPVAVASKKRKKPSRPAKTRKRQVGPQSGEVRKEAPRDETKADTDTAPASFPAPGCCENCGISFSGDGTQRQRLKTLCKDCRAQRIAFNREQRMFKRVGCGECAACQVTEDCGACSTCLLQLPHDVASGLFCKCERRRCLRIVERSRGCGVCRGCQTQEDCGHCPICLRPPRPGLRRQWKCVQRRCLRHLAHRLRRRHQRCQRRTPLAVAPPTGKHARRKGGCDSKMAARRRPGAQPLPPPPPSQSPEPTEPHPRALAPSPPAEFIYYCVDEDELQPYTNRRQNRKCGACAACLRRMDCGRCDFCCDKPKFGGSNQKRQKCRWRQCLQFAMKRLLPSVWSESEDGAGSPPPYRRRKRPSSARRHHLGPTLKPTLATRTAQPDHTQAPTKQEAGGGFVLPPPGTDLVFLREGASSPVQVPGPVAASTEALLQEAQCSGLSWVVALPQVKQEKADTQDEWTPGTAVLTSPVLVPGCPSKAVDPGLPSVKQEPPDPEEDKEENKDDSASKLAPEEEAGGAGTPVITEIFSLGGTRFRDTAVWLPRSKDLKKPGARKQ

SEQ ID NO: 23037 - protein, 541 aa, Artificial Sequence
  Synthetic polypeptide
NLTPSRSVLLKSPTGDRIRSKVELTRYLGPACDLTLFDFKQGILCYPAPKAHPVAVASKKRKKPSRPAKTRKRQVGPQSGEVRKEAPRDETKADTDTAPASFPAPGCCENCGISFSGDGTQRQRLKTLCKDCRAQRIAFNREQRMFKRVGCGECAACQVTEDCGACSTCLLQLPHDVASGLFCKCERRRCLRIVERSRGCGVCRGCQTQEDCGHCPICLRPPRPGLRRQWKCVQRRCLRHLAHRLRRRHQRCQRRTPLAVAPPTGKHARRKGGCDSKMAARRRPGAQPLPPPPPSQSPEPTEPHPRALAPSPPAEFIYYCVDEDELKRLLPSVWSESEDGAGSPPPYRRRKRPSSARRHHLGPTLKPTLATRTAQPDHTQAPTKQEAGGGFVLPPPGTDLVFLREGASSPVQVPGPVAASTEALLQEAQCSGLSWVVALPQVKQEKADTQDEWTPGTAVLTSPVLVPGCPSKAVDPGLPSVKQEPPDPEEDKEENKDDSASKLAPEEEITEIFSLGGTRFRDTAVWLPRSKDLKKPGARKQ

SEQ ID NO: 23038 - protein, 44 aa, Artificial Sequence
  Synthetic polypeptide
AMPGILTQRICYPEYMSNNFPCNVSCCFSLFPKDQNCFRNWRHI

SEQ ID NO: 23039 - protein, 38 aa, Artificial Sequence
  Synthetic polypeptide
LRESVILNTCLTIFLATLAVVFHCFQRIKIASEIGDIF

SEQ ID NO: 23040 - protein, 17 aa, Artificial Sequence
  Synthetic polypeptide
RTQLSHAWNPDSENLLS

SEQ ID NO: 23041 - protein, 39 aa, Artificial Sequence
  Synthetic polypeptide
RSQDGRIGTAPVYSSQRERRRRRVISAFPSEGPLFLRPM

SEQ ID NO: 23042 - protein, 11 aa, Artificial Sequence
  Synthetic polypeptide
FLHFHLRAHSS

SEQ ID NO: 23043 - protein, 23 aa, Artificial Sequence
  Synthetic polypeptide
GTGFISLGSARQWAQGPLFLRPM

SEQ ID NO: 23044 - protein, 12 aa, Artificial Sequence
  Synthetic polypeptide
GVPDSGRRAHSS

SEQ ID NO: 23045 - protein, 98 aa, Artificial Sequence
  Synthetic polypeptide
FLHFHLRYRVHLTRECQTVGAGPTLPKTHVKTASLGLAGKARSPLLPVSVPTAPEVSEESHKPTEDSANVYEQDDLSEQMASLEGLMKQLNAITGSAF

SEQ ID NO: 23046 - protein, 94 aa, Artificial Sequence
  Synthetic polypeptide
FLHFHLRYRVHLTRECQTVGAGPTLPKTHVKTASLGLAGKARSPLLPVSVPTAPEVSEESHKPTEDSANVEMEWVKQYAISYYPLLLPASSFSV

SEQ ID NO: 23047 - protein, 28 aa, Artificial Sequence
  Synthetic polypeptide
WPRKFELNYWKNLVQLLRDLDLMKILWI

SEQ ID NO: 23048 - protein, 606 aa, Artificial Sequence
  Synthetic polypeptide
IKLLEEFSPVVERLGFDENFVDLTEMVEKRLQQLQSDELSAVTVSGHVYNNQSINLLDVLHIRLLVGSQIAAEMREAMYNQLGLTGCAGVASNKLLAKLVSGVFKPNQQTVLLPESCQHLIHSLNHIKEIPGIGYKTAKCLEALGINSVRDLQTFSPKILEKELGISVAQRIQKLSFGEDNSPVILSGPPQSFSEEDSFKKCSSEVEAKNKIEELLASLLNRVCQDGRKPHTVRLIIRRYSSEKHYGRESRQCPIPSHVIQKLGTGNYDVMTPMVDILMKLFRNMVNVKMPFHLTLLSVCFCNLKALNTAKKGLIDYYLMPSLSTTSRSGKHSFKMKDTHMEDFPKDKETNRDFLPSGRIESTRTRESPLDTTNFSKEKDINEFPLCSLPEGVDQEVFKQLPVDIQEEILSGKSREKFQGKGSVSCPLHASRGVLSFFSKKQMQDIPINPRDHLSSSKQVSSVSPCEPGTSGFNSSSSSYMSSQKDYSYYLDNRLKDERISQGPKEPQGFHFTNSNPAVSAFHSFPNLQSEQLFSRNHTTDSHKQTVATDSHEGLTENREPDSVDEKITFPSDIDPQVFYELPEAVQKELLAEWKRAGSDFHIGHK

SEQ ID NO: 23049 - protein, 527 aa, Artificial Sequence
  Synthetic polypeptide
IKLLEEFSPVVERLGFDENFVDLTEMVEKRLQQLQSDELSAVTVSGHVYNNQCIGYKTAKCLEALGINSVRDLQTFSPKILEKELGISVAQRIQKLSFGEDNSPVILSGPPQSFSEEDSFKKCSSEVEAKNKIEELLASLLNRVCQDGRKPHTVRLIIRRYSSEKHYGRESRQCPIPSHVIQKLGTGNYDVMTPMVDILMKLFRNMVNVKMPFHLTLLSVCFCNLKALNTAKKGLIDYYLMPSLSTTSRSGKHSFKMKDTHMEDFPKDKETNRDFLPSGRIESTRTRESPLDTTNFSKEKDINEFPLCSLPEGVDQEVFKQLPVDIQEEILSGKSREKFQGKGSVSCPLHASRGVLSFFSKKQMQDIPINPRDHLSSSKQVSSVSPCEPGTSGFNSSSSSYMSSQKDYSYYLDNRLKDERISQGPKEPQGFHFTNSNPAVSAFHSFPNLQSEQLFSRNHTTDSHKQTVATDSHEGLTENREPDSVDEKITFPSDIDPQVFYELPEAVQKELLAEWKRAGSDFHIGHK

SEQ ID NO: 23050 - protein, 104 aa, Artificial Sequence
  Synthetic polypeptide
IKLLEEFSPVVERLGFDENFVDLTEMVEKRLQQLQSDELSAVTVSGHVYNNQSINLLDVLHIRLLVGSQIAAEMREAMYNQLGLTGCAGVASNKLLAKLVSGVF

SEQ ID NO: 23051 - protein, 156 aa, Artificial Sequence
  Synthetic polypeptide
IKLLEEFSPVVERLGFDENFVDLTEMVEKRLQQLQSDELSAVTVSGHVYNNQSINLLDVLHIRLLVGSQIAAEMREAMYNQLGLTGCAGVASNKLLAKLVSGVFKPNQQTVLLPESCQHLIHSLNHIKEIPGIGYKTAKCLEALGINSVRDLQTFS

SEQ ID NO: 23052 - protein, 114 aa, Artificial Sequence
  Synthetic polypeptide
IKLLEEFSPVVERLGFDENFVDLTEMVEKRLQQLQSDELSAVTVSGHVYNNQSINLLDVLHIRLLVGSQIAAEMREAMYNQLGLTGCAGVASNKLLAKLVSGVFKPNQQTVLLP

SEQ ID NO: 23053 - protein, 8 aa, Artificial Sequence
  Synthetic polypeptide
HFPHPVYL

SEQ ID NO: 23054 - protein, 71 aa, Artificial Sequence
  Synthetic polypeptide
TSHILFICEKPGNEPEEVKLQNASKQIVQNAILQAVQQVSQESQRREERISDNRDHIQLGVGELTKKHEKK

SEQ ID NO: 23055 - protein, 17 aa, Artificial Sequence
  Synthetic polypeptide
LPTSCLSVRNLEMSLKR

SEQ ID NO: 23056 - protein, 17 aa, Artificial Sequence
  Synthetic polypeptide
SEVWAMFEDCPSIQFYE

SEQ ID NO: 23057 - protein, 264 aa, Artificial Sequence
  Synthetic polypeptide
HLLHDNLRCGPCLRIAPAFSSMSNKYPQAVFLEVDVHQCQGTAATNNISATPTFLFFRNKVRIDQYQGADAVGLEEKIKQHLENDPGSNEDTDIPKGYMDLMPFINKAGCECLNESDEHGFDNCLRKDTTFLESDCDEQLLITVAFNQPVKLYSMKFQGPDNGQGPKYVKIFINLPRSMDFEEAERSEPTQALELTEDDIKEDGIVPLRYVKFQNVNSVTIFVQSNQGEEETTRISYFTFIGTPVQATNMNDFKRVVGKKGESH

SEQ ID NO: 23058 - protein, 44 aa, Artificial Sequence
  Synthetic polypeptide
HLLHDNLRCGPCLRIAPAFSSMSNKYPQAVFLEVDVHQCQYLFL

SEQ ID NO: 23059 - protein, 260 aa, Artificial Sequence
  Synthetic polypeptide
HLLHDNLRCGPCLRIAPAFSSMSNKYPQAVFLEVDVHQCQGTAATNNISATPTFLFFRNKVRIDQYQGADAVGLEEKIKQHLENDPGSNEDTDIPKGYMDLMPFINKAGCECLNESDEHGFDNCLRKDTTFLESDCDEQLLITVAFNQPVKLYSMKFQGPDNGQGPKYVKIFINLPRSMDFEEAERSEPTQALELTEDDIKEDGIVPLRYVKFQNVNSVTIFVQSNQGEEETTRISYFTFIGTPVQATNMNDFKRVSLLK

SEQ ID NO: 23060 - protein, 126 aa, Artificial Sequence
  Synthetic polypeptide
HLLHDNLRCGPCLRIAPAFSSMSNKYPQAVFLEVDVHQCQGTAATNNISATPTFLFFRNKVRIDQYQGADAVGLEEKIKQHLENDPGSNEDTDIPKGYMDLMPFINKAGCECLNESDEHGFDNCLR

SEQ ID NO: 23061 - protein, 1529 aa, Artificial Sequence
  Synthetic polypeptide
AAQFVVICSPRKQVQVQETVRETISCSQMPAFSEPAGEESPFTGTTTISFSNLGGVHKENASLAQHSEVKPCTCGPQHEEKQDRDGNIPDNFREDLKYEQSISEANDETMSPGVFSRHLPKDARADFREPVAVSVASPEPTDTALTLENVCDEPRDREAVCAMECFEAGDQGTCFDTIDSLVGRPVDKYSPQEICSVDTELAEGQNKVSDLCSSNDKTLEVFFQTQVSETSVSTCKSSKDGNSVMSPLFTSTFTLNISHTASEGATGENLAKVENSTYPLASTVHAGQEQPSPSNSGGLDETQLLSSENNPLVQFKEGGDKSPSPSAADTTATPASYSSIVSFPWEKPTTLTANNECFQATRETEDTSTVTIATEVHPAKYLAVSIPEDKHAGGTEERFPRASHEKVSQFPSQVQLDHILSGATIKSTKELLCRAPSVPGVPHHVLQLPEGEGFCSNSPLQVDNLSGDKSQTVDRADFRSYEENFQERGSETKQGVQQQSLSQQGSLSAPDFQQSLPTTSAAQEERNLVPTAHSPASSREGAGQRSGWGTRVSVVAETAGEEDSQALSNVPSLSDILLEESKEYRPGNWEAGNKLKIITLEASASEIWPPRQLTNSESKASDGGLIIPDKVWAVPDSLKADAVVPELAPSEIAALAHSPEDAESALADSRESHKGEEPTISVHWRSLSSRGFSQPRLLESSVDPVDEKELSVTDSLSAASETGGKENVNNVSQDQEEKQLKMDHTAFFKKFLTCPKILESSVDPIDEISVIEYTRAGKPEPSETTPQGAREGGQSNDGNMGHEAEIQPAILQVPCLQGTILSENRISRSQEGSMKQEAEQIQPEEAKTAIWQVLQPSEGGERIPSGCSIGQIQESSDGSLGEAEQSKKDKAELISPTSPLSSCLPIMTHASLGVDTHNSTGQIHDVPENDIVEPRKRQYVFPVSQKRGTIENERGKPLPSSPDLTRFPCTSSPEGNVTDFLISHKMEEPKIEVLQIGETKPPSSSSSSAKTLAFISGERELEKAPKLLQDPCQKGTLGCAKKSREREKSLEARAGKSPGTLTAVTGSEEVKRKPEAPGSGHLAEGVKKKILSRVAALRLKLEEKENIRKNSAFLKKMPKLETSLSHTEEKQDPKKPSCKREGRAPVLLKKIQAEMFPEHSGNVKLSCQFAEIHEDSTICWTKDSKSIAQVQRSAGDNSTVSFAIVQASPKDQGLYYCCIKNSYGKVTAEFNLTAEVLKQLSSRQDTKGCEEIEFSQLIFKEDFLHDSYFGGRLRGQIATEELHFGEGVHRKAFRSTVMHGLMPVFKPGHACVLKVHNAIAYGTRNNDELIQRNYKLAAQECYVQNTARYYAKIYAAEAQPLEGFGEVPEIIPIFLIHRPENNIPYATVEEELIGEFVKYSIRDGKEINFLRRESEAGQKCCTFQHWVYQKTSGCLLVTDMQGVGMKLTDVGIATLAKGYKGFKGNCSMTFIDQFKALHQCNKYCKMLGLKSLQNNNQKQKQPSIGKSKVQTNSMTIKKAGPETPGEKKT

SEQ ID NO: 23062 - protein, 118 aa, Artificial Sequence
  Synthetic polypeptide
REDGHMKTEGETGVMHLQVREWQGWPGATRSWKRQGRTSRGVQPWRHLECTLLASRTEGVKLWCFKLPSLWSFAALGNRYKFRKQSERQSLAARCQLSQSLLGRSPHSLGPQQFPSQT

SEQ ID NO: 23063 - protein, 67 aa, Artificial Sequence
  Synthetic polypeptide
ETGTSSGNSQRDNLLQPDASFLRACWGGVPIHWDHNNFLLKLRRGPQGKCIISSTLGGQTLYLWSTA

SEQ ID NO: 23064 - protein, 5 aa, Artificial Sequence
  Synthetic polypeptide
PRRTE

SEQ ID NO: 23065 - protein, 46 aa, Artificial Sequence
  Synthetic polypeptide
VLPSHVELNKDYCKPRVKGSLGWTVCETVLPGNWTSFCSISVVQNE

SEQ ID NO: 23066 - protein, 28 aa, Artificial Sequence
  Synthetic polypeptide
LRPADHLRPGVRDQPGQHANEETPLPPV

SEQ ID NO: 23067 - protein, 262 aa, Artificial Sequence
  Synthetic polypeptide
GQEFETSLANMQMKKHPCRQCDKSFSSSHSLCRHNRIKHKGIRKVYACSHCPDSRRTFTKRLMLEKHVQLMHGIKDPDLKEMTDATNEEETEIKEDTKVPSPKRKLEEPVLEFRPPRGAITQPLKKLKINVFKVHKCAVCGFTTENLLQFHEHIPQHKSDGSSYQCRECGLCYTSHVSLSRHLFIVHKLKEPQPVSKQNGAGEDNQQENKPSHEDESPDGAVSDRKCKVCAKTFETEAALNTHMRTHGMAFIKSKRMSSAEK

SEQ ID NO: 23068 - protein, 27 aa, Artificial Sequence
  Synthetic polypeptide
FQHFGRLTEASGSLKARSSRPAWPTCK

SEQ ID NO: 23069 - protein, 98 aa, Artificial Sequence
  Synthetic polypeptide
GQEFETSLANMQMKKHPCRQCDKSFSSSHSLCRHNRIKHKGIRKVYACSHCPDSRRTFTKRLMLEKHVQLMHGIKDPDLKEMTDATNEEETEIKEDTK

SEQ ID NO: 23070 - protein, 146 aa, Artificial Sequence
  Synthetic polypeptide
IWFGCVPTQISHRTVIIPTCQGQGQVEIIESWGQFPHTVLMVITTFVPRLPVNSSARTTLAECCVLVIRDTDMTGRDTGSGRSHTVWILMSVPAAMGRCVPTSASIPWAATAASAGKATSGKMMGRHVPGETNIPMTLAMRSLRTW

SEQ ID NO: 23071 - protein, 330 aa, Artificial Sequence
  Synthetic polypeptide
IMGAVSPYCSHGDYDVCAEAPCEQQCTDNFGRVLCTCYPGYRYDRERHRKREKPYCLDIDECASSNGTLCAHICINTLGSYRCECREGYIREDDGKTCTRGDKYPNDTGHEKSENMVKAGTCCATCKEFYQMKQTVLQLKQKIALLPNNAADLGKYITGDKVLASNTYLPGPPGLPGGQGPPGSPGPKGSPGFPGMPGPPGQPGPRGSMGPMGPSPDLSHIKQGRRGPVGPPGAPGRDGSKGERGAPGPRGSPGPPGSFDFLLLMLADIRNDITELQEKVFGHRTHSSAEEFPLPQEFPSYPEAMDLGSGDDHPRRTETRDLRAPRDFYP

SEQ ID NO: 23072 - protein, 28 aa, Artificial Sequence
  Synthetic polypeptide
DVTCSSSPFAVIMKPPQPCGTEKVLQRI

SEQ ID NO: 23073 - protein, 343 aa, Artificial Sequence
  Synthetic polypeptide
SLPSHVELKKCCKGYKFVLGQCIPEDYDVCAEAPCEQQCTDNFGRVLCTCYPGYRYDRERHRKREKPYCLDIDECASSNGTLCAHICINTLGSYRCECREGYIREDDGKTCTRGDKYPNDTGHEKSENMVKAGTCCATCKEFYQMKQTVLQLKQKIALLPNNAADLGKYITGDKVLASNTYLPGPPGLPGGQGPPGSPGPKGSPGFPGMPGPPGQPGPRGSMGPMGPSPDLSHIKQGRRGPVGPPGAPGRDGSKGERGAPGPRGSPGPPGSFDFLLLMLADIRNDITELQEKVFGHRTHSSAEEFPLPQEFPSYPEAMDLGSGDDHPRRTETRDLRAPRDFYP

SEQ ID NO: 23074 - protein, 43 aa, Artificial Sequence
  Synthetic polypeptide
CTAWLFMYISASPNRLWMLSDPGLDLNLLHAIRAWYVKASATM

SEQ ID NO: 23075 - protein, 42 aa, Artificial Sequence
  Synthetic polypeptide
KHQPLCDCHVHDHLFGVPQWPGPAAHNEETQTMWQTQKSLHV

SEQ ID NO: 23076 - protein, 64 aa, Artificial Sequence
  Synthetic polypeptide
TVDALRSRIGFESLTCHTCLVRKSISHYVIVMSMTIFLVFLNGLAQLLTTKKLRLCGKPKSHFM

SEQ ID NO: 23077 - protein, 35 aa, Artificial Sequence
  Synthetic polypeptide
LFTTLGSLWNTQTLLLPPAEWPCFLKSMGAPSSEM

SEQ ID NO: 23078 - protein, 14 aa, Artificial Sequence
  Synthetic polypeptide
SPWVLPVLKCDWKQ

SEQ ID NO: 23079 - protein, 91 aa, Artificial Sequence
  Synthetic polypeptide
FYIMNTRWSRRSRCFTSQCPCPRCQPTLFGTFPSAGSNTASCFQAWLTSGPAKWHVGLWMRWLSLYSLFWAVKSMPSALRKSRSMAKPSCF

SEQ ID NO: 23080 - protein, 162 aa, Artificial Sequence
  Synthetic polypeptide
RSVTVSHHPQMGLSSCRKTSSGLPLILHYEYSVEQAQQVLHQSVSMSTVSAHPFRDLPLGREQHCKLLPGVADIRASQVARWTVDEVAEFVQSLLGCEEHAKCFKKEQIDGKAFLLLTQTDIVKVMKIKLGPALKIYNSILMFRHSQELPEEDIASGQEVRG

SEQ ID NO: 23081 - protein, 81 aa, Artificial Sequence
  Synthetic polypeptide
NQPKCPTMIDWIKKMWHIYTMEYYAAIKNDEFISFVGTWMKLETIILSKLSQEQKTKHRIFSLIGYRRFQWHREVHCYRVL

SEQ ID NO: 23082 - protein, 38 aa, Artificial Sequence
  Synthetic polypeptide
TIARTKNQTPHILTHRLQEVPVASGSALLSSAINKELL

SEQ ID NO: 23083 - protein, 33 aa, Artificial Sequence
  Synthetic polypeptide
LRKTEEARQLVTSDPRLAPALQAVYGGSVLSRA

SEQ ID NO: 23084 - protein, 565 aa, Artificial Sequence
  Synthetic polypeptide
HPTLDWLLLCRRCMGDQSFPEHENGFQIGMRLEGIDPRHPSVFCVLSVAEVCGYRLRLHFDGYLSCYDFWTNAGSPDIHPVGWCEKTKHELHIPKGYRKDKFVWMDYLKACKLQNAPKKLFRNRSPNGPMSKEFQVGMKLEAVDRKNPSLVCVATIADIVEDRLLVHFDNWDDSYDYWCDVNSPYVQPVGWCQENGRTLIAPQGYPNPENFSWTEYLEATQTNAVPAKVFKMRLPHGFLPNMKLEVVDKRNPRLIRVATIVDVDDQRVKVHFDGWDHKYDYWVEADSPDIHPIGWCDVTGHPLEVPQRTNDLKILPGQAVCPTPGCRGIGHIRGPRYSGHHSAFGCPYSDMNLKKEATLHDRLREQTQANLESDSSHSKSKSLCSLNFNGKHEKVNSQPRLVQQAKCLKIKGKEDIDLDNLFRVLVLHPRGLEYSVEQAQQVLHQSVSMSTVSAHPFRDLPLGREQHCKLLPGVADIRASQVARWTVDEVAEFVQSLLGCEEHAKCFKKEQIDGKAFLLLTQTDIVKVMKIKLGPALKIYNSILMFRHSQELPEEDIASGQEVRG

SEQ ID NO: 23085 - protein, 25 aa, Artificial Sequence
  Synthetic polypeptide
TGSCFAGGVWGISPFQSMKMVFRLE

SEQ ID NO: 23086 - protein, 556 aa, Artificial Sequence
  Synthetic polypeptide
HPTLDWLLLCRRCMGDQSFPEHENGFQIGMRLEGIDPRHPSVFCVLSVAEVCGYRLRLHFDGYLSCYDFWTNAGSPDIHPVGWCEKTKHELHIPKGYRKDKFVWMDYLKACKLQNAPKKLFRNRSPNGPMSKEFQVGMKLEAVDRKNPSLVCVATIADIVEDRLLVHFDNWDDSYDYWCDVNSPYVQPVGWCQENGRTLIAPQGYPNPENFSWTEYLEATQTNAVPAKVFKMRLPHGFLPNMKLEVVDKRNPRLIRVATIVDVDDQRVKVHFDGWDHKYDYWVEADSPDIHPIGWCDVTGHPLEVPQRTNDLKILPGQAVCPTPGCRGIGHIRGPRYSGHHSAFGCPYSDMNLKKEATLHDRLREQTQANLESDSSHSKSKSLCSLNFNGKHEKVNSQPRLVQQAKCLKIKGKEDIDLDNLFREYSVEQAQQVLHQSVSMSTVSAHPFRDLPLGREQHCKLLPGVADIRASQVARWTVDEVAEFVQSLLGCEEHAKCFKKEQIDGKAFLLLTQTDIVKVMKIKLGPALKIYNSILMFRHSQELPEEDIASGQEVRG

SEQ ID NO: 23087 - protein, 476 aa, Artificial Sequence
  Synthetic polypeptide
HPTLDWLLLCRRCMGDQSFPEHENGFQIGMRLEGIDPRHPSVFCVLSVAEVCGYRLRLHFDGYLSCYDFWTNAGSPDIHPVGWCEKTKHELHIPKGYRKDKFVWMDYLKACKLQNAPKKLFRNRSPNGPMSKEFQVGMKLEAVDRKNPSLVCVATIADIVEDRLLVHFDNWDDSYDYWCDVNSPYVQPVGWCQENGRTLIAPQGYPNPENFSWTEYLEATQTNAVPAKVFKMRLPHGFLPNMKLEVVDKRNPRLIRVATIVDVDDQRVKVHFDGWDHKYDYWVEADSPDIHPIGWCDVTGHPLEVPQRTNDLKILPGQAVCPTPGCRGIGHIRGPRYSGHHSAFGCPYSDMNLKKEATLHDRLREQTQANLESDSSHSKSKSLCSLNFNGKHEKVNSQPRLVQQAKCLKIKGKEDIDLDNLFRGRVRWLMPVIPALWEAEAGRSRDQEIKTILANAVKPRLYQKYKKLARRGGGCL

SEQ ID NO: 23088 - protein, 150 aa, Artificial Sequence
  Synthetic polypeptide
HPTLDWLLLCRRCMGDQSFPEHENGFQIGMRLEGIDPRHPSVFCVLSVAEVCGYRLRLHFDGYLSCYDFWTNAGSPDIHPVGWCEKTKHELHIPKGYRKDKFVWMDYLKACKLQNAPKKLFRNRSPNGPMSKEFQVGMKLEAVDRKNPSL

SEQ ID NO: 23089 - protein, 64 aa, Artificial Sequence
  Synthetic polypeptide
HPTLDWLLLCRRCMGDQSFPEHENGFQIGMRLEGIDPRHPSVFCVLSVAEVCGYRLRLHFDGYL

SEQ ID NO: 23090 - protein, 22 aa, Artificial Sequence
  Synthetic polypeptide
HPTLDWLLLCRRCMGDQSFPEH

SEQ ID NO: 23091 - protein, 18 aa, Artificial Sequence
  Synthetic polypeptide
TGSCFAGGVWGISPFQSM

SEQ ID NO: 23092 - protein, 637 aa, Artificial Sequence
  Synthetic polypeptide
SVTVSHHCQVGLSSCRKPSSGLPLIPHYGTLVIQVTASDADDPSSGNNARLLYSLLQGQPYFSVEPTTGVIRISSKMDRELQDEYWVIIQAKDMIGQPGALSGTTSVLIKLSDVNDNKPIFKESLYRLTVSESAPTGTSIGTIMAYDNDIGENAEMDYSIEEDDSQTFDIITNHETQEGIVILKKKVDFEHQNHYGIRAKVKNHHVPEQLMKYHTEASTTFIKIQVEDVDEPPLFLLPYYVFEVFEETPQGSFVGVVSATDPDNRKSPIRYSITRSKVFNINDNGTITTSNSLDREISAWYNLSITATEKYNIEQISSIPLYVQVLNINDHAPEFSQYYETYVCENAGSGQVIQTISAVDRDESIEEHHFYFNLSVEDTNNSSFTIIDNQDNTAVILTNRTGFNLQEEPVFYISILIADNGIPSLTSTNTLTIHVCDCGDSGSTQTCQYQELVLSMGFKTEVIIAILICIMIIFGFIFLTLGLKQRRKQILFPEKSEDFRENIFQYDDEGGGEEDTEAFDIAELRSSTIMRERKTRKTTSAEIRSLYRQSLQVGPDSAIFRKFILEKLEEANTDPCAPPFDSLQTYAFEGTGSLAGSLSSLESAVSDQDESYDYLNELGPRFKRLACMFGSAVQSNN

SEQ ID NO: 23093 - protein, 6 aa, Artificial Sequence
  Synthetic polypeptide
FLIMEH

SEQ ID NO: 23094 - protein, 24 aa, Artificial Sequence
  Synthetic polypeptide
LQETKLRAPTDSSLWNISYPGDSK

SEQ ID NO: 23095 - protein, 406 aa, Artificial Sequence
  Synthetic polypeptide
SVTVSHHCQVGLSSCRKPSSGLPLIPHYGTLVIQVTASDADDPSSGNNARLLYSLLQGQPYFSVEPTTGVIRISSKMDRELQDEYWVIIQAKDMIGQPGALSGTTSVLIKLSDVNDNKPIFKESLYRLTVSESAPTGTSIGTIMAYDNDIGENAEMDYSIEEDDSQTFDIITNHETQEGIVILKKKVDFEHQNHYGIRAKVKNHHVPEQLMKYHTEASTTFIKIQVEDVDEPPLFLLPYYVFEVFEETPQGSFVGVVSATDPDNRKSPIRYSITRSKVFNINDNGTITTSNSLDREISAWYNLSITATEKYNIEQISSIPLYVQVLNINDHAPEFSQYYETYVCENAGSGQVIQTISAVDRDESIEEHHFYFNLSVEDTNNSSFTIIDNQELVLTFKKNLSSTSPS

SEQ ID NO: 23096 - protein, 355 aa, Artificial Sequence
  Synthetic polypeptide
SVTVSHHCQVGLSSCRKPSSGLPLIPHYGTLVIQVTASDADDPSSGNNARLLYSLLQGQPYFSVEPTTGVIRISSKMDRELQDEYWVIIQAKDMIGQPGALSGTTSVLIKLSDVNDNKPIFKESLYRLTVSESAPTGTSIGTIMAYDNDIGENAEMDYSIEEDDSQTFDIITNHETQEGIVILKKKVDFEHQNHYGIRAKVKNHHVPEQLMKYHTEASTTFIKIQVEDVDEPPLFLLPYYVFEVFEETPQGSFVGVVSATDPDNRKSPIRYSITRSKVFNINDNGTITTSNSLDREISAWYNLSITATEKYNIEQISSIPLYVQVLNINDHAPEFSQYYETYVCENAGSGQGLFF

SEQ ID NO: 23097 - protein, 310 aa, Artificial Sequence
  Synthetic polypeptide
SVTVSHHCQVGLSSCRKPSSGLPLIPHYGTLVIQVTASDADDPSSGNNARLLYSLLQGQPYFSVEPTTGVIRISSKMDRELQDEYWVIIQAKDMIGQPGALSGTTSVLIKLSDVNDNKPIFKESLYRLTVSESAPTGTSIGTIMAYDNDIGENAEMDYSIEEDDSQTFDIITNHETQEGIVILKKKVDFEHQNHYGIRAKVKNHHVPEQLMKYHTEASTTFIKIQVEDVDEPPLFLLPYYVFEVFEETPQGSFVGVVSATDPDNRKSPIRYSITRSKVFNINDNGTITTSNSLDREISAWYNLSITATEK

SEQ ID NO: 23098 - protein, 99 aa, Artificial Sequence
  Synthetic polypeptide
MWKMNCSLLQSKQMCNQLPPGSTRDGSWKFRQDPRLGKNAWTATVVRRHHNNVKKLLACQTPVKANNTVQGQVHKASGPGYSQQIEHGLKKIEMMTFGL

SEQ ID NO: 23099 - protein, 3 aa, Artificial Sequence
  Synthetic polypeptide
NMV

SEQ ID NO: 23100 - protein, 433 aa, Artificial Sequence
  Synthetic polypeptide
SQWARIFSADRTWFKENRNDDIWLVDFYAPWCGHCKKLEPIWNEVGLEMKSIGSPVKVGKMDATSYSSIASEFGVRGYPTIKLLKGDLAYNYRGPRTKDDIIEFAHRVSGALIRPLPSQQMFEHMQKRHRVFFVYVGGESPLKEKYIDAASELIVYTYFFSASEEVVPEYVTLKEMPAVLVFKDETYFVYDEYEDGDLSSWINRERFQNYLAMDGFLLYELGDTGKLVALAVIDEKNTSVEHTRLKSIIQEVARDYRDLFHRDFQFGHMDGNDYINTLLMDELTVPTVVVLNTSNQQYFLLDRQIKNVEDMVQFINNILDGTVEAQGGDSILQRLKRIVFDAKSTIVSIFKSSPLMGCFLFGLPLGVISIMCYGIYTADTDGGYIEERYEVSKSENENQEQIEESKEQQEPSSGGSVVPTVQEPKDVLEKKKD

SEQ ID NO: 23101 - protein, 68 aa, Artificial Sequence
  Synthetic polypeptide
SQWARIFSADRTWFKENRNDDIWLVDFYAPWCGHCKKLEPIWNEVGLEMKSIGSPVKVGKMDATSYSN

SEQ ID NO: 23102 - protein, 176 aa, Artificial Sequence
  Synthetic polypeptide
SQWARIFSADRTWFKENRNDDIWLVDFYAPWCGHCKKLEPIWNEVGLEMKSIGSPVKVGKMDATSYSSIASEFGVRGYPTIKLALIRPLPSQQMFEHMQKRHRVFFVYVGGESPLKEKYIDAASELIVYTYFFSASEEVVPEYVTLKEMPAVLVFKDETYFVYDGKFQIFNSCKTF

SEQ ID NO: 23103 - protein, 174 aa, Artificial Sequence
  Synthetic polypeptide
SQWARIFSADRTWFKENRNDDIWLVDFYAPWCGHCKKLEPIWNEVGLEMKSIGSPVKVGKMDATSYSSIASEFGVRGYPTIKLLKGDLAYNYRGPRTKDDIIEFAHRVSGALIRPLPSQQMFEHMQKRHRVFFVYVGGESPLKEKYIDAASELIVYTYFFSASEEVVPEVIFKI

SEQ ID NO: 23104 - protein, 42 aa, Artificial Sequence
  Synthetic polypeptide
SQWARIFSADRTWFKENRNDDIWLVDALLQSLEFEVIQQLSY

SEQ ID NO: 23105 - protein, 107 aa, Artificial Sequence
  Synthetic polypeptide
SQWARIFSADRTWFKENRNDDIWLVDFYAPWCGHCKKLEPIWNEVGLEMKSIGSPVKVGKMDATSYSSIASEFGVRGYPTIKLRFPGGLKIGVWPFFIGEIKRGLGI

SEQ ID NO: 23106 - protein, 110 aa, Artificial Sequence
  Synthetic polypeptide
SQWARIFSADRTWFKENRNDDIWLVDFYAPWCGHCKKLEPIWNEVGLEMKSIGSPVKVGKMDATSYSNRVLLLLPKLECKGAILAHCNFRLPGSSDSPASASRVAGITGM

SEQ ID NO: 23107 - protein, 44 aa, Artificial Sequence
  Synthetic polypeptide
LLLAFHLDCEASPDMWCFLRQLCHQIATLFRNLERMSHSLVSLR

SEQ ID NO: 23108 - protein, 42 aa, Artificial Sequence
  Synthetic polypeptide
WFKKEEFPCTSSLCLPAAIHVRRDFSLPSTLIVRLPQTCGAF

SEQ ID NO: 23109 - protein, 215 aa, Artificial Sequence
  Synthetic polypeptide
GFPRHVVLFEAAVPSNSHIVSEPGKNVTLTCQPQMTWPVQAVRWEKIQPRQIDLLTYCNLVHGRNFTSKFPRQIVSNCSHGRWSVIVIPDVTVSDSGLYRCYLQASAGENETFVMRLTVAEGKTDNQYTLFVAGGTVLLLLFVISITTIIVIFLNRRRRRERRDLFTESWDTQKAPNNYRSPISTSQPTNQSMDDTREDIYVNYPTFSRRPKTRV

SEQ ID NO: 23110 - protein, 155 aa, Artificial Sequence
  Synthetic polypeptide
GFPRHVVLFEAAVPSNSHIVSEPGKNVTLTCQPQMTWPVQAVRWEKIQPRQIDLLTYCNLVHGRNFTSKFPRQIVSNCSHGRWSVIVIPDVTVSDSGLYRCYLQASAGENETFVMRLTVAEGKTDNQYTLFVAGGTVLLLLFVISITTIIVIFLN

SEQ ID NO: 23111 - protein, 20 aa, Artificial Sequence
  Synthetic polypeptide
LLLAFHLDCEASPDMWCFLR

SEQ ID NO: 23112 - protein, 11 aa, Artificial Sequence
  Synthetic polypeptide
GFPRHVVLFEA

SEQ ID NO: 23113 - protein, 226 aa, Artificial Sequence
  Synthetic polypeptide
LLLAFHLDCEASPDMWCYSFEAAVPSNSHIVSEPGKNVTLTCQPQMTWPVQAVRWEKIQPRQIDLLTYCNLVHGRNFTSKFPRQIVSNCSHGRWSVIVIPDVTVSDSGLYRCYLQASAGENETFVMRLTVAEGKTDNQYTLFVAGGTVLLLLFVISITTIIVIFLNRRRRRERRDLFTESWDTQKAPNNYRSPISTSQPTNQSMDDTREDIYVNYPTFSRRPKTRV

SEQ ID NO: 23114 - protein, 69 aa, Artificial Sequence
  Synthetic polypeptide
WFKKEEFPCTSSLCLPAAIHVRRDFSLPSTLIVRLPQTCGAIVLRQLCHQIATLFRNLERMSHSLVSLR

SEQ ID NO: 23115 - protein, 8 aa, Artificial Sequence
  Synthetic polypeptide
GFPRHVVL

SEQ ID NO: 23116 - protein, 166 aa, Artificial Sequence
  Synthetic polypeptide
LLLAFHLDCEASPDMWCYSFEAAVPSNSHIVSEPGKNVTLTCQPQMTWPVQAVRWEKIQPRQIDLLTYCNLVHGRNFTSKFPRQIVSNCSHGRWSVIVIPDVTVSDSGLYRCYLQASAGENETFVMRLTVAEGKTDNQYTLFVAGGTVLLLLFVISITTIIVIFLN

SEQ ID NO: 23117 - protein, 22 aa, Artificial Sequence
  Synthetic polypeptide
LLLAFHLDCEASPDMWCYSFEA

SEQ ID NO: 23118 - protein, 45 aa, Artificial Sequence
  Synthetic polypeptide
WFKKEEFPCTSSLCLPAAIHVRRDFSLPSTLIVRLPQTCGAIVLR

SEQ ID NO: 23119 - protein, 1596 aa, Artificial Sequence
  Synthetic polypeptide
HDYFLRLPQPCRTECLGVHNVTKPVSSLCNGIHFLLHPKVLYEISVFGIQEPESEVNTAAKAILLYLLQGRLMMTALTWNKFIESLCPVIPILQGYADTEDPLGNCILLLSKASSDTEEMLPCTTRLKSMLRLLLVKKPSVRSLALKLLAFHLTSEEGADTKRPLIDARVLSRVTDLFIGKKPIELRLDDRRELVIKLETVEKVYEIFTSDDVDLVLRKSAAEQLAVIMQDIKMHAVVKKLCLIDKIIEYLNECVSQDGKVVECLVQPCLTLLRKVLCGDPVMRVSLSQQSSLLTVLFRVSLIFHEDCSVVTEVGALFCLLLFDEVSRMDMWSVNPSNKPSLPSVFSLPVSVFRRYHLPVHVIGHHAVSPYSIVLPLSADCLALKPVSDMLRIAWNLSWYHGSDNLLKQMNSETKTQEILDALKLSTEDILTLKITHMASGLQDCLHSIVQAATHREVRAAVTRMSFYLLNDRLSLKGCPGPCGVTLKSLAWHTALNRFLQVLPACTEDEKLLIDIIHFLNKLIKEQRKNSSLELLNWILELLLRHSANPLLDLLVLTESQAREETDDIRTAVRQQLQKELIALFDTLLLNFMEVTDRKCSELLYVFQTQLALKLLQCLKVTDAPHFYGLPSLERTLRGMANLTAFPGWSSHSPLTKPLDICVKYLSGLLEVITSFYVERGGNAMSFMGKGVTKSTILCLLHLSHEMMAQAGSLEWMSLWFLPLGSHSEEHIPTQQGLAWLIPLWVDRDPEVRFTSLGLGSALTTLETGCVALANSCQNISGGLWGTVVNILLDQSECSMVRREAAFILQNLLVIPMPTEIIKDYTWQGPCVHDEDSGLSLIGKPALQALLYHCHFYEHLNQMVKHCYLGRCMFDLNFSAFDRNSESNDLNGLDDSFKFWRAPSRTSQDRDPSSLSTSETTVAPSLGSTEFQPLVQSTTLLPEASHDQFVAQGHQESTSPRPPHDSSLSAPLPKLCVFVTPSLLSAMCSLLDNLLTIAPRDTAKAFRQAHLIELLCSIADATLIQTCVQELRALLPSSPPAEHTQAQVSFLLEYLSSLSRLLQSCLLVEPDLVIQDELVKPLITNIIGILTICTKDVLDKELISAFYHTWTHLFNLLAMLLRKAGAITLPFVTVALAKHWTAAIDMFCTCAGLSATCPALYTASLQFLSVLLTEEAKGHLQAKSKTHLCCSPTVASLLDDSQENQKSLEQLSDVILQCYEGKSSKDILKRVAANALMSLLAVSRRAQKHALKANLIDNCMEQMKHINAQLNLDSLRPGKAALKKKEDGVIKELSIAMQLLRNCLYQNEECKEAALEAHLVPVLHSLWPWILMDDSLMQISLQLLCVYTANFPNGCSSLCWSSCGQHPVQATHRGAVSNSLMLCILKLASQMPLENTTVQQMVFMLLSNLALSHDCKGVIQKSNFLQNFLSLALPKGGNKHLSNLTILWLKLLLNISSGEDGQQMILRLDGCLDLLTEMSKYKHKSSPLLPLLIFHNVCFSPANKPKILANEKVITVLAACLESENQNAQRIGAAALWALIYNYQKAKTALKSPSVKRRVDEAYSLAKKTFPNSEANPLNAYYLKCLENLVQLLNSS

SEQ ID NO: 23120 - protein, 10 aa, Artificial Sequence
  Synthetic polypeptide
DFLSHAELNV

SEQ ID NO: 23121 - protein, 249 aa, Artificial Sequence
  Synthetic polypeptide
HDYFLRLPQPCRTECLGVHNVTKPVSSLCNGIHFLLHPKVLYEISVFGIQEPESEVNTAAKAILLYLLQGRLMMTALTWNKFIESLCPVIPILQGYADTEDPLGNCILLLSKASSDTEEMLPCTTRLKSMLRLLLVKKPSVRSLALKLLAFHLTSEEGADTKRPLIDARVLSRVTDLFIGKKPIELRLDDRRELVIKLETVEKVYEIFTSDDVDLVLRKSAAEQLAVIMQGCRMFGTTMPHTLEEGFMW

SEQ ID NO: 23122 - protein, 963 aa, Artificial Sequence
  Synthetic polypeptide
HDYFLRLPQPCRTECLGVHNVTKPVSSLCNGIHFLLHPKVLYEISVFGIQEPESEVNTAAKAILLYLLQGRLMMTALTWNKFIESLCPVIPILQGYADTEDPLGNCILLLSKASSDTEEMLPCTTRLKSMLRLLLVKKPSVRSLALKLLAFHLTSEEGADTKRPLIDARVLSRVTDLFIGKKPIELRLDDRRELVIKLETVEKVYEIFTSDDVDLVLRKSAAEQLAVIMQDIKMHAVVKKLCLIDKIIEYLNECVSQDGKVVECLVQPCLTLLRKVLCGDPVMRVSLSQQSSLLTVLFRVSLIFHEDCSVVTEVGALFCLLLFDEVSRMDMWSVNPSNKPSLPSVFSLPVSVFRRYHLPVHVIGHHAVSPYSIVLPLSADCLALKPVSDMLRIAWNLSWYHGSDNLLKQMNSETKTQEILDALKLSTEDILTLKITHMASGLQDCLHSIVQAATHREVRAAVTRMSFYLLNDRLSLKGCPGPCGVTLKSLAWHTALNRFLQVLPACTEDEKLLIDIIHFLNKLIKEQRKNSSLELLNWILELLLRHSANPLLDLLVLTESQAREETDDIRTAVRQQLQKELIALFDTLLLNFMEVTDRKCSELLYVFQTQLALKLLQCLKVTDAPHFYGLPSLERTLRGMANLTAFPGWSSHSPLTKPLDICVKYLSGLLEVITSFYVERGGNAMSFMGKGVTKSTILCLLHLSHEMMAQAGSLEWMSLWFLPLGSHSEEHIPTQQGLAWLIPLWVDRDPEVRFTSLGLGSALTTLETGCVALANSCQNISGGLWGTVVNILLDQSECSMVRREAAFILQNLLVIPMPTEIIKDYTWQGPCVHDEDSGLSLIGKPALQALLYHCHFYEHLNQMVKHCYLGRCMFDLNFSAFDRNSESNDLNGLDDSFKFWRAPSRTSQDRDPSSLSTSETTVAPSLGSTEFQPLVQSTTLLPEASHDQFVAQGNRHFGTNIQF

SEQ ID NO: 23123 - protein, 314 aa, Artificial Sequence
  Synthetic polypeptide
RGMSFRPHAELADPRMLVSCIDFRYITDVLTEEDALEILQKGQIGKKEREKQMLAQGYPAYTTSCAWLGYSDDTLKQLCAQALKDGWTRFKVKVGADLQDDMRRCQIIRDMIGPEKTLMMDANQRWDVPEAVEWMSKLAKFKPLWIEEPTSPDDILGHATISKALVPLGIGIATGEQCHNRVIFKQLLQAKALQFLQIDSCRLGSVNENLSVLLMAKKFEIPVCPHAGGVGLCELVQHLIIFDYISVSASLENRVCEYVDHLHEHFKYPVMIQRASYMPPKDPGYSTEMKEESVKKHQYPDGEVWKKLLPAQEN

SEQ ID NO: 23124 - protein, 17 aa, Artificial Sequence
  Synthetic polypeptide
ASDPMQSWLIPGCWYPA

SEQ ID NO: 23125 - protein, 300 aa, Artificial Sequence
  Synthetic polypeptide
RGMSFRPHAELADPRMLVSCIDFRYITDVLTEEDALEILQKGQIGKKEREKQMLAQGYPAYTTSCAWLGYSDDTLKQLCAQALKDGWTRFKVKVGADLQDDMRRCQIIRDMIGPEKTLMMDANQRWDVPEAVEWMSKLAKFKPLWIEEPTSPDDILGHATISKCHNRVIFKQLLQAKALQFLQIDSCRLGSVNENLSVLLMAKKFEIPVCPHAGGVGLCELVQHLIIFDYISVSASLENRVCEYVDHLHEHFKYPVMIQRASYMPPKDPGYSTEMKEESVKKHQYPDGEVWKKLLPAQEN

SEQ ID NO: 23126 - protein, 27 aa, Artificial Sequence
  Synthetic polypeptide
RGMSFRPHAELADPRMLVSCIDFRYIT

SEQ ID NO: 23127 - protein, 71 aa, Artificial Sequence
  Synthetic polypeptide
RGMSFRPHAELADPRMLVSCIDFRYITDVLTEEDALEILQKGQIGKKEREKQMLAQGYPAYTTSCAWLGYS

SEQ ID NO: 23128 - protein, 30 aa, Artificial Sequence
  Synthetic polypeptide
SFMSKGIFLFVHSFILILKQFPADRGSRLS

SEQ ID NO: 23129 - protein, 10 aa, Artificial Sequence
  Synthetic polypeptide
NSSRQTEALG

SEQ ID NO: 23130 - protein, 364 aa, Artificial Sequence
  Synthetic polypeptide
FHEQRDLPLCSQLYPHPETVPGRQRLSVELSIRTFASSGLIYYMAHQNQADYAVLQLHGGRLHFMFDLGKGRTKVSHPALLSDGKWHTVKTDYVKRKGFITVDGRESPMVTVVGDGTMLDVEGLFYLGGLPSQYQARKIGNITHSIPACIGDVTVNSKQLDKDSPVSAFTVNRCYAVAQEGTYFDGSGYAALVKEGYKVQSDVNITLEFRTSSQNGVLLGISTAKVDAIGLELVDGKVLFHVNNGAGRITAAYEPKTATVLCDGKWHTLQANKSKHRITLIVDGNAVGAESPHTQSTSVDTNNPIYVGGYPAGVKQKCLRSQTSFRGCLRKLALIKSPQVQSFDFSRAFELHGVFLHSCPGTES

SEQ ID NO: 23131 - protein, 69 aa, Artificial Sequence
  Synthetic polypeptide
ARIFGNILTLFLKNLSRERILCLSSAILSTSSSRHRMVKDYSRAESQTFQWRLAERLKSCTQKKRLHLF

SEQ ID NO: 23132 - protein, 7 aa, Artificial Sequence
  Synthetic polypeptide
PEFLEIF

SEQ ID NO: 23133 - protein, 1785 aa, Artificial Sequence
  Synthetic polypeptide
QNFWKYFNSVSEKPVTREDFMSVLSDIEYILIKASYGQGLQQSRISDISMEVGRKAEKLHPEEEVASLLENCVCPPGTVGFSCQDCAPGYHRGKLPAGSDRGPRPLVAPCVPCSCNNHSDTCDPNTGKCLNCGDNTAGDHCDVCTSGYYGKVTGSASDCALCACPHSPPASFSPTCVLEGDHDFRCDACLLGYEGKHCERCSSSYYGNPQTPGGSCQKCDCNPHGSVHGDCDRTSGQCVCRLGASGLRCDECEPRHILMETDCVSCDDECVGVLLNDLDEIGDAVLSLNLTGIIPVPYGILSNLENTTKYLQESLLKENMQKDLGKIKLEGVAEETDNLQKKLTRMLASTQKVNRATERIFKESQDLAIAIERLQMSITEIMEKTTLNQTLDEDFLLPNSTLQNMQQNGTSLLEIMQIRDFTQLHQNATLELKAAEDLLSQIQENYQKPLEELEVLKEAASHVLSKHNNELKAAEALVREAEAKMQESNHLLLMVNANLREFSDKKLHVQEEQNLTSELIVQGRGLIDAAAAQTDAVQDALEHLEDHQDKLLLWSAKIRHHIDDLVMHMSQRNAVDLVYRAEDHAAEFQRLADVLYSGLENIRNVSLNATSAAYVHYNIQSLIEESEELARDAHRTVTETSLLSESLVSNGKAAVQRSSRFLKEGNNLSRKLPGIALELSELRNKTNRFQENAVEITRQTNESLLILRAIPKGIRDKGAKTKELATSASQSAVSTLRDVAGLSQELLNTSASLSRVNTTLRETHQLLQDSTMATLLAGRKVKDVEIQANLLFDRLKPLKMLEENLSRNLSEIKLLISQARKQAASIKVAVSADRDCIRAYQPQISSTNYNTLTLNVKTQEPDNLLFYLGSSTASDFLAVEMRRGRVAFLWDLGSGSTRLEFPDFPIDDNRWHSIHVARFGNIGSLSVKEMSSNQKSPTKTSKSPGTANVLDVNNSTLMFVGGLGGQIKKSPAVKVTHFKGCLGEAFLNGKSIGLWNYIEREGKCRGCFGSSQNEDPSFHFDGSGYSVVEKSLPATVTQIIMLFNTFSPNGLLLYLGSYGTKDFLSIELFRGRVKVMTDLGSGPITLLTDRRYNNGTWYKIAFQRNRKQGVLAVIDAYNTSNKETKQGETPGASSDLNRLDKDPIYVGGLPRSRVVRRGVTTKSFVGCIKNLEISRSTFDLLRNSYGVRKGCLLEPIRSVSFLKGGYIELPPKSLSPESEWLVTFATTNSSGIILAALGGDVEKRGDREEAHVPFFSVMLIGGNIEVHVNPGDGTGLRKALLHAPTGTCSDGQAHSISLVRNRRIITVQLDENNPVEMKLGTLVESRTINVSNLYVGGIPEGEGTSLLTMRRSFHGCIKNLIFNLELLDFNSAVGHEQVDLDTCWLSERPKLAPDAEDSKLLPEPRAFPEQCVVDAALEYVPGAHQFGLTQNSHFILPFNQSAVRKKLSVELSIRTFASSGLIYYMAHQNQADYAVLQLHGGRLHFMFDLGKGRTKVSHPALLSDGKWHTVKTDYVKRKGFITVDGRESPMVTVVGDGTMLDVEGLFYLGGLPSQYQARKIGNITHSIPACIGDVTVNSKQLDKDSPVSAFTVNRCYAVAQEGTYFDGSGYAALVKEGYKVQSDVNITLEFRTSSQNGVLLGISTAKVDAIGLELVDGKVLFHVNNGAGRITAAYEPKTATVLCDGKWHTLQANKSKHRITLIVDGNAVGAESPHTQSTSVDTNNPIYVGGYPAGVKQKCLRSQTSFRGCLRKLALIKSPQVQSFDFSRAFELHGVFLHSCPGTES

SEQ ID NO: 23134 - protein, 18 aa, Artificial Sequence
  Synthetic polypeptide
GLIKLYVTKKFTRREEIL

SEQ ID NO: 23135 - protein, 14 aa, Artificial Sequence
  Synthetic polypeptide
NYMLQKNSQEERKY

SEQ ID NO: 23136 - protein, 32 aa, Artificial Sequence
  Synthetic polypeptide
SLTNKFAMRINCILRADKIICYKKIHKKRGNT

SEQ ID NO: 23137 - protein, 59 aa, Artificial Sequence
  Synthetic polypeptide
IRLMGSDGFKKESFAAQTLFSCLLPRETCLSPSAMIVRPPSHVELWWLLMWTWPFLNLK

SEQ ID NO: 23138 - protein, 11 aa, Artificial Sequence
  Synthetic polypeptide
GLPAMWNCGGY

SEQ ID NO: 23139 - protein, 145 aa, Artificial Sequence
  Synthetic polypeptide
DMPFTFSHDCEASQPCGTVVAIDVDMAFFEPKMREILEQNCTGDEDCNFFDCFSRCDLRVNKCGAQRVNNNLQVICDKIFRHWFSAPLKSSAVSFQLQLQLQEAVQECADPGVPSGNTRRAASSVFWKLRQLLQATLRELQEAEK

SEQ ID NO: 23140 - protein, 127 aa, Artificial Sequence
  Synthetic polypeptide
IRLMGSDGFKKESFAAQTLFSCLLPRETCLSPSAMIVRPPSHVELARTTRAARWPGTSARTCVWRESCCSNAACTTTEARRCCRPTGAAGPWSSSPRRRPSPASRPSACWKRRQGRVARTCPRPNSS

SEQ ID NO: 23141 - protein, 195 aa, Artificial Sequence
  Synthetic polypeptide
GLPAMWNLPGLPGRHAGRGPLRGPVCGGRAAVPTLPALQQRQEGAAGRLARPARGPQVQGGGLLQLPAPQPVGRGGRGGWPGHARGRTPPDGGWGGQERSGPGVVQQQPGAVVAGQAGPTLAGTAGQPVGPAAAGGVRLLQPAAGPEPTRAARAGFLRPLLRGGVPGRGQPPPQGTLPPGPGPRCPWGWPGQGHQ

SEQ ID NO: 23142 - protein, 371 aa, Artificial Sequence
  Synthetic polypeptide
DMPFTFSHDCEASQPCGTCQDYQGGTLAGDLCEDLCVAGELLFQRCLHYNRGKKVLQADWRGRPVVLKSKEEAFSSFPPLSLLEEEAGEGGQDMPEAELLLMVAGEVKSALGLELSNSSLGPWWPGRRGPRWRGQLASLWALLQQEEYVYFSLLQDLSPHVLPVLGSCGHFYAVEFLAAGSPHHRALFPLDRAPGAPGGGQAKAISDIALSFLDMVNHFDSDFSHRLHLCDIKPENFAIRSDFTVVAIDVDMAFFEPKMREILEQNCTGDEDCNFFDCFSRCDLRVNKCGAQRVNNNLQVICDKIFRHWFSAPLKSSAVSFQLQLQLQEAVQECADPGVPSGNTRRAASSVFWKLRQLLQATLRELQEAEK

SEQ ID NO: 23143 - protein, 10 aa, Artificial Sequence
  Synthetic polypeptide
PVLGKESHLF

SEQ ID NO: 23144 - protein, 1754 aa, Artificial Sequence
  Synthetic polypeptide
RSLQPSANKRRRKTLQEKLVSLSQYWEKNLICSECGDEFTLQSQLAVHMEEHRQELAGTRQHACKACKKEFETSSELKEHMKTHYKIRVSSTRSYNRNIDRSGFTYSCPHCGKTFQKPSQLTRHIRIHTGERPFKCSECGKAFNQKGALQTHMIKHTGEKPHACAFCPAAFSQKGNLQSHVQRVHSEVKNGPTYNCTECSCVFKSLGSLNTHISKMHMGGPQNSTSSTETAHVLTATLFQTLPLQQTEAQATSASSQPSSQAVSDVIQQLLELSEPAPVESGQSPQPGQQLSITVGINQDILQQALENSGLSSIPAAAHPNDSCHAKTSAPHAQNPDVSSVSNEQTDPTDAEQEKEQESPEKLDKKEKKMIKKKSPFLPGSIREENGVRWHVCPYCAKEFRKPSDLVRHIRIHTHEKPFKCPQCFRAFAVKSTLTAHIKTHTGIKAFKCQYCMKSFSTSGSLKVHIRLHTGVRPFACPHCDKKFRTSGHRKTHIASHFKHTELRKMRHQRKPAKVRVGKTNIPVPDIPLQEPILITDLGLIQPIPKNQFFQSYFNNNFVNEADRPYKCFYCHRAYKKSCHLKQHIRSHTGEKPFKCSQCGRGFVSAGVLKAHIRTHTGLKSFKCLICNGAFTTGGSLRRHMGIHNDLRPYMCPYCQKTFKTSLNCKKHMKTHRYELAQQLQQHQQAASIDDSTVDQQSMQASTQMQVEIESDELPQTAEVVAANPEAMLDLEPQHVVGTEEAGLGQQLADQPLEADEDGFVAPQDPLRGHVDQFEEQSPAQQSFEPAGLPQGFTVTDTYHQQPQFPPVQQLQDSSTLESQALSTSFHQQSLLQAPSSDGMNVTTRLIQESSQEELDLQAQGSQFLEDNEDQSRRSYRCDYCNKGFKKSSHLKQHVRSHTGEKPYKCKLCGRGFVSSGVLKSHEKTHTGVKAFSCSVCNASFTTNGSLTRHMATHMSMKPYKCPFCEEGFRTTVHCKKHMKRHQTVPSAVSATGETEGGDICMEEEEEHSDRNASRKSRPEVITFTEEETAQLAKIRPQESATVSEKVLVQSAAEKDRISELRDKQAELQDEPKHANCCTYCPKSFKKPSDLVRHVRIHTGEKPYKCDECGKSFTVKSTLDCHVKTHTGQKLFSCHVCSNAFSTKGSLKVHMRLHTGAKPFKCPHCELRFRTSGRRKTHMQFHYKPDPKKARKPMTRSSSEGLQPVNLLNSSSTDPNVFIMNNSVLTGQFDQNLLQPGLVGQAILPASVSAGGDLTVSLTDGSLATLEGIQLQLAANLVGPNVQISGIDAASINNITLQIDPSILQQTLQQGNLLAQQLTGEPGLAPQNSSLQTSDSTVPASVVIQPISGLSLQPTVTSANLTIGPLSEQDSVLTTNSSGTQDLTQVMTSQGLVSPSGGPHEITLTINNSSLSQVLAQAAGPTATSSSGSPQEITLTISELNTTSGSLPSTTPMSPSAISTQNLVMSSSGVGGDASVTLTLADTQGMLSGGLDTVTLNITSQGQQFPALLTDPSLSGQGGAGSPQVILVSHTPQSASAACEEIAYQVAGVSGNLAPGNQPEKEGRAHQCLECDRAFSSAAVLMHHSKEVHGRERIHGCPVCRKAFKRATHLKEHMQTHQAGPSLSSQKPRVFKCDTCEKAFAKPSQLERHSRIHTGERPFHCTLCEKAFNQKSALQVHMKKHTGERPYKCAYCVMGFTQKSNMKLHMKRAHSYAGALQESAGHPEQDGEELSRTLHLEEVVQEAAGEWQALTHVF

SEQ ID NO: 23145 - protein, 90 aa, Artificial Sequence
  Synthetic polypeptide
GFFFSSQTPGHGFEEACSLLPTSGEEKHSKKSWFPLASTGKRISSVLSVGMSLLCRVSWPCTWRSTARSWLEPGSMPARPARKSSRPPRS

SEQ ID NO: 23146 - protein, 1467 aa, Artificial Sequence
  Synthetic polypeptide
RSLQPSANKRRRKTLQEKLVSLSQYWEKNLICSECGDEFTLQSQLAVHMEEHRQELAGTRQHACKACKKEFETSSELKEHMKTHYKIRVSSTRSYNRNIDRSGFTYSCPHCGKTFQKPSQLTRHIRIHTGERPFKCSECGKAFNQKGALQTHMIKHTGEKPHACAFCPAAFSQKGNLQSHVQRVHSEVKNGPTYNCTECSCVFKSLGSLNTHISKMHMGGPQNSTSSTETAHVLTATLFQTLPLQQTEAQATSASSQPSSQAVSDVIQQLLELSEPAPVESGQSPQPGQQLSITVGINQDILQQALENSGLSSIPAAAHPNDSCHAKTSAPHAQNPDVSSVSNEQTDPTDAEQEKEQESPEKLDKKEKKMIKKKSPFLPGSIREENGVRWHVCPYCAKEFRKPSDLVRHIRIHTHEKPFKCPQCFRAFAVKSTLTAHIKTHTGIKAFKCQYCMKSFSTSGSLKVHIRLHTGVRPFACPHCDKKFRTSGHRKTHIASHFKHTELRKMRHQRKPAKVRVGKTNIPVPDIPLQEPILITDLGLIQPIPKNQFFQSYFNNNFVNEADRPYKCFYCHRAYKKSCHLKQHIRSHTGEKPFKCSQCGRGFVSAGVLKAHIRTHTGLKSFKCLICNGAFTTGGSLRRHMGIHNDLRPYMCPYCQKTFKTSLNCKKHMKTHRYELAQQLQQHQQAASIDDSTVDQQSMQASTQMQVEIESDELPQTAEVVAANPEAMLDLEPQHVVGTEEAGLGQQLADQPLEADEDGFVAPQDPLRGHVDQFEEQSPAQQSFEPAGLPQGFTVTDTYHQQPQFPPVQQLQDSSTLESQALSTSFHQQSLLQAPSSDGMNVTTRLIQESSQEELDLQAQGSQFLEDNEDQSRRSYRCDYCNKGFKKSSHLKQHVRSHTGEKPYKCKLCGRGFVSSGVLKSHEKTHTGVKAFSCSVCNASFTTNGSLTRHMATHMSMKPYKCPFCEEGFRTTVHCKKHMKRHQTVPSAVSATGETEGGDICMEEEEEHSDRNASRKSRPEVITFTEEETAQLAKIRPQESATVSEKVLVQSAAEKDRISELRDKQAELQDEPKHANCCTYCPKSFKKPSDLVRHVRIHTGEKPYKCDECGKSFTVKSTLDCHVKTHTGQKLFSCHVCSNAFSTKGSLKVHMRLHTGAKPFKCPHCELRFRTSGRRKTHMQFHYKPDPKKARKPMTRSSSEGLQPVNLLNSSSTDPNVFIMNNSVLTGQFDQNLLQPGLVGQAILPASVSAGGDLTVSLTDGSLATLEGIQLQLAANLVGPNVQISGIDAASINNITLQIDPSILQQTLQQGNLLAQQLTGEPGLAPQNSSLQTSDSTVPASVVIQPISGLSLQPTVTSANLTIGPLSEQDSVLTTNSSGTQDLTQVMTSQGLVSPSGGPHEITLTINNSSLSQVLAQAAGPTATSSSGSPQEITLTISGSRSVQHSVGPQECGSVEALYLENSSDKT

SEQ ID NO: 23147 - protein, 369 aa, Artificial Sequence
  Synthetic polypeptide
RSLQPSANKRRRKTLQEKLVSLSQYWEKNLICSECGDEFTLQSQLAVHMEEHRQELAGTRQHACKACKKEFETSSELKEHMKTHYKIRVSSTRSYNRNIDRSGFTYSCPHCGKTFQKPSQLTRHIRIHTGERPFKCSECGKAFNQKGALQTHMIKHTGEKPHACAFCPAAFSQKGNLQSHVQRVHSEVKNGPTYNCTECSCVFKSLGSLNTHISKMHMGGPQNSTSSTETAHVLTATLFQTLPLQQTEAQATSASSQPSSQAVSDVIQQLLELSEPAPVESGQSPQPGQQLSITVGINQDILQQALENSGLSSIPAAAHPNDSCHAKTSAPHAQNPDVSSVSNEQTDPTDAEQEKEQESPEKLDKKEKK

SEQ ID NO: 23148 - protein, 32 aa, Artificial Sequence
  Synthetic polypeptide
ADASAMPWDFPASRTERQMRTRTMGPPLRTQR

SEQ ID NO: 23149 - protein, 52 aa, Artificial Sequence
  Synthetic polypeptide
SVSPCDATHHVMAHSPEAEQMPVPCPGTFQPQELRGRCEPEQWDLLSGHSGD

SEQ ID NO: 23150 - protein, 38 aa, Artificial Sequence
  Synthetic polypeptide
ADPELERGRAAHLHPPHPTTPDQSRRKQLCLHLPDVCV

SEQ ID NO: 23151 - protein, 66 aa, Artificial Sequence
  Synthetic polypeptide
FLYEPGHAKDCEQIQSWREAEQPTSTLHTPPPPTSPGGNSSACTFQMFACELGHGQSGVWMDDDER

SEQ ID NO: 23152 - protein, 781 aa, Artificial Sequence
  Synthetic polypeptide
GEDSGRNWNDSSTSQGTPRTVSRSRAGERQSSPPPPSTPHHPRPVQEETALPAPSRCLRVNLDMGKAVYGWMMMKDENIPGTVVRTSTIPEELGRLVYLLTDKTGTLTQNEMIFKRLHLGTVSYGADTMDEIQSHVRDSYSQMQSQAGGNNTGSTPLRKAQSSAPKVRKSVSSRIHEAVKAIVLCHNVTPVYESRAGVTEETEFAEADQDFSDENRTYQASSPDEVALVQWTESVGLTLVSRDLTSMQLKTPSGQVLSFCILQLFPFTSESKRMGVIVRDESTAEITFYMKGADVAMSPIVQYNDWLEEECGNMAREGLRTLVVAKKALTEEQYQDFESRYTQAKLSMHDRSLKVAAVVESLEREMELLCLTGVEDQLQADVRPTLEMLRNAGIKIWMLTGDKLETATCIAKSSHLVSRTQDIHIFRQVTSRGEAHLELNAFRRKHDCALVISGDSLEVCLKYYEHEFVELACQCPAVVCCRCSPTQKARIVTLLQQHTGRRTCAIGDGGNDVSMIQAADCGIGIEGKEGKQASLAADFSITQFRHIGRLLMVHGRNSYKRSAALGQFVMHRGLIISTMQAVFSSVFYFASVPLYQGFLMVGYATIYTMFPVFSLVLDQDVKPEMAMLYPELYKDLTKGRSLSFKTFLIWVLISIYQGGILMYGALVLFESEFVHVVAISFTALILTELLMVALTVRTWHWLMVVAEFLSLGCYVSSLAFLNEYFGIGRVSFGAFLDVAFITTVTFLWKVSAITVVSCLPLYVLKYLRRKLSPPSYCKLAS

SEQ ID NO: 23153 - protein, 770 aa, Artificial Sequence
  Synthetic polypeptide
GEDSGRNWNDSSTSQGTPRTVSRSRAGERQSSPPPPSTPHHPRPVQEETALPAPSRCLRVNLDMGKAVYGWMMMKDENIPGTVVRTSTIPEELGRLVYLLTDKTGTLTQNEMIFKRLHLGTVSYGADTMDEIQSHVRDSYSQMQSQAGGNNTGSTPLRKAQSSAPKVRKSVSSRIHEAVKAIVLCHNVTPVYESRAGVTEETEFAEADQDFSDENRTYQASSPDEVALVQWTESVGLTLVSRDLTSMQLKTPSGQVLSFCILQLFPFTSESKRMGVIVRDESTAEITFYMKGADVAMSPIVQYNDWLEEECGNMAREGLRTLVVAKKALTEEQYQDFESRYTQAKLSMHDRSLKVAAVVESLEREMELLCLTGVEDQLQADVRPTLEMLRNAGIKIWMLTGDKLETATCIAKSSHLVSRTQDIHIFRQVTSRGEAHLELNAFRRKHDCALVISGDSLEVCLKYYEHEFVELACQCPAVVCCRCSPTQKARIVTLLQQHTGRRTCAIGDGGNDVSMIQAADCGIGIEGKEGKQASLAADFSITQFRHIGRLLMVHGRNSYKRSAALGQFVMHRGLIISTMQAVFSSVFYFASVPLYQGFLMVGYATIYTMFPVFSLVLDQDVKPEMAMLYPELYKDLTKGRSLSFKTFLIWVLISIYQGGILMYGALVLFESEFVHVVAISFTALILTELLMVALTVRTWHWLMVVAEFLSLGCYVSSLAFLNEYFDVAFITTVTFLWKVSAITVVSCLPLYVLKYLRRKLSPPSYCKLAS

SEQ ID NO: 23154 - protein, 14 aa, Artificial Sequence
  Synthetic polypeptide
KGMPPYTPCSQCSP

SEQ ID NO: 23155 - protein, 74 aa, Artificial Sequence
  Synthetic polypeptide
SQHRKVCHHIHHVPSVLLSAGPGREARDGDALPGAVQGPHQGKILVLQNLPHLGFNKYLPRRHPHVWGPGALRV

SEQ ID NO: 23156 - protein, 188 aa, Artificial Sequence
  Synthetic polypeptide
VYNDLNIERYATIYTMFPVFSLVLDQDVKPEMAMLYPELYKDLTKGRSLSFKTFLIWVLISIYQGGILMYGALVLFESEFVHVVAISFTALILTELLMVALTVRTWHWLMVVAEFLSLGCYVSSLAFLNEYFGIGRVSFGAFLDVAFITTVTFLWKVSAITVVSCLPLYVLKYLRRKLSPPSYCKLAS

SEQ ID NO: 23157 - protein, 177 aa, Artificial Sequence
  Synthetic polypeptide
VYNDLNIERYATIYTMFPVFSLVLDQDVKPEMAMLYPELYKDLTKGRSLSFKTFLIWVLISIYQGGILMYGALVLFESEFVHVVAISFTALILTELLMVALTVRTWHWLMVVAEFLSLGCYVSSLAFLNEYFDVAFITTVTFLWKVSAITVVSCLPLYVLKYLRRKLSPPSYCKLAS

SEQ ID NO: 23158 - protein, 78 aa, Artificial Sequence
  Synthetic polypeptide
VYNDLNIERYATIYTMFPVFSLVLDQDVKPEMAMLYPELYKDLTKGRSLSFKTFLIWVLISIYQGGILMYGALVLFES

SEQ ID NO: 23159 - protein, 53 aa, Artificial Sequence
  Synthetic polypeptide
SQHRKVCHHIHHVPSVLLSAGPGREARDGDALPGAVQGPHQEPTRRQVKQKTT

SEQ ID NO: 23160 - protein, 120 aa, Artificial Sequence
  Synthetic polypeptide
VYNDLNIERYATIYTMFPVFSLVLDQDVKPEMAMLYPELYKDLTKSQQDGRSNRRQHERLTSGTSGHVWDPGSFFRIRVSGKGARNAGKILVLQNLPHLGFNKYLPRRHPHVWGPGALRV

SEQ ID NO: 23161 - protein, 62 aa, Artificial Sequence
  Synthetic polypeptide
AWQLTPGIPALWEAEAPGSLEPRSLRPPWATWRDPISTQNITISQPDPARPGLAAAVPLRPV

SEQ ID NO: 23162 - protein, 420 aa, Artificial Sequence
  Synthetic polypeptide
QLASPTLPALDWQLPSHSGPYELRIEVQPKSHHRAHYETEGSRGAVKASAGGHPIVQLHGYLENEPLMLQLFIGTADDRLLRPHAFYQVHRITGKTVSTTSHEAILSNTKVLEIPLLPENSMRAVIDCAGILKLRNSDIELRKGETDIGRKNTRVRLVFRVHVPQPSGRTLSLQVASNPIECSQRSAQELPLVEKQSTDSYPVVGGKKMVLSGHNFLQDSKVIFVEKAPDGHHVWEMEAKTDRDLCKPNSLVVEIPPFRNQRITSPVHVSFYVCNGKRKRSQYQRFTYLPANVPIIKTEPTDDYEPAPTCGPVSQGLSPLPRPYYSQQLAMPPDPSSCLVAGFPPCPQRSTLMPAAPGVSPKLHDLSPAAYTKGVASPGHCHLGLPQPAGEAPAVQDVPRPVATHPGSPGQPPPALLPQQ

SEQ ID NO: 23163 - protein, 43 aa, Artificial Sequence
  Synthetic polypeptide
PARPCPPWTGSCRPTQARMSFGLRCSPSPTTEPTTRRRAAGGP

SEQ ID NO: 23164 - protein, 311 aa, Artificial Sequence
  Synthetic polypeptide
QLASPTLPALDWQLPSHSGPYELRIEVQPKSHHRAHYETEGSRGAVKASAGGHPIVQLHGYLENEPLMLQLFIGTADDRLLRPHAFYQVHRITGKTVSTTSHEAILSNTKVLEIPLLPENSMRAVIDCAGILKLRNSDIELRKGETDIGRKNTRVRLVFRVHVPQPSGRTLSLQVASNPIECSQRSAQELPLVEKQSTDSYPVVGGKKMVLSGHNFLQDSKVIFVEKAPDGHHVWEMEAKTDRDLCKPNSLVVEIPPFRNQRITSPVHVSFYVCNGKRKRSQYQRFTYLPANGNAIFLTVSREHERVGCFF

SEQ ID NO: 23165 - protein, 234 aa, Artificial Sequence
  Synthetic polypeptide
QLASPTLPALDWQLPSHSGPYELRIEVQPKSHHRAHYETEGSRGAVKASAGGHPIVQLHGYLENEPLMLQLFIGTADDRLLRPHAFYQVHRITGKTVSTTSHEAILSNTKVLEIPLLPENSMRAVIDCAGILKLRNSDIELRKGETDIGRKNTRPSAQLRSCLWWRSRARTAIRSWAGRRWSCLATTSCRTPRSFSWRKPQMATMSGRWKRKLTGTCASRILWWLRSRHFGIRG

SEQ ID NO: 23166 - protein, 538 aa, Artificial Sequence
  Synthetic polypeptide
QLASPTLPALDWQLPSHSGPYELRIEVQPKSHHRAHYETEGSRGAVKASAGGHPIVQLHGYLENEPLMLQLFIGTADDRLLRPHAFYQVHRITGKTVSTTSHEAILSNTKVLEIPLLPENSMRAVIDCAGILKLRNSDIELRKGETDIGRKNTRVRLVFRVHVPQPSGRTLSLQVASNPIECSQRSAQELPLVEKQSTDSYPVVGGKKMVLSGHNFLQDSKVIFVEKAPDGHHVWEMEAKTDRDLCKPNSLVVEIPPFRNQRITSPVHVSFYVCNGKRKRSQYQRFTYLPANVPIIKTEPTDDYEPAPTCGPVSQGLSPLPRPYYSQQLAMPPDPSSCLVAGFPPCPQRSTLMPAAPGVSPKLHDLSPAAYTKGVASPGHCHLGLPQPAGEAPAVQDVPRPVATHPGSPGQPPPALLPQQVSAPPSSSCPPGLEHSLCPSSPSPPLPPATQEPTCLQPCSPACPPATGRPQHLPSTVRRDESPTAGPRLLPEVHEDGSPNLAPIPVTVKREPEELDQLYLDDVNEIIRNDLSSTSTHS

SEQ ID NO: 23167 - protein, 308 aa, Artificial Sequence
  Synthetic polypeptide
QLASPTLPALDWQLPSHSGPYELRIEVQPKSHHRAHYETEGSRGAVKASAGGHPIVQLHGYLENEPLMLQLFIGTADDRLLRPHAFYQVHRITGKTVSTTSHEAILSNTKVLEIPLLPENSMRAVIDCAGILKLRNSDIELRKGETDIGRKNTRVRLVFRVHVPQPSGRTLSLQVASNPIECSQRSAQELPLVEKQSTDSYPVVGGKKMVLSGHNFLQDSKVIFVEKAPDGHHVWEMEAKTDRDLCKPNSLVVEIPPFRNQRITSPVHVSFYVCNGKRKRSQYQRFTYLPANVNEIIRNDLSSTSTHS

SEQ ID NO: 23168 - protein, 46 aa, Artificial Sequence
  Synthetic polypeptide
QLASPTLPALDWQLPSHSGPYELRIEVQPKSHHRAHYETEGSRGAV

SEQ ID NO: 23169 - protein, 73 aa, Artificial Sequence
  Synthetic polypeptide
ALTWPWKEVLIRAFGFGVTGCRCSAQRFRHPSRRCLVKSCLTLRTESSLALLEESDSPVCLRQCRCTLFVRRI

SEQ ID NO: 23170 - protein, 34 aa, Artificial Sequence
  Synthetic polypeptide
RGPGRKCSSEHSDLGSPVADAQPSGSATPAADVW

SEQ ID NO: 23171 - protein, 207 aa, Artificial Sequence
  Synthetic polypeptide
ASHPKIQNWECSKVRIFLSTKIRTFLSTDVALEGSAHQSIRIWGHRLQMLSPAVPPPQPQMFGEELPDAQDGEQPGPSRRKRQPSMSETMPLYTLCKEDLESMDKEVDDILGEGSDDSDSEKRRPEEQEEEPQPRKPGTRRERTLGAPASSERSAAGGRGPRGHKRKLNEEDAASESSRESSNEDEGSSSEADEMAKALEAELNDLM

SEQ ID NO: 23172 - protein, 113 aa, Artificial Sequence
  Synthetic polypeptide
ASHPKIQNWECSKVRIFLSTKIRTFLSTDVALEGSAHQSIRIWGHRLQMLSPAVPPPQPQMFGEELPDAQDGEQPGPSRRKRQPSMSETMPLYTLCKEDLESMDKERPQEEAE

SEQ ID NO: 23173 - protein, 1109 aa, Artificial Sequence
  Synthetic polypeptide
TCTDLFSCHCSLNKDLKGFDPGEKYFHNTSWGDVSLWEPSGKKVRYRTKPYCCGLCKYSTKVLTSFKNHLHRYHEDEIDQELVIPCPNCVFASQPKVVGRHFRMFHAPVRKVQNYTVNILGETKSSRSDVISFTCLKCNFSNTLYYSMKKHVLVAHFHYLINSYFGLRTEEMGEQPKTNDTVSIEKIPPPDKYYCKKCNANASSQDALMYHILTSDIHRDLENKLRSVISEHIKRTGLLKQTHIAPKPAAHLAAPANGSAPSAPAQPPCFHLALPQNSPSPAAGQPVTVAQGAPGSLTHSPPAAGQSHMTLVSSPLPVGQNSLTLQPPAPQPVFLSHGVPLHQSVNPPVLPLSQPVGPVNKSVGTSVLPINQTVRPGVLPLTQPVGPINRPVGPGVLPVSPSVTPGVLQAVSPGVLSVSRAVPSGVLPAGQMTPAGQMTPAGVIPGQTATSGVLPTGQMVQSGVLPVGQTAPSRVLPPGQTAPLRVISAGQVVPSGLLSPNQTVSSSAVVPVNQGVNSGVLQLSQPVVSGVLPVGQPVRPGVLQLNQTVGTNILPVNQPVRPGASQNTTFLTSGSILRQLIPTGKQVNGIPTYTLAPVSVTLPVPPGGLATVAPPQMPIQLLPSGAAAPMAGSMPGMPSPPVLVNAAQSVFVQASSSAADTNQVLKQAKQWKTCPVCNELFPSNVYQVHMEVAHKHSESKSGEKLEPEKLAACAPFLKWMREKTVRCLSCKCLVSEEELIHHLLMHGLGCLFCPCTFHDIKGLSEHSRNRHLGKKKLPMDYSNRGFQLDVDANGNLLFPHLDFITILPKEKLGEREVYLAILAGIHSKSLVPVYVKVRPQAEGTPGSTGKRVSTCPFCFGPFVTTEAYELHLKERHHIMPTVHTVLKSPAFKCIHCCGVYTGNMTLAAIAVHLVRCRSAPKDSSSDLQAQPGFIHNSELLLVSGEVMHDSSFSVKRKLPDGHLGAEDQRHGEEQPPILNADAAPGPEKVTSVVPFKRQRNESRTEGPIVKDEALQILALDPKKYEGRSYEEKKQFLKDYFHKKPYPSKKEIELLSSLFWVWKIDVASFFGKRRYICMKAIKNHKPSVLLGFDMSELKNVKHRLNFEYEP

SEQ ID NO: 23174 - protein, 31 aa, Artificial Sequence
  Synthetic polypeptide
TRTLKALIQERNTFITHHGVMFLSGNLLERK

SEQ ID NO: 23175 - protein, 36 aa, Artificial Sequence
  Synthetic polypeptide
LNQLSVENIWERKCMVASVLNMYRLVFLSLFSKQGP

SEQ ID NO: 23176 - protein, 229 aa, Artificial Sequence
  Synthetic polypeptide
TCTDLFSCHCSLNKDLKGFDPGEKYFHNTSWGDVSLWEPSGKKVRYRTKPYCCGLCKYSTKVLTSFKNHLHRYHEDEIDQELVIPCPNCVFASQPKVVGRHFRMFHAPVRKVQNYTVNILGETKSSRSDVISFTCLKCNFSNTLYYSMKKHVLVAHFHYLINSYFGLRTEEMGEQPKTNDTVSIEKIPPPDKYYCKKCNANASSQDALMYHILTSDIHRDLENKLRSVI

SEQ ID NO: 23177 - protein, 149 aa, Artificial Sequence
  Synthetic polypeptide
TCTDLFSCHCSLNKDLKGFDPGEKYFHNTSWGDVSLWEPSGKKVRYRTKPYCCGLCKYSTKVLTSFKNHLHRYHEDEIDQELVIPCPNCVFASQPKVVGRHFRMFHAPVRKVQNYTVNILGETKSSRSDVISFTCLKCNFSNTLYYSMK

SEQ ID NO: 23178 - protein, 81 aa, Artificial Sequence
  Synthetic polypeptide
TCTDLFSCHCSLNKDLKGFDPGEKYFHNTSWGDVSLWEPSGKKVLLAPSSVSDSAHPRLDLAVPSHQLLWSKSCWPWEFGL

SEQ ID NO: 23179 - protein, 33 aa, Artificial Sequence
  Synthetic polypeptide
TRTLKALIQERNTFITHHGVMFLSGNLLERKCC

SEQ ID NO: 23180 - protein, 70 aa, Artificial Sequence
  Synthetic polypeptide
RKKWDLGSWPAPGLSAPHRHCKSLLSDFRDTGFQGPSLGWSLSNCTLGKGEKQEGVAFTLRSLRKVAVHA

SEQ ID NO: 23181 - protein, 73 aa, Artificial Sequence
  Synthetic polypeptide
KIKERNGILVPGQHPASLHLIDTANPYSVTSGIQVSRVLLSDGACPTALWGRERNRKASPSRSGHSGRWLCMP

SEQ ID NO: 23182 - protein, 40 aa, Artificial Sequence
  Synthetic polypeptide
FNSYLTFTFSSNVLQSGKGRKLKKEMGSWFLASTRPLCTS

SEQ ID NO: 23183 - protein, 70 aa, Artificial Sequence
  Synthetic polypeptide
RKKWDLGSWPAPGLSAPHRHCKSLLSDFRDTVSVTRGEIEVWSYEALTVTSFQTKDFLRNIFLQITPSVT

SEQ ID NO: 23184 - protein, 36 aa, Artificial Sequence
  Synthetic polypeptide
KIKERNGILVPGQHPASLHLIDTANPYSVTSGIQYP

SEQ ID NO: 23185 - protein, 43 aa, Artificial Sequence
  Synthetic polypeptide
GLPSHVELLGRNSEGSLWTVISLGSLKISTSWLCTPTISPTVM

SEQ ID NO: 23186 - protein, 31 aa, Artificial Sequence
  Synthetic polypeptide
EVPFTSHHDSEASPAMWNFWGGIPKVLSGPS

SEQ ID NO: 23187 - protein, 398 aa, Artificial Sequence
  Synthetic polypeptide
ISLMRSDGFIRGFHFHIFLIFFLLPPCKKCLSPPTMILRPPQPCGTFGAEFRRFSLDRHKPGKFEDFYKLVVHTHHISNSDVTIGYADVHGDLLPINNDDNFCKAVSSANPLLRVFIQKREEAERGSLGAGSLCRRRRALGALRDEGPRRRAHLDIGLPRDFRPVSSIIDVDLVPETHRRVRLHRHGCEKPLGFYIRDGASVRVTPHGLEKVPGIFISRMVPGGLAESTGLLAVNDEVLEVNGIEVAGKTLDQVTDMMIANSHNLIVTVKPANQRNNVVRGGRALGSSGPPSDGTAGFVGPPAPRVLQNFHPDEAESDEDNDVVIEGTLEPARPPQTPGAPAGSLSRVNGAGLAQRLQRDLALDGGLQRLLSSLRADPRHSLALPPGGVEEHGPAVTL

SEQ ID NO: 23188 - protein, 129 aa, Artificial Sequence
  Synthetic polypeptide
ISLMRSDGFIRGFHFHIFLIFFLLPPCKKCLSPPTMILRPPQPCGTFGAEFRRFSLDRHKPGKFEDFYKLVVHTHHISNSDVTIGYADVHGDLLPINNDDNFCKAVSSANPLLRVFIQKRDDGALRPGT

SEQ ID NO: 23189 - protein, 6 aa, Artificial Sequence
  Synthetic polypeptide
LQQMMS

SEQ ID NO: 23190 - protein, 1557 aa, Artificial Sequence
  Synthetic polypeptide
STNDELDELRAEMEEMRDSYLEEDVYQLQELRRELDRANKNCRILQYRLRKAEQKSLKVAETGQVDGELIRSLEQDLKVAKDVSVRLHHELKTVEEKRAKAEDENETLRQQMIEVEISKQALQNELERLKESSLKRRSTREMYKEKKTFNQDDSADLRCQLQFAKEEAFLMRKKMAKLGREKDELEQELQKYKSLYGDVDSPLPTGEAGGPPSTREAELKLRLKLVEEEANILGRKIVELEVENRGLKAEMEDMRGQQEREGPGRDHAPSIPTSPFGDSLESSTELRRHLQFVEEEAELLRRSISEIEDHNRQLTHELSKFKFEPPREPGWLGEGASPGAGGGAPLQEELKSARLQISELSGKVLKLQHENHALLSNIQRCDLAAHLGLRAPSPRDSDAESDAGKKESDGEESRLPQPKREGPVGGESDSEEMFEKTSGFGSGKPSEASEPCPTELLKAREDSEYLVTLKHEAQRLERTVERLITDTDSFLHDAGLRGGAPLPGPGLQGEEEQGEGDQQEPQLLGTINAKMKAFKKELQAFLEQVNRIGDGLSPLPHLTESSSFLSTVTSVSRDSPIGNLGKELGPDLQSRLKEQLEWQLGPARGDERESLRLRAARELHRRADGDTGSHGLGGQTCFSLEMEEEHLYALRWKELEMHSLALQNTLHERTWSDEKNLMQQELRSLKQNIFLFYVKLRWLLKHWRQGKQMEEEGEEFTEGEHPETLSRLGELGVQGGHQADGPDHDSDRGCGFPVGEHSPHSRVQIGDHSLRLQTADRGQPHKQVVENQQLFSAFKALLEDFRAELREDERARLRLQQQYASDKAAWDVEWAVLKCRLEQLEEKTENKLGELGSSAESKGALKKEREVHQKLLADSHSLVMDLRWQIHHSEKNWNREKVELLDRLDRDRQEWERQKKEFLWRIEQLQKENSPRRGGSFLCDQKDGNVRPFPHQGSLRMPRPVAMWPCADADSIPFEDRPLSKLKESDRCSASENLYLDALSLDDEPEEPPAHRPEREFRNRLPEEEENHKGNLQRAVSVSSMSEFQRLMDISPFLPEKGLPSTSSKEDVTPPLSPDDLKYIEEFNKSWDYTPNRGHNGGGPDLWADRTEVGRAGHEDSTEPFPDSSWYLTTSVTMTTDTMTSPEHCQKQPLRSHVLTEQSGLRVLHSPPAVRRVDSITAAGGEGPFPTSRARGSPGDTKGGPPEPMLSRWPCTSPRHSRDYVEGARRPLDSPLCTSLGFASPLHSLEMSKNLSDDMKEVAFSVRNAICSGPGELQVKDMACQTNGSRTMGTQTVQTISVGLQTEALRGSGVTSSPHKCLTPKAGGGATPVSSPSRSLRSRQVAPAIEKVQAKFERTCCSPKYGSPKLQRKPLPKADQPNNRTSPGMAQKGYSESAWARSTTTRESPVHTTINDGLSSLFNIIDHSPVVQDPFQKGLRAGSRSRSAEPRPELGPGQETGTNSRGRSPSPIGVGSEMCREEGGEGTPVKQDLSAPPGYTLTENVARILNKKLLEHALKEERRQAAHGPPGLHSDSHSLGDTAEPGPMENQTVLLTAPWGL

SEQ ID NO: 23191 - protein, 1575 aa, Artificial Sequence
  Synthetic polypeptide
KQTGLGLQCGFNLLDVKLWTQDELDELRAEMEEMRDSYLEEDVYQLQELRRELDRANKNCRILQYRLRKAEQKSLKVAETGQVDGELIRSLEQDLKVAKDVSVRLHHELKTVEEKRAKAEDENETLRQQMIEVEISKQALQNELERLKESSLKRRSTREMYKEKKTFNQDDSADLRCQLQFAKEEAFLMRKKMAKLGREKDELEQELQKYKSLYGDVDSPLPTGEAGGPPSTREAELKLRLKLVEEEANILGRKIVELEVENRGLKAEMEDMRGQQEREGPGRDHAPSIPTSPFGDSLESSTELRRHLQFVEEEAELLRRSISEIEDHNRQLTHELSKFKFEPPREPGWLGEGASPGAGGGAPLQEELKSARLQISELSGKVLKLQHENHALLSNIQRCDLAAHLGLRAPSPRDSDAESDAGKKESDGEESRLPQPKREGPVGGESDSEEMFEKTSGFGSGKPSEASEPCPTELLKAREDSEYLVTLKHEAQRLERTVERLITDTDSFLHDAGLRGGAPLPGPGLQGEEEQGEGDQQEPQLLGTINAKMKAFKKELQAFLEQVNRIGDGLSPLPHLTESSSFLSTVTSVSRDSPIGNLGKELGPDLQSRLKEQLEWQLGPARGDERESLRLRAARELHRRADGDTGSHGLGGQTCFSLEMEEEHLYALRWKELEMHSLALQNTLHERTWSDEKNLMQQELRSLKQNIFLFYVKLRWLLKHWRQGKQMEEEGEEFTEGEHPETLSRLGELGVQGGHQADGPDHDSDRGCGFPVGEHSPHSRVQIGDHSLRLQTADRGQPHKQVVENQQLFSAFKALLEDFRAELREDERARLRLQQQYASDKAAWDVEWAVLKCRLEQLEEKTENKLGELGSSAESKGALKKEREVHQKLLADSHSLVMDLRWQIHHSEKNWNREKVELLDRLDRDRQEWERQKKEFLWRIEQLQKENSPRRGGSFLCDQKDGNVRPFPHQGSLRMPRPVAMWPCADADSIPFEDRPLSKLKESDRCSASENLYLDALSLDDEPEEPPAHRPEREFRNRLPEEEENHKGNLQRAVSVSSMSEFQRLMDISPFLPEKGLPSTSSKEDVTPPLSPDDLKYIEEFNKSWDYTPNRGHNGGGPDLWADRTEVGRAGHEDSTEPFPDSSWYLTTSVTMTTDTMTSPEHCQKQPLRSHVLTEQSGLRVLHSPPAVRRVDSITAAGGEGPFPTSRARGSPGDTKGGPPEPMLSRWPCTSPRHSRDYVEGARRPLDSPLCTSLGFASPLHSLEMSKNLSDDMKEVAFSVRNAICSGPGELQVKDMACQTNGSRTMGTQTVQTISVGLQTEALRGSGVTSSPHKCLTPKAGGGATPVSSPSRSLRSRQVAPAIEKVQAKFERTCCSPKYGSPKLQRKPLPKADQPNNRTSPGMAQKGYSESAWARSTTTRESPVHTTINDGLSSLFNIIDHSPVVQDPFQKGLRAGSRSRSAEPRPELGPGQETGTNSRGRSPSPIGVGSEMCREEGGEGTPVKQDLSAPPGYTLTENVARILNKKLLEHALKEERRQAAHGPPGLHSDSHSLGDTAEPGPMENQTVLLTAPWGL

SEQ ID NO: 23192 - protein, 7 aa, Artificial Sequence
  Synthetic polypeptide
SFGHRMS

SEQ ID NO: 23193 - protein, 23 aa, Artificial Sequence
  Synthetic polypeptide
LKADRPGFAVWLQFTRCEALDTG

SEQ ID NO: 23194 - protein, 19 aa, Artificial Sequence
  Synthetic polypeptide
IASASLGRCPCPPCLSSSV

SEQ ID NO: 23195 - protein, 20 aa, Artificial Sequence
  Synthetic polypeptide
KLPGFESLLPPWGGVRVLHV

SEQ ID NO: 23196 - protein, 535 aa, Artificial Sequence
  Synthetic polypeptide
NCLGLNRFCLLGAVSVSSMSEFQRLMDISPFLPEKGLPSTSSKEDVTPPLSPDDLKYIEEFNKSWDYTPNRGHNGGGPDLWADRTEVGRAGHEDSTEPFPDSSWYLTTSVTMTTDTMTSPEHCQKQPLRSHVLTEQSGLRVLHSPPAVRRVDSITAAGGEGPFPTSRARGSPGDTKGGPPEPMLSRWPCTSPRHSRDYVEGARRPLDSPLCTSLGFASPLHSLEMSKNLSDDMKEVAFSVRNAICSGPGELQVKDMACQTNGSRTMGTQTVQTISVGLQTEALRGSGVTSSPHKCLTPKAGGGATPVSSPSRSLRSRQVAPAIEKVQAKFERTCCSPKYGSPKLQRKPLPKADQPNNRTSPGMAQKGYSESAWARSTTTRESPVHTTINDGLSSLFNIIDHSPVVQDPFQKGLRAGSRSRSAEPRPELGPGQETGTNSRGRSPSPIGVGSEMCREEGGEGTPVKQDLSAPPGYTLTENVARILNKKLLEHALKEERRQAAHGPPGLHSDSHSLGDTAEPGPMENQTVLLTAPWGL

SEQ ID NO: 23197 - protein, 600 aa, Artificial Sequence
  Synthetic polypeptide
NCLGLNRFCLLGAVSVSSMSEFQRLMDISPFLPEKGLPSTSSKEDVTPPLSPDDLKYIEEFNKSWDYTPNRGHNGGGPDLWADRTEVGRAGHEDSTEPFPDSSWYLTTSVTMTTDTMTSPEHCQKQPLRSHVLTEQSGLRVLHSPPAVRRVDSITAAGGEGPFPTSRARGSPGDTKGGPPEPMLSRWPCTSPRHSRDYVEGARRPLDSPLCTSLGFASPLHSLEMSKNLSDDMKEVAFSVRNAICSGPGELQVKDMACQTNGSRTMGTQTVQTISVGLQTEALRGSGVTSSPHKCLTPKAGGGATPVSSPSRSLRSRQVAPAIEKVQAKFERTCCSPKYGSPKLQRKPLPKADQPNNRTSPGMAQKGYSESAWARSTTTRESPVHTTINDGLSSLFNIIDHSPVVQDPFQKGLRAGSRSRSAEPRPELGPGQETGTNSRGRSPSPIGVGSEMCREEGGEGTPVKQDLSAPPGYTLTENVARILNKKLLEHALKEERRQAAHGPPGLHSDSHSLGDTAEPGPMEELPCSALAPSLEPCFSRPERPANRRPPSRWAPHSPTASQPQSPGDPTSLEEHGGEEPPEEQPHRDASLHGLSQYNSL

SEQ ID NO: 23198 - protein, 24 aa, Artificial Sequence
  Synthetic polypeptide
ANETRRLLEEHLGHFRGKTCKEFA

SEQ ID NO: 23199 - protein, 247 aa, Artificial Sequence
  Synthetic polypeptide
PMRQEGCWRNIWDTLEGRHVRNLHKTVMQNGAGGALFVHRDTPENNPDTPFDFTPENYKRIEAIVKNYPEGHKAAAVLPVLDLAQRQNGWLPISAMNKVAEVLQVPPMRVYEVATFYTMYNRKPVGKYHIQVCTTTPCMLRNSDSILEAIQKKLGIKVGETTPDKLFTLIEVECLGACVNAPMVQINDNYYEDLTAKDIEEIIDELKAGKIPKPGPRSGRFSCEPAGGLTSLTEPPKGPGFGVQAGL

SEQ ID NO: 23200 - protein, 244 aa, Artificial Sequence
  Synthetic polypeptide
WHMPVISATWEAEGRHVRNLHKTVMQNGAGGALFVHRDTPENNPDTPFDFTPENYKRIEAIVKNYPEGHKAAAVLPVLDLAQRQNGWLPISAMNKVAEVLQVPPMRVYEVATFYTMYNRKPVGKYHIQVCTTTPCMLRNSDSILEAIQKKLGIKVGETTPDKLFTLIEVECLGACVNAPMVQINDNYYEDLTAKDIEEIIDELKAGKIPKPGPRSGRFSCEPAGGLTSLTEPPKGPGFGVQAGL

SEQ ID NO: 23201 - protein, 11 aa, Artificial Sequence
  Synthetic polypeptide
SQLLGRLREDM

SEQ ID NO: 23202 - protein, 26 aa, Artificial Sequence
  Synthetic polypeptide
CGMACSPPLGTSKDKIASYSKTPKIE

SEQ ID NO: 23203 - protein, 74 aa, Artificial Sequence
  Synthetic polypeptide
PIPSLLTLLHTFFPVETTVKALAHISPFFFYLLTNHPGTSLCGLEWHDVAWHAPHPLELVKTRLHPTAKLQKLN

SEQ ID NO: 23204 - protein, 2021 aa, Artificial Sequence
  Synthetic polypeptide
CGMACSPPLGTSKDKIASYSKTPKIERSDVSKEMKEKSSMKRKLPFTISPSRNEERDSDTEKEGPEKKKTKKEAGNKKSTPVSILFGYPLSERKQMALLMQMTARDNSPDSTPNHPSQTTPAQKKTPSSSSRQKDKVNKRNERGETPLHMAAIRGDVKQVKELISLGANVNVKDFAGWTPLHEACNVGYYDVAKILIAAGADVNTQGLDDDTPLHDSASSGHRDIVKLLLRHGGNPFQANKHGERPVDVAETEELELLLKREVPLSDDDESYTDSEEAQSVNPSSVDENIDSETEKDSLICESKQILPSKTPLPSALDEYEFKDDDDEEINKMIDDRHILRKEQRKENEPEAEKTHLFAKQEKAFYPKSFKSKKQKPSRVLYSSTESSDEEALQNKKISTSCSVIPETSNSDMQTKKEYVVSGEHKQKGKVKRKLKNQNKNKENQELKQEKEGKENTRITNLTVNTGLDCSEKTREEGNFRKSFSPKDDTSLHLFHISTGKSPKHSCGLSEKQSTPLKQEHTKTCLSPGSSEMSLQPDLVRYDNTESEFLPESSSVKSCKHKEKSKHQKDFHLEFGEKSNAKIKDEDHSPTFENSDCTLKKMDKEGKTLKKHKLKHKEREKEKHKKEIEGEKEKYKTKDSAKELQRSVEFDREFWKENFFKSDETEDLFLNMEHESLTLEKKSKLEKNIKDDKSTKEKHVSKERNFKEERDKIKKESEKSFREEKIKDLKEERENIPTDKDSEFTSLGMSAIEESIGLHLVEKEIDIEKQEKHIKESKEKPEKRSQIKEKDIEKMERKTFEKEKKIKHEHKSEKDKLDLSECVDKIKEKDKLYSHHTEKCHKEGEKSKNTAAIKKTDDREKSREKMDRKHDKEKPEKERHLAESKEKHLMEKKNKQSDNSEYSKSEKGKNKEKDRELDKKEKSRDKESINITNSKHIQEEKKSSIVDGNKAQHEKPLSLKEKTKDEPLKTPDGKEKDKKDKDIDRYKERDKHKDKIQINSLLKLKSEADKPKPKSSPASKDTRPKEKRLVNDDLMQTSFERMLSLKDLEIEQWHKKHKEKIKQKEKERLRNRNCLELKIKDKEKTKHTPTESKNKELTRSKSSEVTDAYTKEKQPKDAVSNRSQSVDTKNVMTLGKSSFVSDNSLNRSPRSENEKPGLSSRSVSMISVASSEDSCHTTVTTPRPPVEYDSDFMLESSESQMSFSQSPFLSIAKSPALHERELDSLADLPERIKPPYANRLSTSHLRSSSVEDVKLIISEGRPTIEVRRCSMPSVICEHTKQFQTISEESNQGSLLTVPGDTSPSPKPEVFSNVPERDLSNVSNIHSSFATSPTGASNSKYVSADRNLIKNTAPVNTVMDSPVHLEPSSQVGVIQNKSWEMPVDRLETLSTRDFICPNSNIPDQESSLQSFCNSENKVLKENADFLSLRQTELPGNSCAQDPASFMPPQQPCSFPSQSLSDAESISKHMSLSYVANQEPGILQQKNAVQIISSALDTDNESTKDTENTFVLGDVQKTDAFVPVYSDSTIQEASPNFEKAYTLPVLPSEKDFNGSDASTQLNTHYAFSKLTYKSSSGHEVENSTTDTQVISHEKENKLESLVLTHLSRCDSDLCEMNAGMPKGNLNEQDPKHCPESEKCLLSIEDEESQQSILSSLENHSQQSTQPEMHKYGQLVKVELEENAEDDKTENQIPQRMTRNKANTMANQSKQILASCTLLSEKDSESSSPRGRIRLTEDDDPQIHHPRKRKVSRVPQPVQVSPSLLQAKEKTQQSLAAIVDSLKLDEIQPYSSERANPYFEYLHIRKKIEEKRKLLCSVIPQAPQYYDEYVTFNGSYLLDGNPLSKICIPTITPPPSLSDPLKELFRQQEVVRMKLRLQHSIEREKLIVSNEQEVLRVHYRAARTLANQTLPFSACTVLLDAEVYNVPLDSQSDDSKTSVRDRFNARQFMSWLQDVDDKFDKLKTCLLMRQQHEAAALNAVQRLEWQLKLQELDPATYKSISIYEIQEFYVPLVDVNDDFELTPI

SEQ ID NO: 23205 - protein, 77 aa, Artificial Sequence
  Synthetic polypeptide
PIPSLLTLLHTFFPVETTVKALAHISPFFFYLLTNHPGTSLCGLEWHDVAWHAPHPLELVKTRLHPTAKLQKLNEVM

SEQ ID NO: 23206 - protein, 2044 aa, Artificial Sequence
  Synthetic polypeptide
CGMACSPPLGTSKDKIASYSKTPKIERSDVSKEMKEKSSMKRKLPFTISPSRNEERDSDTDSDPGHTSENWGERLISSYRTYSEKEGPEKKKTKKEAGNKKSTPVSILFGYPLSERKQMALLMQMTARDNSPDSTPNHPSQTTPAQKKTPSSSSRQKDKVNKRNERGETPLHMAAIRGDVKQVKELISLGANVNVKDFAGWTPLHEACNVGYYDVAKILIAAGADVNTQGLDDDTPLHDSASSGHRDIVKLLLRHGGNPFQANKHGERPVDVAETEELELLLKREVPLSDDDESYTDSEEAQSVNPSSVDENIDSETEKDSLICESKQILPSKTPLPSALDEYEFKDDDDEEINKMIDDRHILRKEQRKENEPEAEKTHLFAKQEKAFYPKSFKSKKQKPSRVLYSSTESSDEEALQNKKISTSCSVIPETSNSDMQTKKEYVVSGEHKQKGKVKRKLKNQNKNKENQELKQEKEGKENTRITNLTVNTGLDCSEKTREEGNFRKSFSPKDDTSLHLFHISTGKSPKHSCGLSEKQSTPLKQEHTKTCLSPGSSEMSLQPDLVRYDNTESEFLPESSSVKSCKHKEKSKHQKDFHLEFGEKSNAKIKDEDHSPTFENSDCTLKKMDKEGKTLKKHKLKHKEREKEKHKKEIEGEKEKYKTKDSAKELQRSVEFDREFWKENFFKSDETEDLFLNMEHESLTLEKKSKLEKNIKDDKSTKEKHVSKERNFKEERDKIKKESEKSFREEKIKDLKEERENIPTDKDSEFTSLGMSAIEESIGLHLVEKEIDIEKQEKHIKESKEKPEKRSQIKEKDIEKMERKTFEKEKKIKHEHKSEKDKLDLSECVDKIKEKDKLYSHHTEKCHKEGEKSKNTAAIKKTDDREKSREKMDRKHDKEKPEKERHLAESKEKHLMEKKNKQSDNSEYSKSEKGKNKEKDRELDKKEKSRDKESINITNSKHIQEEKKSSIVDGNKAQHEKPLSLKEKTKDEPLKTPDGKEKDKKDKDIDRYKERDKHKDKIQINSLLKLKSEADKPKPKSSPASKDTRPKEKRLVNDDLMQTSFERMLSLKDLEIEQWHKKHKEKIKQKEKERLRNRNCLELKIKDKEKTKHTPTESKNKELTRSKSSEVTDAYTKEKQPKDAVSNRSQSVDTKNVMTLGKSSFVSDNSLNRSPRSENEKPGLSSRSVSMISVASSEDSCHTTVTTPRPPVEYDSDFMLESSESQMSFSQSPFLSIAKSPALHERELDSLADLPERIKPPYANRLSTSHLRSSSVEDVKLIISEGRPTIEVRRCSMPSVICEHTKQFQTISEESNQGSLLTVPGDTSPSPKPEVFSNVPERDLSNVSNIHSSFATSPTGASNSKYVSADRNLIKNTAPVNTVMDSPVHLEPSSQVGVIQNKSWEMPVDRLETLSTRDFICPNSNIPDQESSLQSFCNSENKVLKENADFLSLRQTELPGNSCAQDPASFMPPQQPCSFPSQSLSDAESISKHMSLSYVANQEPGILQQKNAVQIISSALDTDNESTKDTENTFVLGDVQKTDAFVPVYSDSTIQEASPNFEKAYTLPVLPSEKDFNGSDASTQLNTHYAFSKLTYKSSSGHEVENSTTDTQVISHEKENKLESLVLTHLSRCDSDLCEMNAGMPKGNLNEQDPKHCPESEKCLLSIEDEESQQSILSSLENHSQQSTQPEMHKYGQLVKVELEENAEDDKTENQIPQRMTRNKANTMANQSKQILASCTLLSEKDSESSSPRGRIRLTEDDDPQIHHPRKRKVSRVPQPVQVSPSLLQAKEKTQQSLAAIVDSLKLDEIQPYSSERANPYFEYLHIRKKIEEKRKLLCSVIPQAPQYYDEYVTFNGSYLLDGNPLSKICIPTITPPPSLSDPLKELFRQQEVVRMKLRLQHSIEREKLIVSNEQEVLRVHYRAARTLANQTLPFSACTVLLDAEVYNVPLDSQSDDSKTSVRDRFNARQFMSWLQDVDDKFDKLKTCLLMRQQHEAAALNAVQRLEWQLKLQELDPATYKSISIYEIQEFYVPLVDVNDDFELTPI

SEQ ID NO: 23207 - protein, 64 aa, Artificial Sequence
  Synthetic polypeptide
CGMACSPPLGTSKDKIASYSKTPKIERSDVSKEMKEKSSMKRKLPFTISPSRNEERDSDTELTG

SEQ ID NO: 23208 - protein, 292 aa, Artificial Sequence
  Synthetic polypeptide
CGMACSPPLGTSKDKIASYSKTPKIERSDVSKEMKEKSSMKRKLPFTISPSRNEERDSDTEKEGPEKKKTKKEAGNKKSTPVSILFGYPLSERKQMALLMQMTARDNNSTPNHPSQTTPAQKKTPSSSSRQKDKVNKRNERGETPLHMAAIRGDVKQVKELISLGANVNVKDFAGWTPLHEACNVGYYDVAKILIAAGADVNTQGLDDDTPLHDSASSGHRDIVKLLLRHGGNPFQANKHGERPVDVAETEELELLLKREVPLSDDDESYTDSEEAQSVNPSSVDENIDSET

SEQ ID NO: 23209 - protein, 7 aa, Artificial Sequence
  Synthetic polypeptide
APSPVRL

SEQ ID NO: 23210 - protein, 16 aa, Artificial Sequence
  Synthetic polypeptide
TPGKRASPPELRLLSD

SEQ ID NO: 23211 - protein, 25 aa, Artificial Sequence
  Synthetic polypeptide
EPGHIEGGEHQASERHRLSSVSCQI

SEQ ID NO: 23212 - protein, 11 aa, Artificial Sequence
  Synthetic polypeptide
APSPVRRTFTS

SEQ ID NO: 23213 - protein, 114 aa, Artificial Sequence
  Synthetic polypeptide
TPGKRASPPELRLLSEELSHHENLVSFLETVNQPHHQNVSVPSNNVHAPYSSDKEHMCTVVYFDDCMSIHQCKISCESMGASKYRWFHNACCECIGPECIDYGSKTVKCMNCMF

SEQ ID NO: 23214 - protein, 36 aa, Artificial Sequence
  Synthetic polypeptide
EPGHIEGGEHQASERHRLSSVSCQKNFHIMRIWFHF

SEQ ID NO: 23215 - protein, 75 aa, Artificial Sequence
  Synthetic polypeptide
TPGKRASPPELRLLSEELSHHENLVSFLETVNQPHHQNVSVPSNNVHAPYSSDKGNCQQLTFSIPPPHVVCPCNL

SEQ ID NO: 23216 - protein, 38 aa, Artificial Sequence
  Synthetic polypeptide
GWAHGSHRTLGLGNQASCVDLSRITLTTTSALLLGHLL

SEQ ID NO: 23217 - protein, 25 aa, Artificial Sequence
  Synthetic polypeptide
AGRMAHTGHWGWEIKHRVSICPGSL

SEQ ID NO: 23218 - protein, 189 aa, Artificial Sequence
  Synthetic polypeptide
MGAWLTPDTGVGKSSIVCRFVQDHFDHNISPTIGASFMTKTVPCGNELHKFLIWDTAGQERFHSLAPMYYRGSAAAVIVYDITKQDSFYTLKKWVKELKEHGPENIVMAIAGNKCDLSDIREVPLKDAKEYAESIGAIVVETSAKNAINIEELFQGISRQIPPLDPHENGNNGTIKVEKPTMQASRRCC

SEQ ID NO: 23219 - protein, 68 aa, Artificial Sequence
  Synthetic polypeptide
MGAWLTPDTGVGKSSIVCRFVQDHFDHNISPTIGASFMTKTVPCGNELHKFLIWDTAGQERGGSPEGC

SEQ ID NO: 23220 - protein, 70 aa, Artificial Sequence
  Synthetic polypeptide
LEDLSHFDTEKHPHFPVQDEGLRLRKVAHSDKPGSTSTASFRDNVTSPLPSLLVVIAAIFIGFFLGKFIL

SEQ ID NO: 23221 - protein, 17 aa, Artificial Sequence
  Synthetic polypeptide
VILTQRSTLIFQSRMKV

SEQ ID NO: 23222 - protein, 11 aa, Artificial Sequence
  Synthetic polypeptide
HREAPSFSSPG

SEQ ID NO: 23223 - protein, 90 aa, Artificial Sequence
  Synthetic polypeptide
GQLRPHTWLSIRSTRRYEAGPGHSGSGDLPPATDRSQPTHVSTCPGRPYPCCGPAVCLLLLRPRLVAPRAPAEGGIPVPEMPEALRASAS

SEQ ID NO: 23224 - protein, 27 aa, Artificial Sequence
  Synthetic polypeptide
QVCPPLRAAMRTTEATHLALNKIHQKI

SEQ ID NO: 23225 - protein, 17 aa, Artificial Sequence
  Synthetic polypeptide
GQLRPHTWLSIRSTRRY

SEQ ID NO: 23226 - protein, 56 aa, Artificial Sequence
  Synthetic polypeptide
GQLRPHTWLSIRSTRRYEAGPGHSGSGDLPPATDRSQPTHVSTCPGRPYPCCGPAV

SEQ ID NO: 23227 - protein, 155 aa, Artificial Sequence
  Synthetic polypeptide
GQLRPHTWLSIRSTRRYEAGPGHSEANLRMFQRAQDDLIPAVDRQFACSSCDHVWWRRVPQRKEVSRCRKCRKRYEPVPADKMWGLAEFHCPKCRHNFRTHTHSCSAADCYNRREPHVPGTSCAHPKSRKQNHLPKVLHPSNPHISSGSTVATCL

SEQ ID NO: 23228 - protein, 40 aa, Artificial Sequence
  Synthetic polypeptide
PRSLIHSSEIRKTLKTGFLLAPSGPAATPTGACGSGPSCG

SEQ ID NO: 23229 - protein, 245 aa, Artificial Sequence
  Synthetic polypeptide
KPDSYSPLLVLPPPPLVPVVPVRLVGSTSDTSRMLDPAPEPQRDQTQRQQEPMASPMPAGHPAVPTKPVGPWQDCAEARQAGHEQSGVYELRAGFGRPDGEYWLGLEPVYQLTSRGDHELLVLLEDWGGRGARAHYDGFSLEPESDHYRLRLGQYHGDAGDSLSWHNDKPFSTVDRDRDSYSGNCALYQRGGWWYHACAHSNLNGVWHHGGHYRSRYQDGVYWAEFRGGAYSLRKAAMLIRPLKL

SEQ ID NO: 23230 - protein, 117 aa, Artificial Sequence
  Synthetic polypeptide
NPQNPENRIPTRPFWSCRHPHWCLWFRSVLWVAPVTPVGCWTQPQSPRETRPRDSRSPWLLPCLQVTLRSPPSLWARGRIVQRPARQAMNRVECMNCERALGGQTENTGWALNPCIS

SEQ ID NO: 23231 - protein, 285 aa, Artificial Sequence
  Synthetic polypeptide
KPDSYSPLLVLPPPPLVPVVPVRLVGSTSDTSRMLDPAPEPQRDQTQRQQEPMASPMPAGHPAVPTKPVGPWQDCAEARQAGHEQSGVYELRVGRHVVSVWCEQQLEGGGWTVIQRRQDGSVNFFTTWQHYKAGFGRPDGEYWLGLEPVYQLTSRGDHELLVLLEDWGGRGARAHYDGFSLEPESDHYRLRLGQYHGDAGDSLSWHNDKPFSTVDRDRDSYSGNCALYQRGGWWYHACAHSNLNGVWHHGGHYRSRYQDGVYWAEFRGGAYSLRKAAMLIRPLKL

SEQ ID NO: 23232 - protein, 102 aa, Artificial Sequence
  Synthetic polypeptide
NPQNPENRIPTRPFWSCRHPHWCLWFRSVLWVAPVTPVGCWTQPQSPRETRPRDSRSPWLLPCLQVTLRSPPSLWARGRIVQRPARQAMNRVECMNCEWAVT

SEQ ID NO: 23233 - protein, 14 aa, Artificial Sequence
  Synthetic polypeptide
SRLLGRLRFVRRTR

SEQ ID NO: 23234 - protein, 484 aa, Artificial Sequence
  Synthetic polypeptide
NPVFTKNRKISRIWCCVPVVPATREAEVRKKNSLKDCVAVAGPLGVTHFLILSKTETNVYFKLMRLPGGPTLTFQVKKYSLVRDVVSSLRRHRMHEQQFAHPPLLVLNSFGPHGMHVKLMATMFQNLFPSINVHKVNLNTIKRCLLIDYNPDSQELDFRHYSIKVVPVGASRGMKKLLQEKFPNMSRLQDISELLATGAGLSESEAEPDGDHNITELPQAVAGRGNMRAQQSAVRLTEIGPRMTLQLIKVQEGVGEGKVMFHSFVSKTEEELQAILEAKEKKLRLKAQRQAQQAQNVQRKQEQREAHRKKSLEGMKKARVGGSDEEASGIPSRTASLELGEDDDEQEDDDIEYFCQAVGEAPSEDLFPEAKQKRLAKSPGRKRKRWEMDRGRGRLCDQKFPKTKDKSQGAQVPSPALPTSWQLPTTNSVGSRGTSCGPYWWLSSWWPWPAMAWPCTASASGSSAHGTPPWSSLSSWQSATCSAP

SEQ ID NO: 23235 - protein, 437 aa, Artificial Sequence
  Synthetic polypeptide
NPVFTKNRKISRIWCCVPVVPATREAEVRKKNSLKDCVAVAGPLGVTHFLILSKTETNVYFKLMRLPGGPTLTFQVKKYSLVRDVVSSLRRHRMHEQQFAHPPLLVLNSFGPHGMHVKLMATMFQNLFPSINVHKVNLNTIKRCLLIDYNPDSQELDFRHYSIKVVPVGASRGMKKLLQEKFPNMSRLQDISELLATGAGLSESEAEPDGDHNITELPQAVAGRGNMRAQQSAVRLTEIGPRMTLQLIKVQEGVGEGKVMFHSFVSKTEEELQAILEAKEKKLRLKAQRQAQQAQNVQRKQEQREAHRKKSLEGMKKARVGGSDEEASGIPSRTASLELGEDDDEQEDDDIEYFCQAVGEAPSEDLFPEAKQKRLAKSPGRKRKRWEMDRGRGRLCDQKFPKTKDKSQGAQARRGPRGASRDGGRGRGRGRPGKRVA

SEQ ID NO: 23236 - protein, 758 aa, Artificial Sequence
  Synthetic polypeptide
NPVFTKNRKISRIWCCVPVVPATREAEVRKKNSLKDCVAVAGPLGVTHFLILSKTETNVYFKLMRLPGGPTLTFQVKKYSLVRDVVSSLRRHRMHEQQFAHPPLLVLNSFGPHGMHVKLMATMFQNLFPSINVHKVNLNTIKRCLLIDYNPDSQELDFRHYSIKVVPVGASRGMKKLLQEKFPNMSRLQDISELLATGAGLSESEAEPDGDHNITELPQAVAGRGNMRAQQSAVRLTEIGPRMTLQLIKVQEGVGEGKVMFHSFVSKTEEELQAILEAKEKKLRLKAQRQAQQAQNVQRKQEQREAHRKKSLEGMKKARVGGSDEEASGIPSRTASLELGEDDDEQEDDDIEYFCQAVGEAPSEDLFPEAKQKRLAKSPGRKRKRWEMDRGAKSCPANFLAAADDKLSGFQGDFLWPILVVEFLVAVASNGLALYRFSIRKQRPWHPAVVFSVQLAVSDLLCALTLPPLAAYLYPPKHWRYGEAACRLERFLFTCNLLGSVIFITCISLNRYLGIVHPFFARSHLRPKHAWAVSAAGWVLAALLAMPTLSFSHLKRPQQGAGNCSVARPEACIKCLGTADHGLAAYRAYSLVLAGLGCGLPLLLTLAAYGALGRAVLRSPGMTVAEKLRVAALVASGVALYASSYVPYHIMRVLNVDARRRWSTRCPSFADIAQATAALELGPYVGYQVMRGLMPLAFCVHPLLYMAAVPSLGCCCRHCPGYRDSWNPEDAKSTGQALPLNATAAPKPSEPQSRELSQ

SEQ ID NO: 23237 - protein, 236 aa, Artificial Sequence
  Synthetic polypeptide
NPVFTKNRKISRIWCCVPVVPATREAEVRKKNSLKDCVAVAGPLGVTHFLILSKTETNVYFKLMRLPGGPTLTFQVKKYSLVRDVVSSLRRHRMHEQQFAHPPLLVLNSFGPHGMHVKLMATMFQNLFPSINVHKVNLNTIKRCLLIDYNPDSQELDFRHYSIKVVPVGASRGMKKLLQEKFPNMSRLQDISELLATGAGLSESEAEPDGDHNITELPQAVAGRGNMRAQQSAVRL

SEQ ID NO: 23238 - protein, 123 aa, Artificial Sequence
  Synthetic polypeptide
NPVFTKNRKISRIWCCVPVVPATREAEVRKKNSLKDCVAVAGPLGVTHFLILSKTETNVYFKLMRLPGGPTLTFQVKKYSLVRDVVSSLRRHRMHEQQFAHPPLLVLNSFGPHGMHVKLMATM

SEQ ID NO: 23239 - protein, 37 aa, Artificial Sequence
  Synthetic polypeptide
GQARWRTPVIPALWEAEASLTRCGPSRCGTLRPRRSG

SEQ ID NO: 23240 - protein, 10 aa, Artificial Sequence
  Synthetic polypeptide
SQHFGRPRHL

SEQ ID NO: 23241 - protein, 474 aa, Artificial Sequence
  Synthetic polypeptide
PGTVAHACNPSTLGGRGISDTLWAIEMWDPAAQAFRLNNPGSTVFTEDCNILLKLVMAGETTNSRGQRLPQKGDVEMLCGGPPCQGFSGMNRFNSRTYSKFKNSLVVSFLSYCDYYRPRFFLLENVRNFVSFKRSMVLKLTLRCLVRMGYQCTFGVLQAGQYGVAQTRRRAIILAAAPGEKLPLFPEPLHVFAPRACQLSVVVDDKKFVSNITRLSSGPFRTITVRDTMSDLPEVRNGASALEISYNGEPQSWFQRQLRGAQYQPILRDHICKDMSALVAARMRHIPLAPGSDWRDLPNIEVRLSDGTMARKLRYTHHDRKNGRSSSGALRGVCSCVEAGKACDPAARQFNTLIPWCLPHTGNRHNHWAGLYGRLEWDGFFSTTVTNPEPMGKQGRVLHPEQHRVVSVRECARSQGFPDTYRLFGNILDKHRQVGNAVPPPLAKAIGLEIKLCMLAKARESASAKIKEEEAAKD

SEQ ID NO: 23242 - protein, 477 aa, Artificial Sequence
  Synthetic polypeptide
PGTVAHACNPSTLGGRGISDTLWAIEMWDPAAQAFRLNNPGSTVFTEDCNILLKLVMAGETTNSRGQRLPQKGDVEMLCGGPPCQGFSGMNRFNSRTYSKFKNSLVVSFLSYCDYYRPRFFLLENVRNFVSFKRSMVLKLTLRCLVRMGYQCTFGVLQAGQYGVAQTRRRAIILAAAPGEKLPLFPEPLHVFAPRACQLSVVVDDKKFVSNITRLSSGPFRTITVRDTMSDLPEVRNGASALEISYNGEPQSWFQRQLRGAQYQPILRDHICKDMSALVAARMRHIPLAPGSDWRDLPNIEVRLSDGTMARKLRYTHHDRKNGRSSSGALRGVCSCVEGGSSGKACDPAARQFNTLIPWCLPHTGNRHNHWAGLYGRLEWDGFFSTTVTNPEPMGKQGRVLHPEQHRVVSVRECARSQGFPDTYRLFGNILDKHRQVGNAVPPPLAKAIGLEIKLCMLAKARESASAKIKEEEAAKD

SEQ ID NO: 23243 - protein, 20 aa, Artificial Sequence
  Synthetic polypeptide
GWARWLMPVILALWEAECVL

SEQ ID NO: 23244 - protein, 1211 aa, Artificial Sequence
  Synthetic polypeptide
HFGRPSVYCKHGHLCPIDTGLIEKNIELFFSGSAKPIYDDDPSLEGGVNGKNLGPINEWWITGFDGGEKALIGFSTSFAEYILMDPSPEYAPIFGLMQEKIYISKIVVEFLQSNSDSTYEDLINKIETTVPPSGLNLNRFTEDSLLRHAQFVVEQVESYDEAGDSDEQPIFLTPCMRDLIKLAGVTLGQRRAQARRQTIRHSTREKDRGPTKATTTKLVYQIFDTFFAEQIEKDDREDKENAFKRRRCGVCEVCQQPECGKCKACKDMVKFGGSGRSKQACQERRCPNMAMKEADDDEEVDDNIPEMPSPKKMHQGKKKKQNKNRISWVGEAVKTDGKKSYYKKVCIDAETLEVGDCVSVIPDDSSKPLYLARVTALWEDSSNGQMFHAHWFCAGTDTVLGATSDPLELFLVDECEDMQLSYIHSKVKVIYKAPSENWAMEGGMDPESLLEGDDGKTYFYQLWYDQDYARFESPPKTQPTEDNKFKFCVSCARLAEMRQKEIPRVLEQLEDLDSRVLYYSATKNGILYRVGDGVYLPPEAFTFNIKLSSPVKRPRKEPVDEDLYPEHYRKYSDYIKGSNLDAPEPYRIGRIKEIFCPKKSNGRPNETDIKIRVNKFYRPENTHKSTPASYHADINLLYWSDEEAVVDFKAVQGRCTVEYGEDLPECVQVYSMGGPNRFYFLEAYNAKSKSFEDPPNHARSPGNKGKGKGKGKGKPKSQACEPSEPEIEIKLPKLRTLDVFSGCGGLSEGFHQAGISDTLWAIEMWDPAAQAFRLNNPGSTVFTEDCNILLKLVMAGETTNSRGQRLPQKGDVEMLCGGPPCQGFSGMNRFNSRTYSKFKNSLVVSFLSYCDYYRPRFFLLENVRNFVSFKRSMVLKLTLRCLVRMGYQCTFGVLQAGQYGVAQTRRRAIILAAAPGEKLPLFPEPLHVFAPRACQLSVVVDDKKFVSNITRLSSGPFRTITVRDTMSDLPEVRNGASALEISYNGEPQSWFQRQLRGAQYQPILRDHICKDMSALVAARMRHIPLAPGSDWRDLPNIEVRLSDGTMARKLRYTHHDRKNGRSSSGALRGVCSCVEAGKACDPAARQFNTLIPWCLPHTGNRHNHWAGLYGRLEWDGFFSTTVTNPEPMGKQGRVLHPEQHRVVSVRECARSQGFPDTYRLFGNILDKHRQVGNAVPPPLAKAIGLEIKLCMLAKARESASAKIKEEEAAKD

SEQ ID NO: 23245 - protein, 66 aa, Artificial Sequence
  Synthetic polypeptide
MGAVAHACNPSTLGGRVCTVSTVTCVPSTPASSRRISNSSFLVQQNQSMMMTHLLKVVLMAKILAP

SEQ ID NO: 23246 - protein, 1214 aa, Artificial Sequence
  Synthetic polypeptide
HFGRPSVYCKHGHLCPIDTGLIEKNIELFFSGSAKPIYDDDPSLEGGVNGKNLGPINEWWITGFDGGEKALIGFSTSFAEYILMDPSPEYAPIFGLMQEKIYISKIVVEFLQSNSDSTYEDLINKIETTVPPSGLNLNRFTEDSLLRHAQFVVEQVESYDEAGDSDEQPIFLTPCMRDLIKLAGVTLGQRRAQARRQTIRHSTREKDRGPTKATTTKLVYQIFDTFFAEQIEKDDREDKENAFKRRRCGVCEVCQQPECGKCKACKDMVKFGGSGRSKQACQERRCPNMAMKEADDDEEVDDNIPEMPSPKKMHQGKKKKQNKNRISWVGEAVKTDGKKSYYKKVCIDAETLEVGDCVSVIPDDSSKPLYLARVTALWEDSSNGQMFHAHWFCAGTDTVLGATSDPLELFLVDECEDMQLSYIHSKVKVIYKAPSENWAMEGGMDPESLLEGDDGKTYFYQLWYDQDYARFESPPKTQPTEDNKFKFCVSCARLAEMRQKEIPRVLEQLEDLDSRVLYYSATKNGILYRVGDGVYLPPEAFTFNIKLSSPVKRPRKEPVDEDLYPEHYRKYSDYIKGSNLDAPEPYRIGRIKEIFCPKKSNGRPNETDIKIRVNKFYRPENTHKSTPASYHADINLLYWSDEEAVVDFKAVQGRCTVEYGEDLPECVQVYSMGGPNRFYFLEAYNAKSKSFEDPPNHARSPGNKGKGKGKGKGKPKSQACEPSEPEIEIKLPKLRTLDVFSGCGGLSEGFHQAGISDTLWAIEMWDPAAQAFRLNNPGSTVFTEDCNILLKLVMAGETTNSRGQRLPQKGDVEMLCGGPPCQGFSGMNRFNSRTYSKFKNSLVVSFLSYCDYYRPRFFLLENVRNFVSFKRSMVLKLTLRCLVRMGYQCTFGVLQAGQYGVAQTRRRAIILAAAPGEKLPLFPEPLHVFAPRACQLSVVVDDKKFVSNITRLSSGPFRTITVRDTMSDLPEVRNGASALEISYNGEPQSWFQRQLRGAQYQPILRDHICKDMSALVAARMRHIPLAPGSDWRDLPNIEVRLSDGTMARKLRYTHHDRKNGRSSSGALRGVCSCVEGGSSGKACDPAARQFNTLIPWCLPHTGNRHNHWAGLYGRLEWDGFFSTTVTNPEPMGKQGRVLHPEQHRVVSVRECARSQGFPDTYRLFGNILDKHRQVGNAVPPPLAKAIGLEIKLCMLAKARESASAKIKEEEAAKD

SEQ ID NO: 23247 - protein, 28 aa, Artificial Sequence
  Synthetic polypeptide
GQVWWLAPVIPALWEAESCQTEARRKRT

SEQ ID NO: 23248 - protein, 1331 aa, Artificial Sequence
  Synthetic polypeptide
SQHFGRLRAAKRRPEEKEPEKVNPQISDEKDEDEKEEKRRKTTPKEPTEKKMARAKTVMNSKTHPPKCIQCGQYLDDPDLKYGQHPPDAVDEPQMLTNEKLSIFDANESGFESYEALPQHKLTCFSVYCKHGHLCPIDTGLIEKNIELFFSGSAKPIYDDDPSLEGGVNGKNLGPINEWWITGFDGGEKALIGFSTSFAEYILMDPSPEYAPIFGLMQEKIYISKIVVEFLQSNSDSTYEDLINKIETTVPPSGLNLNRFTEDSLLRHAQFVVEQVESYDEAGDSDEQPIFLTPCMRDLIKLAGVTLGQRRAQARRQTIRHSTREKDRGPTKATTTKLVYQIFDTFFAEQIEKDDREDKENAFKRRRCGVCEVCQQPECGKCKACKDMVKFGGSGRSKQACQERRCPNMAMKEADDDEEVDDNIPEMPSPKKMHQGKKKKQNKNRISWVGEAVKTDGKKSYYKKVCIDAETLEVGDCVSVIPDDSSKPLYLARVTALWEDSSNGQMFHAHWFCAGTDTVLGATSDPLELFLVDECEDMQLSYIHSKVKVIYKAPSENWAMEGGMDPESLLEGDDGKTYFYQLWYDQDYARFESPPKTQPTEDNKFKFCVSCARLAEMRQKEIPRVLEQLEDLDSRVLYYSATKNGILYRVGDGVYLPPEAFTFNIKLSSPVKRPRKEPVDEDLYPEHYRKYSDYIKGSNLDAPEPYRIGRIKEIFCPKKSNGRPNETDIKIRVNKFYRPENTHKSTPASYHADINLLYWSDEEAVVDFKAVQGRCTVEYGEDLPECVQVYSMGGPNRFYFLEAYNAKSKSFEDPPNHARSPGNKGKGKGKGKGKPKSQACEPSEPEIEIKLPKLRTLDVFSGCGGLSEGFHQAGISDTLWAIEMWDPAAQAFRLNNPGSTVFTEDCNILLKLVMAGETTNSRGQRLPQKGDVEMLCGGPPCQGFSGMNRFNSRTYSKFKNSLVVSFLSYCDYYRPRFFLLENVRNFVSFKRSMVLKLTLRCLVRMGYQCTFGVLQAGQYGVAQTRRRAIILAAAPGEKLPLFPEPLHVFAPRACQLSVVVDDKKFVSNITRLSSGPFRTITVRDTMSDLPEVRNGASALEISYNGEPQSWFQRQLRGAQYQPILRDHICKDMSALVAARMRHIPLAPGSDWRDLPNIEVRLSDGTMARKLRYTHHDRKNGRSSSGALRGVCSCVEAGKACDPAARQFNTLIPWCLPHTGNRHNHWAGLYGRLEWDGFFSTTVTNPEPMGKQGRVLHPEQHRVVSVRECARSQGFPDTYRLFGNILDKHRQVGNAVPPPLAKAIGLEIKLCMLAKARESASAKIKEEEAAKD

SEQ ID NO: 23249 - protein, 1334 aa, Artificial Sequence
  Synthetic polypeptide
SQHFGRLRAAKRRPEEKEPEKVNPQISDEKDEDEKEEKRRKTTPKEPTEKKMARAKTVMNSKTHPPKCIQCGQYLDDPDLKYGQHPPDAVDEPQMLTNEKLSIFDANESGFESYEALPQHKLTCFSVYCKHGHLCPIDTGLIEKNIELFFSGSAKPIYDDDPSLEGGVNGKNLGPINEWWITGFDGGEKALIGFSTSFAEYILMDPSPEYAPIFGLMQEKIYISKIVVEFLQSNSDSTYEDLINKIETTVPPSGLNLNRFTEDSLLRHAQFVVEQVESYDEAGDSDEQPIFLTPCMRDLIKLAGVTLGQRRAQARRQTIRHSTREKDRGPTKATTTKLVYQIFDTFFAEQIEKDDREDKENAFKRRRCGVCEVCQQPECGKCKACKDMVKFGGSGRSKQACQERRCPNMAMKEADDDEEVDDNIPEMPSPKKMHQGKKKKQNKNRISWVGEAVKTDGKKSYYKKVCIDAETLEVGDCVSVIPDDSSKPLYLARVTALWEDSSNGQMFHAHWFCAGTDTVLGATSDPLELFLVDECEDMQLSYIHSKVKVIYKAPSENWAMEGGMDPESLLEGDDGKTYFYQLWYDQDYARFESPPKTQPTEDNKFKFCVSCARLAEMRQKEIPRVLEQLEDLDSRVLYYSATKNGILYRVGDGVYLPPEAFTFNIKLSSPVKRPRKEPVDEDLYPEHYRKYSDYIKGSNLDAPEPYRIGRIKEIFCPKKSNGRPNETDIKIRVNKFYRPENTHKSTPASYHADINLLYWSDEEAVVDFKAVQGRCTVEYGEDLPECVQVYSMGGPNRFYFLEAYNAKSKSFEDPPNHARSPGNKGKGKGKGKGKPKSQACEPSEPEIEIKLPKLRTLDVFSGCGGLSEGFHQAGISDTLWAIEMWDPAAQAFRLNNPGSTVFTEDCNILLKLVMAGETTNSRGQRLPQKGDVEMLCGGPPCQGFSGMNRFNSRTYSKFKNSLVVSFLSYCDYYRPRFFLLENVRNFVSFKRSMVLKLTLRCLVRMGYQCTFGVLQAGQYGVAQTRRRAIILAAAPGEKLPLFPEPLHVFAPRACQLSVVVDDKKFVSNITRLSSGPFRTITVRDTMSDLPEVRNGASALEISYNGEPQSWFQRQLRGAQYQPILRDHICKDMSALVAARMRHIPLAPGSDWRDLPNIEVRLSDGTMARKLRYTHHDRKNGRSSSGALRGVCSCVEGGSSGKACDPAARQFNTLIPWCLPHTGNRHNHWAGLYGRLEWDGFFSTTVTNPEPMGKQGRVLHPEQHRVVSVRECARSQGFPDTYRLFGNILDKHRQVGNAVPPPLAKAIGLEIKLCMLAKARESASAKIKEEEAAKD

SEQ ID NO: 23250 - protein, 1338 aa, Artificial Sequence
  Synthetic polypeptide
EAEDEKKHRSQPKDLAAKRRPEEKEPEKVNPQISDEKDEDEKEEKRRKTTPKEPTEKKMARAKTVMNSKTHPPKCIQCGQYLDDPDLKYGQHPPDAVDEPQMLTNEKLSIFDANESGFESYEALPQHKLTCFSVYCKHGHLCPIDTGLIEKNIELFFSGSAKPIYDDDPSLEGGVNGKNLGPINEWWITGFDGGEKALIGFSTSFAEYILMDPSPEYAPIFGLMQEKIYISKIVVEFLQSNSDSTYEDLINKIETTVPPSGLNLNRFTEDSLLRHAQFVVEQVESYDEAGDSDEQPIFLTPCMRDLIKLAGVTLGQRRAQARRQTIRHSTREKDRGPTKATTTKLVYQIFDTFFAEQIEKDDREDKENAFKRRRCGVCEVCQQPECGKCKACKDMVKFGGSGRSKQACQERRCPNMAMKEADDDEEVDDNIPEMPSPKKMHQGKKKKQNKNRISWVGEAVKTDGKKSYYKKVCIDAETLEVGDCVSVIPDDSSKPLYLARVTALWEDSSNGQMFHAHWFCAGTDTVLGATSDPLELFLVDECEDMQLSYIHSKVKVIYKAPSENWAMEGGMDPESLLEGDDGKTYFYQLWYDQDYARFESPPKTQPTEDNKFKFCVSCARLAEMRQKEIPRVLEQLEDLDSRVLYYSATKNGILYRVGDGVYLPPEAFTFNIKLSSPVKRPRKEPVDEDLYPEHYRKYSDYIKGSNLDAPEPYRIGRIKEIFCPKKSNGRPNETDIKIRVNKFYRPENTHKSTPASYHADINLLYWSDEEAVVDFKAVQGRCTVEYGEDLPECVQVYSMGGPNRFYFLEAYNAKSKSFEDPPNHARSPGNKGKGKGKGKGKPKSQACEPSEPEIEIKLPKLRTLDVFSGCGGLSEGFHQAGISDTLWAIEMWDPAAQAFRLNNPGSTVFTEDCNILLKLVMAGETTNSRGQRLPQKGDVEMLCGGPPCQGFSGMNRFNSRTYSKFKNSLVVSFLSYCDYYRPRFFLLENVRNFVSFKRSMVLKLTLRCLVRMGYQCTFGVLQAGQYGVAQTRRRAIILAAAPGEKLPLFPEPLHVFAPRACQLSVVVDDKKFVSNITRLSSGPFRTITVRDTMSDLPEVRNGASALEISYNGEPQSWFQRQLRGAQYQPILRDHICKDMSALVAARMRHIPLAPGSDWRDLPNIEVRLSDGTMARKLRYTHHDRKNGRSSSGALRGVCSCVEAGKACDPAARQFNTLIPWCLPHTGNRHNHWAGLYGRLEWDGFFSTTVTNPEPMGKQGRVLHPEQHRVVSVRECARSQGFPDTYRLFGNILDKHRQVGNAVPPPLAKAIGLEIKLCMLAKARESASAKIKEEEAAKD

SEQ ID NO: 23251 - protein, 43 aa, Artificial Sequence
  Synthetic polypeptide
KYRISWVWWRMPVIPATREAEAGESFEPERQRMRRSTEVNPKI

SEQ ID NO: 23252 - protein, 19 aa, Artificial Sequence
  Synthetic polypeptide
SQLLERPRQENRLNLRGRG

SEQ ID NO: 23253 - protein, 1341 aa, Artificial Sequence
  Synthetic polypeptide
EAEDEKKHRSQPKDLAAKRRPEEKEPEKVNPQISDEKDEDEKEEKRRKTTPKEPTEKKMARAKTVMNSKTHPPKCIQCGQYLDDPDLKYGQHPPDAVDEPQMLTNEKLSIFDANESGFESYEALPQHKLTCFSVYCKHGHLCPIDTGLIEKNIELFFSGSAKPIYDDDPSLEGGVNGKNLGPINEWWITGFDGGEKALIGFSTSFAEYILMDPSPEYAPIFGLMQEKIYISKIVVEFLQSNSDSTYEDLINKIETTVPPSGLNLNRFTEDSLLRHAQFVVEQVESYDEAGDSDEQPIFLTPCMRDLIKLAGVTLGQRRAQARRQTIRHSTREKDRGPTKATTTKLVYQIFDTFFAEQIEKDDREDKENAFKRRRCGVCEVCQQPECGKCKACKDMVKFGGSGRSKQACQERRCPNMAMKEADDDEEVDDNIPEMPSPKKMHQGKKKKQNKNRISWVGEAVKTDGKKSYYKKVCIDAETLEVGDCVSVIPDDSSKPLYLARVTALWEDSSNGQMFHAHWFCAGTDTVLGATSDPLELFLVDECEDMQLSYIHSKVKVIYKAPSENWAMEGGMDPESLLEGDDGKTYFYQLWYDQDYARFESPPKTQPTEDNKFKFCVSCARLAEMRQKEIPRVLEQLEDLDSRVLYYSATKNGILYRVGDGVYLPPEAFTFNIKLSSPVKRPRKEPVDEDLYPEHYRKYSDYIKGSNLDAPEPYRIGRIKEIFCPKKSNGRPNETDIKIRVNKFYRPENTHKSTPASYHADINLLYWSDEEAVVDFKAVQGRCTVEYGEDLPECVQVYSMGGPNRFYFLEAYNAKSKSFEDPPNHARSPGNKGKGKGKGKGKPKSQACEPSEPEIEIKLPKLRTLDVFSGCGGLSEGFHQAGISDTLWAIEMWDPAAQAFRLNNPGSTVFTEDCNILLKLVMAGETTNSRGQRLPQKGDVEMLCGGPPCQGFSGMNRFNSRTYSKFKNSLVVSFLSYCDYYRPRFFLLENVRNFVSFKRSMVLKLTLRCLVRMGYQCTFGVLQAGQYGVAQTRRRAIILAAAPGEKLPLFPEPLHVFAPRACQLSVVVDDKKFVSNITRLSSGPFRTITVRDTMSDLPEVRNGASALEISYNGEPQSWFQRQLRGAQYQPILRDHICKDMSALVAARMRHIPLAPGSDWRDLPNIEVRLSDGTMARKLRYTHHDRKNGRSSSGALRGVCSCVEGGSSGKACDPAARQFNTLIPWCLPHTGNRHNHWAGLYGRLEWDGFFSTTVTNPEPMGKQGRVLHPEQHRVVSVRECARSQGFPDTYRLFGNILDKHRQVGNAVPPPLAKAIGLEIKLCMLAKARESASAKIKEEEAAKD

SEQ ID NO: 23254 - protein, 490 aa, Artificial Sequence
  Synthetic polypeptide
VWWLTPIPALWEAEVGGSLKPRSSRPAWENKNLVHGNVCGRNILLARLGLAEGTSPFIKLSDPGVGLGALSREERVERIPWLAPECLPGGANSLSTAMDKWGFGATLLEICFDGEAPLQSRSPSEKEHFYQRQHRLPEPSCPQLATLTSQCLTYEPTQRPSFRTILRDLTRLQPHNLADVLTVNPDSPASDPTVFHKRYLKKIRDLGEGHFGKVSLYCYDPTNDGTGEMVAVKALKADCGPQHRSGWKQEIDILRTLYHEHIIKYKGCCEDQGEKSLQLVMEYVPLGSLRDYLPRHSIGLAQLLLFAQQICEGMAYLHAQHYIHRDLAARNVLLDNDRLVKIGDFGLAKAVPEGHEYYRVREDGDSPVFWYAPECLKEYKFYYASDVWSFGVTLYELLTHCDSSQSPPTKFLELIGIAQGQMTVLRLTELLERGERLPRPDKCPCEVYHLMKNCWETEASFRPTFENLIPILKTVHEKYQGQAPSVFSVC

SEQ ID NO: 23255 - protein, 61 aa, Artificial Sequence
  Synthetic polypeptide
ARCGGSHLSQHFGRQRWEDRLNPGVQDQPGRTRTWFMVMCVAGTSCWPGWGWQRAPAPSSS

SEQ ID NO: 23256 - protein, 16 aa, Artificial Sequence
  Synthetic polypeptide
TQEFKTSLGEQEPGSW

SEQ ID NO: 23257 - protein, 224 aa, Artificial Sequence
  Synthetic polypeptide
VWWLTPIPALWEAEVGGSLKPRSSRPAWENKNLVHGNVCGRNILLARLGLAEGTSPFIKLSDPGVGLGALSREERVERIPWLAPECLPGGANSLSTAMDKWGFGATLLEICFDGEAPLQSRSPSEVCLGDPWALPAVGAPPRNPEDRIRAQSCIPSGLVTSSLSGLPAGGPLAGAQCSPSLFRSLWKSLVPGTQKASKRLDFSFRQSDQGSDGRRPGCRVGKKG

SEQ ID NO: 23258 - protein, 39 aa, Artificial Sequence
  Synthetic polypeptide
WLIAIIPSTPEIEVSLLLASISLPSSMLRPKSGCPQTTS

SEQ ID NO: 23259 - protein, 92 aa, Artificial Sequence
  Synthetic polypeptide
SHQLQRLRYHSSLLQSLCPLRCSGPSLVAPKPHPRDPQRCKPDAIFPHKVLFPELAWHESSGTGCVPLWAPRNRGILRSDSTGDATPGPSLI

SEQ ID NO: 23260 - protein, 62 aa, Artificial Sequence
  Synthetic polypeptide
SHQLQRLRYHSSLLQSLCPLRCSGPSLVAPKPHPRDPQRCKPDAIFPHKVLFPELAWHESSG

SEQ ID NO: 23261 - protein, 37 aa, Artificial Sequence
  Synthetic polypeptide
SHQLQRLRYHSSLLQSLCPLRCSGPSLVAPKPHPRDP

SEQ ID NO: 23262 - protein, 46 aa, Artificial Sequence
  Synthetic polypeptide
IPEAEVAASTGSLNHGIFLFGGATGADLGPPRVQPLAPPRWTQRCW

SEQ ID NO: 23263 - protein, 34 aa, Artificial Sequence
  Synthetic polypeptide
LGVVAGACFLATWKAEAGEMLESRRRRLRPVRDP

SEQ ID NO: 23264 - protein, 1408 aa, Artificial Sequence
  Synthetic polypeptide
LLGRQRQEKCLNPGGGGCGQYGIPEPWNFPFRRSYWCGPRPPKSPAPCPTPLDPKVLVEEAPPGLSPGVSVRSLEKRFPGSPQPALRGLSLDFYQGHITAFLGHNGAGKTTTLSILSGLFPPSGGSAFILGHDVRSSMAAIRPHLGVCPQYNVLFDMLTVDEHVWFYGRLKGLSAAVVGPEQDRLLQDVGLVSKQSVQTRHLSGGMQRKLSVAIAFVGGSQVVILDEPTAGVDPASRRGIWELLLKYREGRTLILSTHHLDEAELLGDRVAVVAGGRLCCCGSPLFLRRHLGSGYYLTLVKARLPLTTNEKADTDMEGSVDTRQEKKNGSQGSRVGTPQLLALVQHWVPGARLVEELPHELVLVLPYTGAHDGSFATLFRELDTRLAELRLTGYGISDTSLEEIFLKVVEECAADTDMEDGSCGQHLCTGIAGLDVTLRLKMPPQETALENGEPAGSAPETDQGSGPDAVGRVQGWALTRQQLQALLLKRFLLARRSRRGLFAQIVLPALFVGLALVFSLIVPPFGHYPALRLSPTMYGAQVSFFSEDAPGDPGRARLLEALLQEAGLEEPPVQHSSHRFSAPEVPAEVAKVLASGNWTPESPSPACQCSRPGARRLLPDCPAAAGGPPPPQAVTGSGEVVQNLTGRNLSDFLVKTYPRLVRQGLKTKKWVNEVRYGGFSLGGRDPGLPSGQELGRSVEELWALLSPLPGGALDRVLKNLTAWAHSLDAQDSLKIWFNNKGWHSMVAFVNRASNAILRAHLPPGPARHAHSITTLNHPLNLTKEQLSEGALMASSVDVLVSICVVFAMSFVPASFTLVLIEERVTRAKHLQLMGGLSPTLYWLGNFLWDMCNYLVPACIVVLIFLAFQQRAYVAPANLPALLLLLLLYGWSITPLMYPASFFFSVPSTAYVVLTCINLFIGINGSMATFVLELFSDQKLQEVSRILKQVFLIFPHFCLGRGLIDMVRNQAMADAFERLGDRQFQSPLRWEVVGKNLLAMVIQGPLFLLFTLLLQHRSQLLPQPRVRSLPLLGEEDEDVARERERVVQGATQGDVLVLRNLTKVYRGQRMPAVDRLCLGIPPGECFGLLGVNGAGKTSTFRMVTGDTLASRGEAVLAGHSVAREPSAAHLSMGYCPQSDAIFELLTGREHLELLARLRGVPEAQVAQTAGSGLARLGLSWYADRPAGTYSGGNKRKLATALALVGDPAVVFLDEPTTGMDPSARRFLWNSLLAVVREGRSVMLTSHSMEECEALCSRLAIMVNGRFRCLGSPQHLKGRFAAGHTLTLRVPAARSQPAAAFVAAEFPGAELREAHGGRLRFQLPPGGRCALARVFGELAVHGAEHGVEDFSVSQTMLEEVFLYFSKDQGKDEDTEEQKEAGVGVDPAPGLQHPKRVSQFLDDPSTAETVL

SEQ ID NO: 23265 - protein, 1302 aa, Artificial Sequence
  Synthetic polypeptide
PPTTPSPSILSGLFPPSGGSAFILGHDVRSSMAAIRPHLGVCPQYNVLFDMLTVDEHVWFYGRLKGLSAAVVGPEQDRLLQDVGLVSKQSVQTRHLSGGMQRKLSVAIAFVGGSQVVILDEPTAGVDPASRRGIWELLLKYREGRTLILSTHHLDEAELLGDRVAVVAGGRLCCCGSPLFLRRHLGSGYYLTLVKARLPLTTNEKADTDMEGSVDTRQEKKNGSQGSRVGTPQLLALVQHWVPGARLVEELPHELVLVLPYTGAHDGSFATLFRELDTRLAELRLTGYGISDTSLEEIFLKVVEECAADTDMEDGSCGQHLCTGIAGLDVTLRLKMPPQETALENGEPAGSAPETDQGSGPDAVGRVQGWALTRQQLQALLLKRFLLARRSRRGLFAQIVLPALFVGLALVFSLIVPPFGHYPALRLSPTMYGAQVSFFSEDAPGDPGRARLLEALLQEAGLEEPPVQHSSHRFSAPEVPAEVAKVLASGNWTPESPSPACQCSRPGARRLLPDCPAAAGGPPPPQAVTGSGEVVQNLTGRNLSDFLVKTYPRLVRQGLKTKKWVNEVRYGGFSLGGRDPGLPSGQELGRSVEELWALLSPLPGGALDRVLKNLTAWAHSLDAQDSLKIWFNNKGWHSMVAFVNRASNAILRAHLPPGPARHAHSITTLNHPLNLTKEQLSEGALMASSVDVLVSICVVFAMSFVPASFTLVLIEERVTRAKHLQLMGGLSPTLYWLGNFLWDMCNYLVPACIVVLIFLAFQQRAYVAPANLPALLLLLLLYGWSITPLMYPASFFFSVPSTAYVVLTCINLFIGINGSMATFVLELFSDQKLQEVSRILKQVFLIFPHFCLGRGLIDMVRNQAMADAFERLGDRQFQSPLRWEVVGKNLLAMVIQGPLFLLFTLLLQHRSQLLPQPRVRSLPLLGEEDEDVARERERVVQGATQGDVLVLRNLTKVYRGQRMPAVDRLCLGIPPGECFGLLGVNGAGKTSTFRMVTGDTLASRGEAVLAGHSVAREPSAAHLSMGYCPQSDAIFELLTGREHLELLARLRGVPEAQVAQTAGSGLARLGLSWYADRPAGTYSGGNKRKLATALALVGDPAVVFLDEPTTGMDPSARRFLWNSLLAVVREGRSVMLTSHSMEECEALCSRLAIMVNGRFRCLGSPQHLKGRFAAGHTLTLRVPAARSQPAAAFVAAEFPGAELREAHGGRLRFQLPPGGRCALARVFGELAVHGAEHGVEDFSVSQTMLEEVFLYFSKDQGKDEDTEEQKEAGVGVDPAPGLQHPKRVSQFLDDPSTAETVL

SEQ ID NO: 23266 - protein, 9 aa, Artificial Sequence
  Synthetic polypeptide
PPPLPPRPS

SEQ ID NO: 23267 - protein, 48 aa, Artificial Sequence
  Synthetic polypeptide
PHHSLPVHLEWPLPTQWWLCLHPGPRRPLQHGRHPAPPGRLSSVQRAV

SEQ ID NO: 23268 - protein, 49 aa, Artificial Sequence
  Synthetic polypeptide
TPHHSLPVHLEWPLPTQWWLCLHPGPRRPLQHGRHPAPPGRLSSVQRAV

SEQ ID NO: 23269 - protein, 1310 aa, Artificial Sequence
  Synthetic polypeptide
PPPLPPREPPTTPSPSILSGLFPPSGGSAFILGHDVRSSMAAIRPHLGVCPQYNVLFDMLTVDEHVWFYGRLKGLSAAVVGPEQDRLLQDVGLVSKQSVQTRHLSGGMQRKLSVAIAFVGGSQVVILDEPTAGVDPASRRGIWELLLKYREGRTLILSTHHLDEAELLGDRVAVVAGGRLCCCGSPLFLRRHLGSGYYLTLVKARLPLTTNEKADTDMEGSVDTRQEKKNGSQGSRVGTPQLLALVQHWVPGARLVEELPHELVLVLPYTGAHDGSFATLFRELDTRLAELRLTGYGISDTSLEEIFLKVVEECAADTDMEDGSCGQHLCTGIAGLDVTLRLKMPPQETALENGEPAGSAPETDQGSGPDAVGRVQGWALTRQQLQALLLKRFLLARRSRRGLFAQIVLPALFVGLALVFSLIVPPFGHYPALRLSPTMYGAQVSFFSEDAPGDPGRARLLEALLQEAGLEEPPVQHSSHRFSAPEVPAEVAKVLASGNWTPESPSPACQCSRPGARRLLPDCPAAAGGPPPPQAVTGSGEVVQNLTGRNLSDFLVKTYPRLVRQGLKTKKWVNEVRYGGFSLGGRDPGLPSGQELGRSVEELWALLSPLPGGALDRVLKNLTAWAHSLDAQDSLKIWFNNKGWHSMVAFVNRASNAILRAHLPPGPARHAHSITTLNHPLNLTKEQLSEGALMASSVDVLVSICVVFAMSFVPASFTLVLIEERVTRAKHLQLMGGLSPTLYWLGNFLWDMCNYLVPACIVVLIFLAFQQRAYVAPANLPALLLLLLLYGWSITPLMYPASFFFSVPSTAYVVLTCINLFIGINGSMATFVLELFSDQKLQEVSRILKQVFLIFPHFCLGRGLIDMVRNQAMADAFERLGDRQFQSPLRWEVVGKNLLAMVIQGPLFLLFTLLLQHRSQLLPQPRVRSLPLLGEEDEDVARERERVVQGATQGDVLVLRNLTKVYRGQRMPAVDRLCLGIPPGECFGLLGVNGAGKTSTFRMVTGDTLASRGEAVLAGHSVAREPSAAHLSMGYCPQSDAIFELLTGREHLELLARLRGVPEAQVAQTAGSGLARLGLSWYADRPAGTYSGGNKRKLATALALVGDPAVVFLDEPTTGMDPSARRFLWNSLLAVVREGRSVMLTSHSMEECEALCSRLAIMVNGRFRCLGSPQHLKGRFAAGHTLTLRVPAARSQPAAAFVAAEFPGAELREAHGGRLRFQLPPGGRCALARVFGELAVHGAEHGVEDFSVSQTMLEEVFLYFSKDQGKDEDTEEQKEAGVGVDPAPGLQHPKRVSQFLDDPSTAETVL

SEQ ID NO: 23270 - protein, 17 aa, Artificial Sequence
  Synthetic polypeptide
PHHSLPVNPPPLPPRPS

SEQ ID NO: 23271 - protein, 1311 aa, Artificial Sequence
  Synthetic polypeptide
TPHHSLPVSPPTTPSPSILSGLFPPSGGSAFILGHDVRSSMAAIRPHLGVCPQYNVLFDMLTVDEHVWFYGRLKGLSAAVVGPEQDRLLQDVGLVSKQSVQTRHLSGGMQRKLSVAIAFVGGSQVVILDEPTAGVDPASRRGIWELLLKYREGRTLILSTHHLDEAELLGDRVAVVAGGRLCCCGSPLFLRRHLGSGYYLTLVKARLPLTTNEKADTDMEGSVDTRQEKKNGSQGSRVGTPQLLALVQHWVPGARLVEELPHELVLVLPYTGAHDGSFATLFRELDTRLAELRLTGYGISDTSLEEIFLKVVEECAADTDMEDGSCGQHLCTGIAGLDVTLRLKMPPQETALENGEPAGSAPETDQGSGPDAVGRVQGWALTRQQLQALLLKRFLLARRSRRGLFAQIVLPALFVGLALVFSLIVPPFGHYPALRLSPTMYGAQVSFFSEDAPGDPGRARLLEALLQEAGLEEPPVQHSSHRFSAPEVPAEVAKVLASGNWTPESPSPACQCSRPGARRLLPDCPAAAGGPPPPQAVTGSGEVVQNLTGRNLSDFLVKTYPRLVRQGLKTKKWVNEVRYGGFSLGGRDPGLPSGQELGRSVEELWALLSPLPGGALDRVLKNLTAWAHSLDAQDSLKIWFNNKGWHSMVAFVNRASNAILRAHLPPGPARHAHSITTLNHPLNLTKEQLSEGALMASSVDVLVSICVVFAMSFVPASFTLVLIEERVTRAKHLQLMGGLSPTLYWLGNFLWDMCNYLVPACIVVLIFLAFQQRAYVAPANLPALLLLLLLYGWSITPLMYPASFFFSVPSTAYVVLTCINLFIGINGSMATFVLELFSDQKLQEVSRILKQVFLIFPHFCLGRGLIDMVRNQAMADAFERLGDRQFQSPLRWEVVGKNLLAMVIQGPLFLLFTLLLQHRSQLLPQPRVRSLPLLGEEDEDVARERERVVQGATQGDVLVLRNLTKVYRGQRMPAVDRLCLGIPPGECFGLLGVNGAGKTSTFRMVTGDTLASRGEAVLAGHSVAREPSAAHLSMGYCPQSDAIFELLTGREHLELLARLRGVPEAQVAQTAGSGLARLGLSWYADRPAGTYSGGNKRKLATALALVGDPAVVFLDEPTTGMDPSARRFLWNSLLAVVREGRSVMLTSHSMEECEALCSRLAIMVNGRFRCLGSPQHLKGRFAAGHTLTLRVPAARSQPAAAFVAAEFPGAELREAHGGRLRFQLPPGGRCALARVFGELAVHGAEHGVEDFSVSQTMLEEVFLYFSKDQGKDEDTEEQKEAGVGVDPAPGLQHPKRVSQFLDDPSTAETVL

SEQ ID NO: 23272 - protein, 10 aa, Artificial Sequence
  Synthetic polypeptide
APPPLPPRPS

SEQ ID NO: 23273 - protein, 65 aa, Artificial Sequence
  Synthetic polypeptide
PHHSLPVNPPPLPPREPPHHSLPVHLEWPLPTQWWLCLHPGPRRPLQHGRHPAPPGRLSSVQRAV

SEQ ID NO: 23274 - protein, 1311 aa, Artificial Sequence
  Synthetic polypeptide
APPPLPPREPPTTPSPSILSGLFPPSGGSAFILGHDVRSSMAAIRPHLGVCPQYNVLFDMLTVDEHVWFYGRLKGLSAAVVGPEQDRLLQDVGLVSKQSVQTRHLSGGMQRKLSVAIAFVGGSQVVILDEPTAGVDPASRRGIWELLLKYREGRTLILSTHHLDEAELLGDRVAVVAGGRLCCCGSPLFLRRHLGSGYYLTLVKARLPLTTNEKADTDMEGSVDTRQEKKNGSQGSRVGTPQLLALVQHWVPGARLVEELPHELVLVLPYTGAHDGSFATLFRELDTRLAELRLTGYGISDTSLEEIFLKVVEECAADTDMEDGSCGQHLCTGIAGLDVTLRLKMPPQETALENGEPAGSAPETDQGSGPDAVGRVQGWALTRQQLQALLLKRFLLARRSRRGLFAQIVLPALFVGLALVFSLIVPPFGHYPALRLSPTMYGAQVSFFSEDAPGDPGRARLLEALLQEAGLEEPPVQHSSHRFSAPEVPAEVAKVLASGNWTPESPSPACQCSRPGARRLLPDCPAAAGGPPPPQAVTGSGEVVQNLTGRNLSDFLVKTYPRLVRQGLKTKKWVNEVRYGGFSLGGRDPGLPSGQELGRSVEELWALLSPLPGGALDRVLKNLTAWAHSLDAQDSLKIWFNNKGWHSMVAFVNRASNAILRAHLPPGPARHAHSITTLNHPLNLTKEQLSEGALMASSVDVLVSICVVFAMSFVPASFTLVLIEERVTRAKHLQLMGGLSPTLYWLGNFLWDMCNYLVPACIVVLIFLAFQQRAYVAPANLPALLLLLLLYGWSITPLMYPASFFFSVPSTAYVVLTCINLFIGINGSMATFVLELFSDQKLQEVSRILKQVFLIFPHFCLGRGLIDMVRNQAMADAFERLGDRQFQSPLRWEVVGKNLLAMVIQGPLFLLFTLLLQHRSQLLPQPRVRSLPLLGEEDEDVARERERVVQGATQGDVLVLRNLTKVYRGQRMPAVDRLCLGIPPGECFGLLGVNGAGKTSTFRMVTGDTLASRGEAVLAGHSVAREPSAAHLSMGYCPQSDAIFELLTGREHLELLARLRGVPEAQVAQTAGSGLARLGLSWYADRPAGTYSGGNKRKLATALALVGDPAVVFLDEPTTGMDPSARRFLWNSLLAVVREGRSVMLTSHSMEECEALCSRLAIMVNGRFRCLGSPQHLKGRFAAGHTLTLRVPAARSQPAAAFVAAEFPGAELREAHGGRLRFQLPPGGRCALARVFGELAVHGAEHGVEDFSVSQTMLEEVFLYFSKDQGKDEDTEEQKEAGVGVDPAPGLQHPKRVSQFLDDPSTAETVL

SEQ ID NO: 23275 - protein, 49 aa, Artificial Sequence
  Synthetic polypeptide
APHHSLPVHLEWPLPTQWWLCLHPGPRRPLQHGRHPAPPGRLSSVQRAV

SEQ ID NO: 23276 - protein, 34 aa, Artificial Sequence
  Synthetic polypeptide
PHHSLPVNPPPLPPREPPHHSLPVSPPPLPPRPS

SEQ ID NO: 23277 - protein, 49 aa, Artificial Sequence; identical to SEQ ID NO: 23268
  Synthetic polypeptide

SEQ ID NO: 23278 - protein, 18 aa, Artificial Sequence
  Synthetic polypeptide
APHHSLPVNPPPLPPRPS

SEQ ID NO: 23279 - protein, 1335 aa, Artificial Sequence
  Synthetic polypeptide
PHHSLPVNPPPLPPREPPHHSLPVSPPPLPPREPPTTPSPSILSGLFPPSGGSAFILGHDVRSSMAAIRPHLGVCPQYNVLFDMLTVDEHVWFYGRLKGLSAAVVGPEQDRLLQDVGLVSKQSVQTRHLSGGMQRKLSVAIAFVGGSQVVILDEPTAGVDPASRRGIWELLLKYREGRTLILSTHHLDEAELLGDRVAVVAGGRLCCCGSPLFLRRHLGSGYYLTLVKARLPLTTNEKADTDMEGSVDTRQEKKNGSQGSRVGTPQLLALVQHWVPGARLVEELPHELVLVLPYTGAHDGSFATLFRELDTRLAELRLTGYGISDTSLEEIFLKVVEECAADTDMEDGSCGQHLCTGIAGLDVTLRLKMPPQETALENGEPAGSAPETDQGSGPDAVGRVQGWALTRQQLQALLLKRFLLARRSRRGLFAQIVLPALFVGLALVFSLIVPPFGHYPALRLSPTMYGAQVSFFSEDAPGDPGRARLLEALLQEAGLEEPPVQHSSHRFSAPEVPAEVAKVLASGNWTPESPSPACQCSRPGARRLLPDCPAAAGGPPPPQAVTGSGEVVQNLTGRNLSDFLVKTYPRLVRQGLKTKKWVNEVRYGGFSLGGRDPGLPSGQELGRSVEELWALLSPLPGGALDRVLKNLTAWAHSLDAQDSLKIWFNNKGWHSMVAFVNRASNAILRAHLPPGPARHAHSITTLNHPLNLTKEQLSEGALMASSVDVLVSICVVFAMSFVPASFTLVLIEERVTRAKHLQLMGGLSPTLYWLGNFLWDMCNYLVPACIVVLIFLAFQQRAYVAPANLPALLLLLLLYGWSITPLMYPASFFFSVPSTAYVVLTCINLFIGINGSMATFVLELFSDQKLQEVSRILKQVFLIFPHFCLGRGLIDMVRNQAMADAFERLGDRQFQSPLRWEVVGKNLLAMVIQGPLFLLFTLLLQHRSQLLPQPRVRSLPLLGEEDEDVARERERVVQGATQGDVLVLRNLTKVYRGQRMPAVDRLCLGIPPGECFGLLGVNGAGKTSTFRMVTGDTLASRGEAVLAGHSVAREPSAAHLSMGYCPQSDAIFELLTGREHLELLARLRGVPEAQVAQTAGSGLARLGLSWYADRPAGTYSGGNKRKLATALALVGDPAVVFLDEPTTGMDPSARRFLWNSLLAVVREGRSVMLTSHSMEECEALCSRLAIMVNGRFRCLGSPQHLKGRFAAGHTLTLRVPAARSQPAAAFVAAEFPGAELREAHGGRLRFQLPPGGRCALARVFGELAVHGAEHGVEDFSVSQTMLEEVFLYFSKDQGKDEDTEEQKEAGVGVDPAPGLQHPKRVSQFLDDPSTAETVL

SEQ ID NO: 23280 - protein, 1311 aa, Artificial Sequence; identical to SEQ ID NO: 23271
  Synthetic polypeptide

SEQ ID NO: 23281 - protein, 10 aa, Artificial Sequence
  Synthetic polypeptide
APPPLPPRPS

SEQ ID NO: 23282 - protein, 66 aa, Artificial Sequence
  Synthetic polypeptide
APHHSLPVNPPPLPPREPPHHSLPVHLEWPLPTQWWLCLHPGPRRPLQHGRHPAPPGRLSSVQRAV

SEQ ID NO: 23283 - protein, 49 aa, Artificial Sequence; identical to SEQ ID NO: 23268
  Synthetic polypeptide

SEQ ID NO: 23284 - protein, 1311 aa, Artificial Sequence; identical to SEQ ID NO: 23274
  Synthetic polypeptide

SEQ ID NO: 23285 - protein, 35 aa, Artificial Sequence
  Synthetic polypeptide
APHHSLPVNPPPLPPREPPHHSLPVNPPPLPPRPS

SEQ ID NO: 23286 - protein, 1311 aa, Artificial Sequence; identical to SEQ ID NO: 23271
  Synthetic polypeptide

SEQ ID NO: 23287 - protein, 10 aa, Artificial Sequence
  Synthetic polypeptide
APPPLPPRPS

SEQ ID NO: 23288 - protein, 83 aa, Artificial Sequence
  Synthetic polypeptide
APHHSLPVNPPPLPPREPPHHSLPVNPPPLPPREPPHHSLPVHLEWPLPTQWWLCLHPGPRRPLQHGRHPAPPGRLSSVQRAV

SEQ ID NO: 23289 - protein, 1345 aa, Artificial Sequence
  Synthetic polypeptide
APHHSLPVNPPPLPPREPPHHSLPVNPPPLPPREPPHHSLPVRPPTTPSPSILSGLFPPSGGSAFILGHDVRSSMAAIRPHLGVCPQYNVLFDMLTVDEHVWFYGRLKGLSAAVVGPEQDRLLQDVGLVSKQSVQTRHLSGGMQRKLSVAIAFVGGSQVVILDEPTAGVDPASRRGIWELLLKYREGRTLILSTHHLDEAELLGDRVAVVAGGRLCCCGSPLFLRRHLGSGYYLTLVKARLPLTTNEKADTDMEGSVDTRQEKKNGSQGSRVGTPQLLALVQHWVPGARLVEELPHELVLVLPYTGAHDGSFATLFRELDTRLAELRLTGYGISDTSLEEIFLKVVEECAADTDMEDGSCGQHLCTGIAGLDVTLRLKMPPQETALENGEPAGSAPETDQGSGPDAVGRVQGWALTRQQLQALLLKRFLLARRSRRGLFAQIVLPALFVGLALVFSLIVPPFGHYPALRLSPTMYGAQVSFFSEDAPGDPGRARLLEALLQEAGLEEPPVQHSSHRFSAPEVPAEVAKVLASGNWTPESPSPACQCSRPGARRLLPDCPAAAGGPPPPQAVTGSGEVVQNLTGRNLSDFLVKTYPRLVRQGLKTKKWVNEVRYGGFSLGGRDPGLPSGQELGRSVEELWALLSPLPGGALDRVLKNLTAWAHSLDAQDSLKIWFNNKGWHSMVAFVNRASNAILRAHLPPGPARHAHSITTLNHPLNLTKEQLSEGALMASSVDVLVSICVVFAMSFVPASFTLVLIEERVTRAKHLQLMGGLSPTLYWLGNFLWDMCNYLVPACIVVLIFLAFQQRAYVAPANLPALLLLLLLYGWSITPLMYPASFFFSVPSTAYVVLTCINLFIGINGSMATFVLELFSDQKLQEVSRILKQVFLIFPHFCLGRGLIDMVRNQAMADAFERLGDRQFQSPLRWEVVGKNLLAMVIQGPLFLLFTLLLQHRSQLLPQPRVRSLPLLGEEDEDVARERERVVQGATQGDVLVLRNLTKVYRGQRMPAVDRLCLGIPPGECFGLLGVNGAGKTSTFRMVTGDTLASRGEAVLAGHSVAREPSAAHLSMGYCPQSDAIFELLTGREHLELLARLRGVPEAQVAQTAGSGLARLGLSWYADRPAGTYSGGNKRKLATALALVGDPAVVFLDEPTTGMDPSARRFLWNSLLAVVREGRSVMLTSHSMEECEALCSRLAIMVNGRFRCLGSPQHLKGRFAAGHTLTLRVPAARSQPAAAFVAAEFPGAELREAHGGRLRFQLPPGGRCALARVFGELAVHGAEHGVEDFSVSQTMLEEVFLYFSKDQGKDEDTEEQKEAGVGVDPAPGLQHPKRVSQFLDDPSTAETVL

SEQ ID NO: 23290 - protein, 10 aa, Artificial Sequence
  Synthetic polypeptide
GPPPLPPRPS

SEQ ID NO: 23291 - protein, 58 aa, Artificial Sequence
  Synthetic polypeptide
APPPLPPREAPHHSLPVHLEWPLPTQWWLCLHPGPRRPLQHGRHPAPPGRLSSVQRAV

SEQ ID NO: 23292 - protein, 49 aa, Artificial Sequence; identical to SEQ ID NO: 23268
  Synthetic polypeptide

SEQ ID NO: 23293 - protein, 1311 aa, Artificial Sequence
  Synthetic polypeptide
GPPPLPPREPPTTPSPSILSGLFPPSGGSAFILGHDVRSSMAAIRPHLGVCPQYNVLFDMLTVDEHVWFYGRLKGLSAAVVGPEQDRLLQDVGLVSKQSVQTRHLSGGMQRKLSVAIAFVGGSQVVILDEPTAGVDPASRRGIWELLLKYREGRTLILSTHHLDEAELLGDRVAVVAGGRLCCCGSPLFLRRHLGSGYYLTLVKARLPLTTNEKADTDMEGSVDTRQEKKNGSQGSRVGTPQLLALVQHWVPGARLVEELPHELVLVLPYTGAHDGSFATLFRELDTRLAELRLTGYGISDTSLEEIFLKVVEECAADTDMEDGSCGQHLCTGIAGLDVTLRLKMPPQETALENGEPAGSAPETDQGSGPDAVGRVQGWALTRQQLQALLLKRFLLARRSRRGLFAQIVLPALFVGLALVFSLIVPPFGHYPALRLSPTMYGAQVSFFSEDAPGDPGRARLLEALLQEAGLEEPPVQHSSHRFSAPEVPAEVAKVLASGNWTPESPSPACQCSRPGARRLLPDCPAAAGGPPPPQAVTGSGEVVQNLTGRNLSDFLVKTYPRLVRQGLKTKKWVNEVRYGGFSLGGRDPGLPSGQELGRSVEELWALLSPLPGGALDRVLKNLTAWAHSLDAQDSLKIWFNNKGWHSMVAFVNRASNAILRAHLPPGPARHAHSITTLNHPLNLTKEQLSEGALMASSVDVLVSICVVFAMSFVPASFTLVLIEERVTRAKHLQLMGGLSPTLYWLGNFLWDMCNYLVPACIVVLIFLAFQQRAYVAPANLPALLLLLLLYGWSITPLMYPASFFFSVPSTAYVVLTCINLFIGINGSMATFVLELFSDQKLQEVSRILKQVFLIFPHFCLGRGLIDMVRNQAMADAFERLGDRQFQSPLRWEVVGKNLLAMVIQGPLFLLFTLLLQHRSQLLPQPRVRSLPLLGEEDEDVARERERVVQGATQGDVLVLRNLTKVYRGQRMPAVDRLCLGIPPGECFGLLGVNGAGKTSTFRMVTGDTLASRGEAVLAGHSVAREPSAAHLSMGYCPQSDAIFELLTGREHLELLARLRGVPEAQVAQTAGSGLARLGLSWYADRPAGTYSGGNKRKLATALALVGDPAVVFLDEPTTGMDPSARRFLWNSLLAVVREGRSVMLTSHSMEECEALCSRLAIMVNGRFRCLGSPQHLKGRFAAGHTLTLRVPAARSQPAAAFVAAEFPGAELREAHGGRLRFQLPPGGRCALARVFGELAVHGAEHGVEDFSVSQTMLEEVFLYFSKDQGKDEDTEEQKEAGVGVDPAPGLQHPKRVSQFLDDPSTAETVL

SEQ ID NO: 23294 - protein, 27 aa, Artificial Sequence
  Synthetic polypeptide
APPPLPPREAPHHSLPVNPPPLPPRPS

SEQ ID NO: 23295 - protein, 1311 aa, Artificial Sequence; identical to SEQ ID NO: 23271
  Synthetic polypeptide

SEQ ID NO: 23296 - protein, 10 aa, Artificial Sequence
  Synthetic polypeptide
APPPLPPRPS

SEQ ID NO: 23297 - protein, 75 aa, Artificial Sequence
  Synthetic polypeptide
APPPLPPREAPHHSLPVNPPPLPPREPPHHSLPVHLEWPLPTQWWLCLHPGPRRPLQHGRHPAPPGRLSSVQRAV

SEQ ID NO: 23298 - protein, 49 aa, Artificial Sequence; identical to SEQ ID NO: 23268
  Synthetic polypeptide

SEQ ID NO: 23299 - protein, 1311 aa, Artificial Sequence; identical to SEQ ID NO: 23274
  Synthetic polypeptide

SEQ ID NO: 23300 - protein, 44 aa, Artificial Sequence
  Synthetic polypeptide
APPPLPPREAPHHSLPVNPPPLPPREPPHHSLPVNPPPLPPRPS

SEQ ID NO: 23301 - protein, 708 aa, Artificial Sequence
  Synthetic polypeptide
ASVSTSIKWIFLGLIEAAGRVHGSVLRTRRSPLGGPTPVCKATLSEETCQQLARETLEELDWCLEQLETMQTYRSVSEMASHKFKRMLNRELTHLSEMSRSGNQVSEYISTTFLDKQNEVEIPSPTMKEREKQQAPRPRPSQPPPPPVPHLQPMSQITGLKKLMHSNSLNNSNIPRFGVKTDQEELLAQELENLNKWGLNIFCVSDYAGGRSLTCIMYMIFQERDLLKKFRIPVDTMVTYMLTLEDHYHADVAYHNSLHAADVLQSTHVLLATPALDAVFTDLEILAALFAAAIHDVDHPGVSNQFLINTNSELALMYNDESVLENHHLAVGFKLLQEDNCDIFQNLSKRQRQSLRKMVIDMVLATDMSKHMTLLADLKTMVETKKVTSSGVLLLDNYSDRIQVLRNMVHCADLSNPTKPLELYRQWTDRIMAEFFQQGDRERERGMEISPMCDKHTASVEKSQVGFIDYIVHPLWETWADLVHPDAQEILDTLEDNRDWYYSAIRQSPSPPPEEESRGPGHPPLPDKFQFELTLEEEEEEEISMAQIPCTAQEALTAQGLSGVEEALDATIAWEASPAQESLEVMAQEASLEAELEAVYLTQQAQSTGSAPVAPDEFSSREEFVVAVSHSSPSALALQSPLLPAWRTLSVSEHAPGLPGLPSTAAEVEAQREHQAAKRACSACAGTFGEDTSALPAPGGGGSGGDPT

SEQ ID NO: 23302 - protein, 80 aa, Artificial Sequence
  Synthetic polypeptide
NGFFWDSLRLQAEYMAASLGHGGPRWAAPPLSARPRCQKKRVSSWPGRLWRSWTGVWSSWRPCRPIALSARWPRTSSKGC

SEQ ID NO: 23303 - protein, 63 aa, Artificial Sequence
  Synthetic polypeptide
DTAVPAGRPHPCLQGHAVRRNVSAVGPGDSGGAGLVSGAAGDHADLSLCQRDGLAQVQKDVEP

SEQ ID NO: 23304 - protein, 126 aa, Artificial Sequence
  Synthetic polypeptide
LDMVIRGGSHTDPAGARRKVPAGSGLRGGRVPWGGAARGTWRPPALPAAAGRALRPGARLWRAGGARRRARRGGLFREPDDAGGGILVLLQGPGEGRGHRRAEGGRSGSGPRARPAAPQTRQPVPR

SEQ ID NO: 23305 - protein, 13 aa, Artificial Sequence
  Synthetic polypeptide
KLAGHGDSRRVTH

SEQ ID NO: 23306 - protein, 59 aa, Artificial Sequence
  Synthetic polypeptide
GQEFEISLANMTTGTGTRGTGLSRRETGASRSCTVRTPTSTWTPTTTPASRGRKSARPP

SEQ ID NO: 23307 - protein, 304 aa, Artificial Sequence
  Synthetic polypeptide
SQHFGRLRQADHLRSGVRDQPGQHDDWNWDTWDGPEQEGDWSQQELHCEDPNFNMDADYDPSQPRKKKREAPLTGKKKRKSPFAAAVGQEKPVFEPGDKTFEEYLDEYYRLDYEDIIDDLPCRFKYRTVVPCDFGLSTEEILAADDKELNRWCSLKKTCMYRSEQEELRDKRAYSQKAQNSWKKRQVFKSLCREEAETPAEATGKPQRDEAGPQRQLPALDGSLMGPESPPAQEEEAPVSPHKKPAPQKRRRAKKARLLGPTVMLGGCEFSRQRLQAFGLNPKRLHFRQLGRQRRKQQGPKNSS

SEQ ID NO: 23308 - protein, 316 aa, Artificial Sequence
  Synthetic polypeptide
GQEFEISLANMKCFGDEYYGAVEEEKPQFEEEEGLEDDWNWDTWDGPEQEGDWSQQELHCEDPNFNMDADYDPSQPRKKKREAPLTGKKKRKSPFAAAVGQEKPVFEPGDKTFEEYLDEYYRLDYEDIIDDLPCRFKYRTVVPCDFGLSTEEILAADDKELNRWCSLKKTCMYRSEQEELRDKRAYSQKAQNSWKKRQVFKSLCREEAETPAEATGKPQRDEAGPQRQLPALDGSLMGPESPPAQEEEAPVSPHKKPAPQKRRRAKKARLLGPTVMLGGCEFSRQRLQAFGLNPKRLHFRQLGRQRRKQQGPKNSS

SEQ ID NO: 23309 - protein, 42 aa, Artificial Sequence
  Synthetic polypeptide
SQHFGRLRQADHLRSGVRDQPGQHEVLWGRVLRGRGGGEATI

SEQ ID NO: 23310 - protein, 31 aa, Artificial Sequence
  Synthetic polypeptide
GQLGHKISLDLEARPRSSERKSKIQNIGRVP

SEQ ID NO: 23311 - protein, 68 aa, Artificial Sequence
  Synthetic polypeptide
AWTWRPDPGPQSESLKSRTLAGYHSSHLNPSTLGGQEMTKRDVPGFAIGGLSGGESKSQFWRMVALST

SEQ ID NO: 23312 - protein, 21 aa, Artificial Sequence
  Synthetic polypeptide
AAGAQDKPGLGGQTQVLRAKV

SEQ ID NO: 23313 - protein, 189 aa, Artificial Sequence
  Synthetic polypeptide
HKMTKRDVPGFAIGGLSGGESKSQFWRMVALSTSRLPKDKPRYLMGVGYATDLVVCVALGCDMFDCVFPTRTARFGSALVPTGNLQLRKKVFEKDFGPIDPECTCPTCQKHSRAFLHALLHSDNTAALHHLTVHNIAYQLQLMSAVRTSIVEKRFPDFVRDFMGAMYGDPTLCPTWATDALASVGITLG

SEQ ID NO: 23314 - protein, 16 aa, Artificial Sequence
  Synthetic polypeptide
EAKARGLLETSLGDIR

SEQ ID NO: 23315 - protein, 33 aa, Artificial Sequence
  Synthetic polypeptide
HKMTKRDVPGFAIGGLSGGESKSQFWRMVALST

SEQ ID NO: 23316 - protein, 266 aa, Artificial Sequence
  Synthetic polypeptide
EIKTILANMAIEEGTLEEIEEEVRQKKSSRKRKRDSDAGSSTPTTSTRSRDKDDESKKQKKRGRPPAEKLSPNPPNLTKKMKKIVDAVIKYKDSSSGRQLSEVFIQLPSRKELPEYYELIRKPVDFKKIKERIRNHKYRSLNDLEKDVMLLCQNAQTFNLEGSLIYEDSIVLQSVFTSVRQKIEKEDDSEGEESEEEEEGEEEGSESESRSVKVKIKLGRKEKAQDRLKGGRRRPSRGSRAKPVVSDDDSEEEQEEDRSGSGSEED

SEQ ID NO: 23317 - protein, 95 aa, Artificial Sequence
  Synthetic polypeptide
SQHFERPTWVDHEVKRLRPSWPTWPSRRARWRRSKRRSGRRNHHGSASETATPAPPPRPPAPAAATRTTRARSRRSAGGRLPRNSPLTHPTSPRR

SEQ ID NO: 23318 - protein, 69 aa, Artificial Sequence
  Synthetic polypeptide
DHPGQHGHRGGHAGGDRRGGPAEEIITEAQARQRRRLLHPDHQHPQPRQGRREQEAEEARAAACRETLP

SEQ ID NO: 23319 - protein, 265 aa, Artificial Sequence
  Synthetic polypeptide
EIKTILANMAIEEGTLEEIEEEVRQKKSSRKRKRDSDAGSSTPTTSTRSRDKDDESKKQKKRGRPPAEKLSPNPPNLTKKMKKIVDAVIKYKDSSGRQLSEVFIQLPSRKELPEYYELIRKPVDFKKIKERIRNHKYRSLNDLEKDVMLLCQNAQTFNLEGSLIYEDSIVLQSVFTSVRQKIEKEDDSEGEESEEEEEGEEEGSESESRSVKVKIKLGRKEKAQDRLKGGRRRPSRGSRAKPVVSDDDSEEEQEEDRSGSGSEED

SEQ ID NO: 23320 - protein, 62 aa, Artificial Sequence
  Synthetic polypeptide
EIKTILANMAIEEGTLEEIEEEVRQKKSSRKRKRDSDAGSSTPTTSTRSRDKDDESKKQKKR

SEQ ID NO: 23321 - protein, 77 aa, Artificial Sequence
  Synthetic polypeptide
SQHFERPTWVDHEVKRLRPSWPTWPSRRARWRRSKRRSGRRNHHGSASETATPAPPPRPPAPAAATRTTRARSRRSA

SEQ ID NO: 23322 - protein, 59 aa, Artificial Sequence
  Synthetic polypeptide
DHPGQHGHRGGHAGGDRRGGPAEEIITEAQARQRRRLLHPDHQHPQPRQGRREQEAEEA

SEQ ID NO: 23323 - protein, 566 aa, Artificial Sequence
  Synthetic polypeptide
SHHHTSIWATEQETLSLKKRTNECLDNNGGCSHVCNDLKIGYECLCPDGFQLVAQRRCEDIDECQDPDTCSQLCVNLEGGYKCQCEEGFQLDPHTKACKAVGSIAYLFFTNRHEVRKMTLDRSEYTSLIPNLRNVVALDTEVASNRIYWSDLSQRMICSTQLDRAHGVSSYDTVISRDIQAPDGLAVDWIHSNIYWTDSVLGTVSVADTKGVKRKTLFRENGSKPRAIVVDPVHGFMYWTDWGTPAKIKKGGLNGVDIYSLVTENIQWPNGITLDLLSGRLYWVDSKLHSISSIDVNGGNRKTILEDEKRLAHPFSLAVFEDKVFWTDIINEAIFSANRLTGSDVNLLAENLLSPEDMVLFHNLTQPRGVNWCERTTLSNGGCQYLCLPAPQINPHSPKFTCACPDGMLLARDMRSCLTEAEAAVATQETSTVRLKVSSTAVRTQHTTTRPVPDTSRLPGATPGLTTVEIVTMSHQALGDVAGRGNEKKPSSVRALSIVLPIVLLVFLCLGVFLLWKNWRLKNINSINFDNPVYQKTTEDEVHICHNQDGYSYPSRQMVSLEDDVA

SEQ ID NO: 23324 - protein, 57 aa, Artificial Sequence
  Synthetic polypeptide
KKGPTNAWTTTAAVPTSAMTLRSATSACAPTASSWWPSEDAKISMSVRIPTPAASSA

SEQ ID NO: 23325 - protein, 38 aa, Artificial Sequence
  Synthetic polypeptide
AVITPPHFNLGNRARDPISKKKDQRMLGQQRRLFPRLQ

SEQ ID NO: 23326 - protein, 654 aa, Artificial Sequence
  Synthetic polypeptide
SHHHTSIWATEQETLSLKKRTNECLDNNGGCSHVCNDLKIGYECLCPDGFQLVAQRRCEDIDECQDPDTCSQLCVNLEGGYKCQCEEGFQLDPHTKACKAVGSIAYLFFTNRHEVRKMTLDRSEYTSLIPNLRNVVALDTEVASNRIYWSDLSQRMICSTQLDRAHGVSSYDTVISRDIQAPDGLAVDWIHSNIYWTDSVLGTVSVADTKGVKRKTLFRENGSKPRAIVVDPVHGFMYWTDWGTPAKIKKGGLNGVDIYSLVTENIQWPNGITLDLLSGRLYWVDSKLHSISSIDVNGGNRKTILEDEKRLAHPFSLAVFEDKVFWTDIINEAIFSANRLTGSDVNLLAENLLSPEDMVLFHNLTQPRGVNWCERTTLSNGGCQYLCLPAPQINPHSPKFTCACPDGMLLARDMRSCLTEAEAAVATQETSTVRLKVSSTAVRTQHTTTRPVPDTSRLPGATPGLTTVEIVTMSHQALGDVAGRGNEKKPSSVRALSIVLPIATELGLWSRGQLCDRACLSLQCSSSSFAWGSSFYGRTGGLRTSTASTLTTPSIRRPQRMRSTFATTRTATATPRDRWSVWRMTWREHLPGVPSLPRTLPETSPALFYSKTEKTKALPARALFYIFIHLGGRTGFGQCPCNGLGWDFGFFLSS

SEQ ID NO: 23327 - protein, 515 aa, Artificial Sequence
  Synthetic polypeptide
SHHHTSIWATEQETLSLKKRTNECLDNNGGCSHVCNDLKIGYECLCPDGFQLVAQRRCEDIDECQDPDTCSQLCVNLEGGYKCQCEEGFQLDPHTKACKAVGSIAYLFFTNRHEVRKMTLDRSEYTSLIPNLRNVVALDTEVASNRIYWSDLSQRMICSTQLDRAHGVSSYDTVISRDIQAPDGLAVDWIHSNIYWTDSVLGTVSVADTKGVKRKTLFRENGSKPRAIVVDPVHGFMYWTDWGTPAKIKKGGLNGVDIYSLVTENIQWPNGITLDLLSGRLYWVDSKLHSISSIDVNGGNRKTILEDEKRLAHPFSLAVFEDKVFWTDIINEAIFSANRLTGSDVNLLAENLLSPEDMVLFHNLTQPREAEAAVATQETSTVRLKVSSTAVRTQHTTTRPVPDTSRLPGATPGLTTVEIVTMSHQALGDVAGRGNEKKPSSVRALSIVLPIVLLVFLCLGVFLLWKNWRLKNINSINFDNPVYQKTTEDEVHICHNQDGYSYPSRQMVSLEDDVA

SEQ ID NO: 23328 - protein, 564 aa, Artificial Sequence
  Synthetic polypeptide
SHHHTSIWATEQETLSLKKRTNECLDNNGGCSHVCNDLKIGYECLCPDGFQLVAQRRCEDIDECQDPDTCSQLCVNLEGGYKCQCEEGFQLDPHTKACKAVGSIAYLFFTNRHEVRKMTLDRSEYTSLIPNLRNVVALDTEVASNRIYWSDLSQRMICSTQLDRAHGVSSYDTVISRDIQAPDGLAVDWIHSNIYWTDSVLGTVSVADTKGVKRKTLFRENGSKPRAIVVDPVHGFMYWTDWGTPAKIKKGGLNGVDIYSLVTENIQWPNGITLDLLSGRLYWVDSKLHSISSIDVNGGNRKTILEDEKRLAHPFSLAVFEDKVFWTDIINEAIFSANRLTGSDVNLLAENLLSPEDMVLFHNLTQPRGVNWCERTTLSNGGCQYLCLPAPQINPHSPKFTCACPDGMLLARDMRSCLTEAEAAVATQETSTVRLKVSSTAVRTQHTTTRPVPDTSRLPGATPGLTTVEIVTMSHQALGDVAGRGNEKKPSSVRALSIVLPIVLLVFLCLGVFLLWKNWRLKNINSINFDNPVYQKTTEDEVHICHNQDGYSYPSMVSLEDDVA

SEQ ID NO: 23329 - protein, 60 aa, Artificial Sequence
  Synthetic polypeptide
GWVWWLTPLISTFWEAERSSPWRRKWPRAFSMRRSRCTREAWSCSSWKLGFRRLGRRTPV

SEQ ID NO: 23330 - protein, 77 aa, Artificial Sequence
  Synthetic polypeptide
AGCGGSRLSSQHFGRPRDPHHGEGSGPEPSQCEGAGAPGRRGAAAAGSWASGGWGGGHPSEGQPPSAHQRAGRAQGD

SEQ ID NO: 23331 - protein, 172 aa, Artificial Sequence
  Synthetic polypeptide
MGVVAHASHLNILGGREILTMEKEVAQSLLNAKEQVHQGGVELQQLEAGLQEAGEEDTRLKASLLQLTRELEELKEIEADLERQEKEVDEDTTVTIPSAVYVAQLYHQVIRPPWPPKVLDSRDLPTSASKYLGLQVCAIASGWIVSRWRETQNFLERNGGVILVPPGLFLLS

SEQ ID NO: 23332 - protein, 160 aa, Artificial Sequence
  Synthetic polypeptide
MGVVAHASHLNILGGREILTMEKEVAQSLLNAKEQVHQGGVELQQLEAGLQEAGEEDTRLKASLLQLTRELEELKEIEADLERQEKEVDEDTTVTIPSAVYVAQLYHQVSKIEWDYECEPGMVKGIHHGPSVAQPIHLDSTQLSRKFISDYLWSLVDTEW

SEQ ID NO: 23333 - protein, 138 aa, Artificial Sequence
  Synthetic polypeptide
MGVVAHASHLNILGGREILTMEKEVAQSLLNAKEQVHQGGVELQQLEAGLQEAGEEDTRLKASLLQLTRELEELKEIEADLERQEKEVDEDTTVTIPSAVYVAQLYHQVSKIEWDYECEPGMVKGRGMFECHGVPRLC

SEQ ID NO: 23334 - protein, 138 aa, Artificial Sequence
  Synthetic polypeptide
MGVVAHASHLNILGGREILTMEKEVAQSLLNAKEQVHQGGVELQQLEAGLQEAGEEDTRLKASLLQLTRELEELKEIEADLERQEKEVDEDTTVTIPSAVYVAQLYHQLLEWPQLGNQRESTYLCQACSFTSVTGWDK

SEQ ID NO: 23335 - protein, 60 aa, Artificial Sequence
  Synthetic polypeptide
AGCGGSRLSSQHFGRPRDPHHGEGSGPEPSQCEGAGAPGRRGAAAAGSWASGGWGGGHPS

SEQ ID NO: 23336 - protein, 60 aa, Artificial Sequence
  Synthetic polypeptide
MGVVAHASHLNILGGREILTMEKEVAQSLLNAKEQVHQGGVELQQLEAGLQEAGEEDTRL

SEQ ID NO: 23337 - protein, 133 aa, Artificial Sequence
  Synthetic polypeptide
MGVVAHASHLNILGGREILTMEKEVAQSLLNAKEQVHQGGVELQQLEAGLQEAGEEDTRLKASLLQLTRELEELKEIEADLERQEKEVDEDTTVTIPSAVYVAQLYHQVSKIEWDYECEPGMVKGSILFGEPF

SEQ ID NO: 23338 - protein, 56 aa, Artificial Sequence
  Synthetic polypeptide
ILAPIPMSAVRLERSSPWRRKWPRAFSMRRSRCTREAWSCSSWKLGFRRLGRRTPV

SEQ ID NO: 23339 - protein, 63 aa, Artificial Sequence
  Synthetic polypeptide
DLRDPHHGEGSGPEPSQCEGAGAPGRRGAAAAGSWASGGWGGGHPSEGQPPSAHQRAGRAQGD

SEQ ID NO: 23340 - protein, 46 aa, Artificial Sequence
  Synthetic polypeptide
DLRDPHHGEGSGPEPSQCEGAGAPGRRGAAAAGSWASGGWGGGHPS

SEQ ID NO: 23341 - protein, 172 aa, Artificial Sequence
  Synthetic polypeptide
SQHFWMPKQADHLRTPPILRTSPTSPSSPRPWTPCRTSWTRPTSCRLTASTRCPPSGTITLPPPPTISCSSSAGRLQASRTFCPPTAPRFSSATRSRVCRASQRRRTRLRRRRRRSWGTQRPTPTTCRPSPRSGSSTQTAWWRPAHCPASHPQTSPTPWPCPRTAGPCLPCS

SEQ ID NO: 23342 - protein, 1292 aa, Artificial Sequence
  Synthetic polypeptide
WLTPVIPTLLDAEAGRSLEDSSYFEDFSNISIFSSSVDSLSDIVDTPDFLPADSLNQVSTIWDDNPAPSTHDKLFQLSRPFAGFEDFLPSHSTPLLVSYQEQSVQSQPEEEDEAEEEEAEELGHTETYADYVPSKSKIGKQHPDRVVETSTLSSVPPPDITYTLALPSDSGALSALQLEAITYACQQHEVLLPSGQRAGFLIGDGAGVGKGRTVAGVILENHLRGRKKALWFSVSNDLKYDAERDLRDIEATGIAVHALSKIKYGDTTTSEGVLFATYSALIGESQAGGQHRTRLRQILDWCGEAFEGVIVFDECHKAKNAGSTKMGKAVLDLQNKLPLARVVYASATGASEPRNMIYMSRLGIWGEGTPFRNFEEFLHAIEKRGVGAMEIVAMDMKVSGMYIARQLSFSGVTFRIEEIPLAPAFECVYNRAALLWAEALNVFQQAADWIGLESRKSLWGQFWSAHQRFFKYLCIAAKVRRLVELAREELARDKCVVIGLQSTGEARTREVLGENDGHLNCFVSAAEGVFLSLIQKHFPSTKRKRDRGAGSKRKRRPRGRGAKAPRLACETAGVIRISDDSSTESDPGLDSDFNSSPESLVDDDVVIVDAVGLPSDDRGPLCLLQRDPHGPGVLERVERLKQDLLDKVRRLGRELPVNTLDELIDQLGGPQRVAEMTGRKGRVVSRPDGTVAFESRAEQGLSIDHVNLREKQRFMSGEKLVAIISEASSSGVSLQADRRVQNQRRRVHMTLELPWSADRAIQQFGRTHRSNQVSAPEYVFLISELAGERRFASIVAKRLESLGALTHGDRRATESRDLSKYNFENKYGTRALHCVLTTILSQTENKVPVPQGYPGGVPTFFRDMKQGLLSVGIGGRESRNGCLDVEKDCSITKFLNRILGLEVHKQNALFQYFSDTFDHLIEMDKREGKYDMGILDLAPGIEEIYEESQQVFLAPGHPQDGQVVFYKISVDRGLKWEDAFAKSLALTGPYDGFYLSYKVRGNKPSCLLAEQNRGQFFTVYKPNIGRQSQLEALDSLRRKFHRVTAEEAKEPWESGYALSLTHCSHSAWNRHCRLAQEGKDCLQGLRLRHHYMLCGALLRVWGRIAAVMADVSSSSYLQIVRLKTKDRKKQVGIKIPEGCVRRVLQELRLMDADVKRRQAPALGCPAPPAPRPLALPCGPGEVLDLTYSPPAEAFPPPPHFSFPAPLSLDAGPGVVPLGTPDAQADPAALAHQGCDINFKEVLEDMLRSLHAGPPSEGALGEGAGAGGAAGGGPERQSVIQFSPPFPGAQAPL

SEQ ID NO: 23343 - protein, 1282 aa, Artificial Sequence
  Synthetic polypeptide
WLTPVIPTLLDAEAGRSLEDSSYFEDFSNISIFSSSVDSLSDIVDTPDFLPADSLNQVSTIWDDNPAPSTHDKLFQLSRPFAGFEDFLPSHSTPLLVSYQEQSVQSQPEEEDEAEEEEAEELGHTETYADYVPSKSKIGKQHPDRVVETSTLSSVPPPDITYTLALPSDSGALSALQLEAITYACQQHEVLLPSGQRAGFLIGDGAGVGKGRTVAGVILENHLRGRKKALWFSVSNDLKYDAERDLRDIEATGIAVHALSKIKYGDTTTSEGVLFATYSALIGESQAGGQHRTRLRQILDWCGEAFEGVIVFDECHKAKNAGSTKMGKAVLDLQNKLPLARVVYASATGASEPRNMIYMSRLGIWGEGTPFRNFEEFLHAIEKRGVGAMEIVAMDMKVSGMYIARQLSFSGVTFRIEEIPLAPAFECVYNRAALLAADWIGLESRKSLWGQFWSAHQRFFKYLCIAAKVRRLVELAREELARDKCVVIGLQSTGEARTREVLGENDGHLNCFVSAAEGVFLSLIQKHFPSTKRKRDRGAGSKRKRRPRGRGAKAPRLACETAGVIRISDDSSTESDPGLDSDFNSSPESLVDDDVVIVDAVGLPSDDRGPLCLLQRDPHGPGVLERVERLKQDLLDKVRRLGRELPVNTLDELIDQLGGPQRVAEMTGRKGRVVSRPDGTVAFESRAEQGLSIDHVNLREKQRFMSGEKLVAIISEASSSGVSLQADRRVQNQRRRVHMTLELPWSADRAIQQFGRTHRSNQVSAPEYVFLISELAGERRFASIVAKRLESLGALTHGDRRATESRDLSKYNFENKYGTRALHCVLTTILSQTENKVPVPQGYPGGVPTFFRDMKQGLLSVGIGGRESRNGCLDVEKDCSITKFLNRILGLEVHKQNALFQYFSDTFDHLIEMDKREGKYDMGILDLAPGIEEIYEESQQVFLAPGHPQDGQVVFYKISVDRGLKWEDAFAKSLALTGPYDGFYLSYKVRGNKPSCLLAEQNRGQFFTVYKPNIGRQSQLEALDSLRRKFHRVTAEEAKEPWESGYALSLTHCSHSAWNRHCRLAQEGKDCLQGLRLRHHYMLCGALLRVWGRIAAVMADVSSSSYLQIVRLKTKDRKKQVGIKIPEGCVRRVLQELRLMDADVKRRQAPALGCPAPPAPRPLALPCGPGEVLDLTYSPPAEAFPPPPHFSFPAPLSLDAGPGVVPLGTPDAQADPAALAHQGCDINFKEVLEDMLRSLHAGPPSEGALGEGAGAGGAAGGGPERQSVIQFSPPFPGAQAPL

SEQ ID NO: 23344 - protein, 49 aa, Artificial Sequence
  Synthetic polypeptide
SQHFWMPKQADHLRTPPILRTSPTSPSSPRPWTPCRTSWTRPTSCRLTA

SEQ ID NO: 23345 - protein, 54 aa, Artificial Sequence
  Synthetic polypeptide
WLTPVIPTLLDAEAGRSLEDSSYFEDFSNISIFSSSVDSLSDIVDTPDFLPADS

SEQ ID NO: 23346 - protein, 48 aa, Artificial Sequence
  Synthetic polypeptide
SQHFWMPKQADHLRTPPILRTSPTSPSSPRPWTPCRTSWTRPTSCRLT

SEQ ID NO: 23347 - protein, 32 aa, Artificial Sequence
  Synthetic polypeptide
SQHFWMPKQADHLRTPPILRTSPTSPSSPRPW

SEQ ID NO: 23348 - protein, 37 aa, Artificial Sequence
  Synthetic polypeptide
WLTPVIPTLLDAEAGRSLEDSSYFEDFSNISIFSSSV

SEQ ID NO: 23349 - protein, 31 aa, Artificial Sequence
  Synthetic polypeptide
GWAVLLRRPPRSSCRIVFVTPGVRGSLPYTA

SEQ ID NO: 23350 - protein, 442 aa, Artificial Sequence
  Synthetic polypeptide
AGRCCSGGLPEVPAESSSSPPGSEVASLTQPEKSTGRVPTQEPTHREPTRQAASQESEEAGGTGGPPAGVRSIMKRKEEVADPTAHRRSLQFVGVNGGYESSSEDSSTAENISDNDSTENEAPEPRERVPSVAEAPQLRPAGTAAAKTSRQECQLSRESQHIPTAEGASGSNTEEEIRMELSPDLISACLALEKYLDNPNALTERELKVAYTTVLQEWLRLACRSDAHPELVRRHLVTFRAMSARLLDYVVNIADSNGNTALHYSVSHANFPVVQQLLDSGVCKVDKQNRAGYSPIMLTALATLKTQDDIETVLQLFRLGNINAKASQAGQTALMLAVSHGRVDVVKALLACEADVNVQDDDGSTALMCACEHGHKEIAGLLLAVPSCDISLTDRDGSTALMVALDAGQSEIASMLYSRMNIKCSFAPMSDDESPTSSSAEE

SEQ ID NO: 23351 - protein, 24 aa, Artificial Sequence
  Synthetic polypeptide
MGGAAPEASQKFLPNRLRHPRGPR

SEQ ID NO: 23352 - protein, 450 aa, Artificial Sequence
  Synthetic polypeptide
AGRCCSGGLPEVPAESSSSPPGSEVASLTQPEKSTGRVPTQEPTHREPTRQAASQESEEAGGTAPPLSSPPGGPPAGVRSIMKRKEEVADPTAHRRSLQFVGVNGGYESSSEDSSTAENISDNDSTENEAPEPRERVPSVAEAPQLRPAGTAAAKTSRQECQLSRESQHIPTAEGASGSNTEEEIRMELSPDLISACLALEKYLDNPNALTERELKVAYTTVLQEWLRLACRSDAHPELVRRHLVTFRAMSARLLDYVVNIADSNGNTALHYSVSHANFPVVQQLLDSGVCKVDKQNRAGYSPIMLTALATLKTQDDIETVLQLFRLGNINAKASQAGQTALMLAVSHGRVDVVKALLACEADVNVQDDDGSTALMCACEHGHKEIAGLLLAVPSCDISLTDRDGSTALMVALDAGQSEIASMLYSRMNIKCSFAPMSDDESPTSSSAEE

SEQ ID NO: 23353 - protein, 432 aa, Artificial Sequence
  Synthetic polypeptide
AGRCCSGGLPEVPAESSSSPPGSEVASLTQPEKSTGRVPTQEPTHREPTRQAASQESEEAGGTGGPPAGVRSIMKRKEEVADPTAHRRSLQFVGVNGGYESSSEDSSTAENISDNDSTENEAPEPRERVPSVAEAPQLRPAGTAAAKTSRQECQLSRESQHIPTAEGASGSNTEEEIRMELSPDLISACLALEKYLDNPNALTERELKVAYTTVLQEWLRLACRSDAHPELVRRHLVTFRAMSARLLDYVVNIADSNGNTALHYSVSHANFPVVQQLLDSGVCKVDKQNRAGYSPIMLTALATLKTQDDIETVLQLFRLGNINAKASQAGQTALMLAVSHGRVDVVKALLACEADVNVQDDDGSTALMCACEHGHKEIAGLLLAVPSCDISLTDRDGSTALMVALDAGQSEIASMLYSRMNIKCSVSLNPAG

SEQ ID NO: 23354 - protein, 21 aa, Artificial Sequence
  Synthetic polypeptide
PGDPVSSQGPHERRREGLLLF

SEQ ID NO: 23355 - protein, 1301 aa, Artificial Sequence
  Synthetic polypeptide
VMDPRRESFLGDLETQCPHRALMRGGGRDSSYFEDFSNISIFSSSVDSLSDIVDTPDFLPADSLNQVSTIWDDNPAPSTHDKLFQLSRPFAGFEDFLPSHSTPLLVSYQEQSVQSQPEEEDEAEEEEAEELGHTETYADYVPSKSKIGKQHPDRVVETSTLSSVPPPDITYTLALPSDSGALSALQLEAITYACQQHEVLLPSGQRAGFLIGDGAGVGKGRTVAGVILENHLRGRKKALWFSVSNDLKYDAERDLRDIEATGIAVHALSKIKYGDTTTSEGVLFATYSALIGESQAGGQHRTRLRQILDWCGEAFEGVIVFDECHKAKNAGSTKMGKAVLDLQNKLPLARVVYASATGASEPRNMIYMSRLGIWGEGTPFRNFEEFLHAIEKRGVGAMEIVAMDMKVSGMYIARQLSFSGVTFRIEEIPLAPAFECVYNRAALLWAEALNVFQQAADWIGLESRKSLWGQFWSAHQRFFKYLCIAAKVRRLVELAREELARDKCVVIGLQSTGEARTREVLGENDGHLNCFVSAAEGVFLSLIQKHFPSTKRKRDRGAGSKRKRRPRGRGAKAPRLACETAGVIRISDDSSTESDPGLDSDFNSSPESLVDDDVVIVDAVGLPSDDRGPLCLLQRDPHGPGVLERVERLKQDLLDKVRRLGRELPVNTLDELIDQLGGPQRVAEMTGRKGRVVSRPDGTVAFESRAEQGLSIDHVNLREKQRFMSGEKLVAIISEASSSGVSLQADRRVQNQRRRVHMTLELPWSADRAIQQFGRTHRSNQVSAPEYVFLISELAGERRFASIVAKRLESLGALTHGDRRATESRDLSKYNFENKYGTRALHCVLTTILSQTENKVPVPQGYPGGVPTFFRDMKQGLLSVGIGGRESRNGCLDVEKDCSITKFLNRILGLEVHKQNALFQYFSDTFDHLIEMDKREGKYDMGILDLAPGIEEIYEESQQVFLAPGHPQDGQVVFYKISVDRGLKWEDAFAKSLALTGPYDGFYLSYKVRGNKPSCLLAEQNRGQFFTVYKPNIGRQSQLEALDSLRRKFHRVTAEEAKEPWESGYALSLTHCSHSAWNRHCRLAQEGKDCLQGLRLRHHYMLCGALLRVWGRIAAVMADVSSSSYLQIVRLKTKDRKKQVGIKIPEGCVRRVLQELRLMDADVKRRQAPALGCPAPPAPRPLALPCGPGEVLDLTYSPPAEAFPPPPHFSFPAPLSLDAGPGVVPLGTPDAQADPAALAHQGCDINFKEVLEDMLRSLHAGPPSEGALGEGAGAGGAAGGGPERQSVIQFSPPFPGAQAPL

SEQ ID NO: 23356 - protein, 163 aa, Artificial Sequence
  Synthetic polypeptide
EEAGGTPPILRTSPTSPSSPRPWTPCRTSWTRPTSCRLTASTRCPPSGTITLPPPPTISCSSSAGRLQASRTFCPPTAPRFSSATRSRVCRASQRRRTRLRRRRRRSWGTQRPTPTTCRPSPRSGSSTQTAWWRPAHCPASHPQTSPTPWPCPRTAGPCLPCS

SEQ ID NO: 23357 - protein, 1291 aa, Artificial Sequence
  Synthetic polypeptide
VMDPRRESFLGDLETQCPHRALMRGGGRDSSYFEDFSNISIFSSSVDSLSDIVDTPDFLPADSLNQVSTIWDDNPAPSTHDKLFQLSRPFAGFEDFLPSHSTPLLVSYQEQSVQSQPEEEDEAEEEEAEELGHTETYADYVPSKSKIGKQHPDRVVETSTLSSVPPPDITYTLALPSDSGALSALQLEAITYACQQHEVLLPSGQRAGFLIGDGAGVGKGRTVAGVILENHLRGRKKALWFSVSNDLKYDAERDLRDIEATGIAVHALSKIKYGDTTTSEGVLFATYSALIGESQAGGQHRTRLRQILDWCGEAFEGVIVFDECHKAKNAGSTKMGKAVLDLQNKLPLARVVYASATGASEPRNMIYMSRLGIWGEGTPFRNFEEFLHAIEKRGVGAMEIVAMDMKVSGMYIARQLSFSGVTFRIEEIPLAPAFECVYNRAALLAADWIGLESRKSLWGQFWSAHQRFFKYLCIAAKVRRLVELAREELARDKCVVIGLQSTGEARTREVLGENDGHLNCFVSAAEGVFLSLIQKHFPSTKRKRDRGAGSKRKRRPRGRGAKAPRLACETAGVIRISDDSSTESDPGLDSDFNSSPESLVDDDVVIVDAVGLPSDDRGPLCLLQRDPHGPGVLERVERLKQDLLDKVRRLGRELPVNTLDELIDQLGGPQRVAEMTGRKGRVVSRPDGTVAFESRAEQGLSIDHVNLREKQRFMSGEKLVAIISEASSSGVSLQADRRVQNQRRRVHMTLELPWSADRAIQQFGRTHRSNQVSAPEYVFLISELAGERRFASIVAKRLESLGALTHGDRRATESRDLSKYNFENKYGTRALHCVLTTILSQTENKVPVPQGYPGGVPTFFRDMKQGLLSVGIGGRESRNGCLDVEKDCSITKFLNRILGLEVHKQNALFQYFSDTFDHLIEMDKREGKYDMGILDLAPGIEEIYEESQQVFLAPGHPQDGQVVFYKISVDRGLKWEDAFAKSLALTGPYDGFYLSYKVRGNKPSCLLAEQNRGQFFTVYKPNIGRQSQLEALDSLRRKFHRVTAEEAKEPWESGYALSLTHCSHSAWNRHCRLAQEGKDCLQGLRLRHHYMLCGALLRVWGRIAAVMADVSSSSYLQIVRLKTKDRKKQVGIKIPEGCVRRVLQELRLMDADVKRRQAPALGCPAPPAPRPLALPCGPGEVLDLTYSPPAEAFPPPPHFSFPAPLSLDAGPGVVPLGTPDAQADPAALAHQGCDINFKEVLEDMLRSLHAGPPSEGALGEGAGAGGAAGGGPERQSVIQFSPPFPGAQAPL

SEQ ID NO: 23358 - protein, 63 aa, Artificial Sequence
  Synthetic polypeptide
VMDPRRESFLGDLETQCPHRALMRGGGRDSSYFEDFSNISIFSSSVDSLSDIVDTPDFLPADS

SEQ ID NO: 23359 - protein, 40 aa, Artificial Sequence
  Synthetic polypeptide
EEAGGTPPILRTSPTSPSSPRPWTPCRTSWTRPTSCRLTA

SEQ ID NO: 23360 - protein, 39 aa, Artificial Sequence
  Synthetic polypeptide
EEAGGTPPILRTSPTSPSSPRPWTPCRTSWTRPTSCRLT

SEQ ID NO: 23361 - protein, 46 aa, Artificial Sequence
  Synthetic polypeptide
VMDPRRESFLGDLETQCPHRALMRGGGRDSSYFEDFSNISIFSSSV

SEQ ID NO: 23362 - protein, 23 aa, Artificial Sequence
  Synthetic polypeptide
EEAGGTPPILRTSPTSPSSPRPW

SEQ ID NO: 23363 - protein, 9 aa, Artificial Sequence
  Synthetic polypeptide
GCSKGILLL

SEQ ID NO: 23364 - protein, 302 aa, Artificial Sequence
  Synthetic polypeptide
PRAVLKGFFCYDSTYAKPYPGPEAASRVPPALVYALVTAGPTLTILLGELARAFFPAPPSAVPVIGESTIVSGACCRFSPPVRRLVRFLGVYSFGLFTTTIFANAGQVVTGNPTPHFLSVCRPNYTALGCLPPSPDRPGPDRFVTDQGACAGSPSLVAAARRAFPCKDAALCAYAVTYTAMYVTLVFRVKGSRLVKPSLCLALLCPAFLVGVVRVAEYRNHWSDVLAGFLTGAAIATFLVTCVVHNFQSRPPSGRRLSPWEDLGQAPTMDSPLEKNPRSAGRIRHRHGSPHPSRRTAPAVAT

SEQ ID NO: 23365 - protein, 43 aa, Artificial Sequence
  Synthetic polypeptide
PRAVLKGFFCYDSTYAKPYPGPEAASRVPPALVYALVTAGPTL

SEQ ID NO: 23366 - protein, 50 aa, Artificial Sequence
  Synthetic polypeptide
PRAVLKGFFCYDSTYAKPYPGPEAASRVPPALVYALVTAGPTLTILLGEL

SEQ ID NO: 23367 - protein, 411 aa, Artificial Sequence
  Synthetic polypeptide
PRAVLKGFFCYDSTYAKPYPGPEAASRVPPALVYALVTAGPTLTILLGELARAFFPAPPSAVPVIGESTIVSGACCRFSPPVRRLVRFLGVYSFGLFTTTIFANAGQVVTGNPTPHFLSVCRPNYTALGCLPPSPDRPGPDRFVTDQGACAGSPSLVAAARRAFPCKDAALCAYAVTYTAMYVTLVFRVKGSRLVKPSLCLALLCPAFLVGVVRVAEYRNHWSDVLAGFLTGAAIATFLVTCVVHNFQSRPPSGRRLSPWEDLGQAPTMDSPLEKLSVAQEPEVCRPHSTPARLTPSKSQNCARRGHLIPSCVSSRAPAMCSSPRVPRPRLRSEPTPLPLPLPLPAPTPSQGPSPSSPGPGGPGGGGGRGRKLLLPTPLLRDLYTLSGLYPSPFHRDNFSPYLFASRDHLL

SEQ ID NO: 23368 - protein, 28 aa, Artificial Sequence
  Synthetic polypeptide
EPCLRSRARSGPNHRVTLRIQWPLRMWL

SEQ ID NO: 23369 - protein, 466 aa, Artificial Sequence
  Synthetic polypeptide
PQSHLEDSVAFEDVAVNFTLEEWALLDPSQKNLYRDVMRETFRNLASVGKQWEDQNIEDPFKIPRRNISHIPERLCESKEGGQGEETFSQIPDGILNKKTPGVKPCESSVCGEVGMGPSSLNRHIRDHTGREPNEYQEYGKKSYTRNQCGRALSYHRSFPVRERTHPGGKPYDCKECGETFISLVSIRRHMLTHRGGVPYKCKVCGKAFDYPSLFRIHERSHTGEKPYECKQCGKAFSCSSYIRIHERTHTGDKPYECKQCGKAFSCSKYIRIHERTHTGEKPYECKQCGKAFRCASSVRSHERTHTGEKLFECKECGKALTCLASVRRHMIKHTGNGPYKCKVCGKAFDFPSSFRIHERTHTGEKPYDCKQCGKAFSCSSSFRKHERIHTGEKPYKCTKCGKAFSRSSYFRIHERTHTGEKPYECKQCGKAFSRSTYFRVHEKIHTGEKPYENPNPNASVVPVLS

SEQ ID NO: 23370 - protein, 72 aa, Artificial Sequence
  Synthetic polypeptide
PQSHLEDSVAFEDVAVNFTLEEWALLDPSQKNLYRDVMRETFRNLASVGKQWEDQNIEDPFKIPRRNIRETL

SEQ ID NO: 23371 - protein, 17 aa, Artificial Sequence
  Synthetic polypeptide
SQLLRRPRTQWPLRMWL

SEQ ID NO: 23372 - protein, 21 aa, Artificial Sequence
  Synthetic polypeptide
PGVVAGAFNPSYSGGRGPSGL

SEQ ID NO: 23373 - protein, 751 aa, Artificial Sequence
  Synthetic polypeptide
HGETPSPLKIQNISRAWWRAPLIPATPEAEDPVAFEDVAVNFTQEEWTLLDISQKNLFREVMLETFRNLTSIGKKWSDQNIEYEYQNPRRSFRSLIEEKVNEIKEDSHCGETFTQVPDDRLNFQEKKASPEVKSCDSFVCAEVGIGNSSFNMSIRGDTGHKAYEYQEYGPKPYKCQQPKNKKAFRYRPSIRTQERDHTGEKPYACKVCGKTFIFHSSIRRHMVMHSGDGTYKCKFCGKAFHSFSLYLIHERTHTGEKPYECKQCGKSFTYSATLQIHERTHTGEKPYECSKCDKAFHSSSSYHRHERSHMGEKPYQCKECGKAFAYTSSLRRHERTHSGKKPYECKQYGEGLSYLISFQTHIRMNSGERPYKCKICGKGFYSAKSFQTHEKTHTGEKRYKCKQCGKAFNLSSSFRYHERIHTGEKPYECKQCGKAFRSASQLRVHGGTHTGEKPYECKECGKAFRSTSHLRVHGRTHTGEKPYECKECGKAFRYVKHLQIHERTEKHIRMPSGERPYKCSICEKGFYSAKSFQTHEKTHTGEKPYECNQCGKAFRCCNSLRYHERTHTGEKPYECKQCGKAFRSASHLRMHERTHTGEKPYECKQCGKAFSCASNLRKHGRTHTGEKPYECKQCGKAFRSASNLQMHERTHTGEKPYECKECEKAFCKFSSFQIHERKHRGEKPYECKHCGNGFTSAKILQIHARTHIGEKHYECKECGKAFNYFSSLHIHARTHMGEKPYECKDCGKAFS

SEQ ID NO: 23374 - protein, 74 aa, Artificial Sequence
  Synthetic polypeptide
PVIPAFSEAEGNSTTEEVTAQKCHPAGGCVIQRREAENVYGDGVLRVWHAGNAGQRAGEAFPSVPGPRVLLSAD

SEQ ID NO: 23375 - protein, 346 aa, Artificial Sequence
  Synthetic polypeptide
MSSQRFPRPREIQLLRRLRHKNVIQLVDVLYNEEKQKMYMVMEYCVCGMQEMLDSVPEKRFPVCQAHGYFCQLIDGLEYLHSQGIVHKDIKPGNLLLTTGGTLKISDLGVAEALHPFAADDTCRTSQGSPAFQPPEIANGLDTFSGFKVDIWSAGVTLYNITTGLYPFEGDNIYKLFENIGKGSYAIPGDCGPPLSDLLKGMLEYEPAKRFSIRQIRQHSWFRKKHPPAEAPVPIPPSPDTKDRWRSMTVVPYLEDLHGADEDEDLFDIEDDIIYTQDFTVPGQVPEEEASHNGQRRGLPKAVCMNGTEAAQLSTKSRAEGRAPNPARKACSASSKIRRLSACKQQ

SEQ ID NO: 23376 - protein, 14 aa, Artificial Sequence
  Synthetic polypeptide
CHPSVFRGRGKFNY

SEQ ID NO: 23377 - protein, 43 aa, Artificial Sequence
  Synthetic polypeptide
GRLWWLTPVIPALWEAEAGGSRGQEIETILANMRSYGRETLRK

SEQ ID NO: 23378 - protein, 9 aa, Artificial Sequence
  Synthetic polypeptide
HEVLWERDS

SEQ ID NO: 23379 - protein, 30 aa, Artificial Sequence
  Synthetic polypeptide
GRLWWLTPVIPALWEAEAGGSREVLWERDS

SEQ ID NO: 23380 - protein, 23 aa, Artificial Sequence
  Synthetic polypeptide
SQHFGRLRQADHERSYGRETLRK

SEQ ID NO: 23381 - protein, 314 aa, Artificial Sequence
  Synthetic polypeptide
GRRITRGLMGERLLESKKDHQHGEILTQVPDDMLKKKTPRVKSCGEVSVGHASLNRHHRADTGHKPYEYQEYGQKPYKCTYCKKAFSDLPYFRTHEWAHTGGKPYDCEECGKSFISRSSIRRHRIMHSGDGPYKCNFCGKALMCLSLYLIHKRTHTGEKPYECKQCGKAFSHSGSLRIHERTHTGEKPYECSECGKAFHSSTCLHAHKITHTGEKPYECKQCGKAFVSFNSVRYHERTHTGEKPYECKQCGKAFRSASHLRTHGRTHTGEKPYECKQCGKAFGCASSVKIHERTHTGEKPCSSNTSKGQGEKIA

SEQ ID NO: 23382 - protein, 125 aa, Artificial Sequence
  Synthetic polypeptide
GRARWLTPVIPALWEADAGGSRGQEIETILANMGTGFGRQKTAPRAARWNGCSCFCSRNGSVERPGGTRGVRTTGHPAARPAAATAVAAGAAAAPARPPAWASTSRTPCGSQKSTLTSSQSSWWL

SEQ ID NO: 23383 - protein, 52 aa, Artificial Sequence
  Synthetic polypeptide
SQHFGRPTRADHEVRRSRPSWLTWGPASADRKPRHALQGGTAAAASAAETAP

SEQ ID NO: 23384 - protein, 93 aa, Artificial Sequence
  Synthetic polypeptide
HGDRLRQTENRATRCKVERLQLLLQQKRLRRKARRDARGPYHWSPSRKAGRSDSSSSGGGGSPSEASGLGLDFEDSVWKPEVNPDIKSEFVVA

SEQ ID NO: 23385 - protein, 34 aa, Artificial Sequence
  Synthetic polypeptide
EFKTRHPWCRRCTRTSQLGVPRWFACTQDSGTWS

SEQ ID NO: 23386 - protein, 63 aa, Artificial Sequence
  Synthetic polypeptide
SRRIAEHRSSRPDTLGAGGAPELLSLVFPGGSPVPRTAAPGARVVGGADTCGRHLGEGGHQPF

SEQ ID NO: 23387 - protein, 357 aa, Artificial Sequence
  Synthetic polypeptide
QMQWLMPVITALWETEAGGSLSIGVQDQTPLVQEVHQNFSAWCSQVVRLYPGQRHLELEWSVGPIPVGDTWGKEVISRFDTPLETKGRFYTDSNGREILERRRDYRPTWKLNQTEPVAGNYYPVNTRIYITDGNMQLTVLTDRSQGGSSLRDGSLELMVHRRLLKDDGRGVSEPLMENGSGAWVRGRHLVLLDTAQAAAAGHRLLAEQEVLAPQVVLAPGGGAAYNLGAPPRTQFSGLRRDLPPSVHLLTLASWGPEMVLLRLEHQFAVGEDSGRNLSAPVTLNLRDLFSTFTITRLQETTLVANQLREAASRLKWTTNTGPTPHQTPYQLDPANITLEPMEIRTFLASVQWKEVDG

SEQ ID NO: 23388 - protein, 673 aa, Artificial Sequence
  Synthetic polypeptide
LGVMQAKGSSVHVLYSTPACYLWELNKANLTWSVKHDDFFPYADGPHQFWTGYFSSRPALKRYERLSYNFLQVCNQLEALVGLAANVGPYGSGDSAPLNEAMAVLQHHDAVSGTSRQHVANDYARQLAAGWGPCEVLLSNALARLRGFKDHFTFCQQLNISICPLSQTAARFQVIVYNPLGRKVNWMVRLPVSEGVFVVKDPNGRTVPSDVVIFPSSDSQAHPPELLFSASLPALGFSTYSVAQVPRWKPQARAPQPIPRRSWSPALTIENEHIRATFDPDTGLLMEIMNMNQQLLLPVRQTFFWYNASIGDNESDQASGAYIFRPNQQKPLPVSRWAQIHLVKTPLVQEVHQNFSAWCSQVVRLYPGQRHLELEWSVGPIPVGDTWGKEVISRFDTPLETKGRFYTDSNGREILERRRDYRPTWKLNQTEPVAGNYYPVNTRIYITDGNMQLTVLTDRSQGGSSLRDGSLELMVHRRLLKDDGRGVSEPLMENGSGAWVRGRHLVLLDTAQAAAAGHRLLAEQEVLAPQVVLAPGGGAAYNLGAPPRTQFSGLRRDLPPSVHLLTLASWGPEMVLLRLEHQFAVGEDSGRNLSAPVTLNLRDLFSTFTITRLQETTLVANQLREAASRLKWTTNTGPTPHQTPYQLDPANITLEPMEIRTFLASVQWKEVDG

SEQ ID NO: 23389 - protein, 64 aa, Artificial Sequence
  Synthetic polypeptide
AGQITRSGIRDQPDQHGETLSLLKIQKLAGCDAGKRKQCPCSLLHPRLLPLGAEQGQPHLVSET

SEQ ID NO: 23390 - protein, 21 aa, Artificial Sequence
  Synthetic polypeptide
AEIAPLHSSLDREEAGTTVTG

SEQ ID NO: 23391 - protein, 332 aa, Artificial Sequence
  Synthetic polypeptide
SQLLGRLRQENRLNPGGGACSEPRSRHCTLAWIEKKLEPLSQDEDQHADLTQSRRPLTSCTIFLGYTSNLISSGIRETIRYLVQHNMVDVLVTTAGGVEEDLIKCLAPTYLGEFSLRGKELRENGINRIGNLLVPNENYCKFEDWLMPILDQMVMEQNTEGVKWTPSKMIARLGKEINNPESVYYWAQKNHIPVFSPALTDGSLGDMIFFHSYKNPGLVLDIVEDLRLINTQAIFAKCTGMIILGGGVVKHHIANANLMRNGADYAVYINTAQEFDGSDSGARPDEAVSWGKIRVDAQPVKVYADASLVFPLLVAETFAQKMDAFMHEKNED

SEQ ID NO: 23392 - protein, 19 aa, Artificial Sequence
  Synthetic polypeptide
PGSRRSWNHCHRMKTSTRT

SEQ ID NO: 23393 - protein, 285 aa, Artificial Sequence
  Synthetic polypeptide
SQLLGRLRQENRLNPGGGACSEPRSRHCTLAWIEKKLEPLSQDEDQHADLTQSRRPLTSCTIFLGYTSNLISSGIRETIRYLVQHNMVDVLVTTAGGVEEDLIKCLAPTYLGEFSLRGKELRENGINRIGNLLVPNENYCKFEDWLMPILDQMVMEQNTEGVKWTPSKMIARLGKEINNPESVYYWAQKNHIPVFSPALTDGSLGDMIFFHSYKNPGLVLDIVEAQEFDGSDSGARPDEAVSWGKIRVDAQPVKVYADASLVFPLLVAETFAQKMDAFMHEKNED

SEQ ID NO: 23394 - protein, 95 aa, Artificial Sequence
  Synthetic polypeptide
SQLLGRLRQENRLNPGGGACSEPRSRHCTLAWIEKKLEPLSQDEDQHADLTQSRRPLTSCTIFLGYTSNLISSGIRETIRYLVQHNMDRKPAGAQ

SEQ ID NO: 23395 - protein, 240 aa, Artificial Sequence
  Synthetic polypeptide
SQLLGRLRQENRLNPGGGACSEPRSRHCTLAWIEKKLEPLSQDEDQHADLTQSRRPLTSCTIFLGYTSNLISSGIRETIRYLVQHNMVDVLVTTAGGVEEDLIKCLAPTYLGEFSLRGKELRENGINRIGNLLVPNENYCKFEDWLMPILDQMVMEQNTEGVKWTPSKMIARLGKEINNPESVYYWAQKNHIPVFSPALTDGSLGDMIFFHSYKNPGLVLDIVEAERGRLRCLHQHSPGV

SEQ ID NO: 23396 - protein, 102 aa, Artificial Sequence
  Synthetic polypeptide
SQLLGRLRQENRLNPGGGACSEPRSRHCTLAWIEKKLEPLSQDEDQHADLTQSRRPLTSCTIFLGYTSNLISSGIRGRIGDHSWRRGGRPHQVPGAHILGRV

SEQ ID NO: 23397 - protein, 98 aa, Artificial Sequence
  Synthetic polypeptide
SQLLGRLRQENRLNPGGGACSEPRSRHCTLAWIEKKLEPLSQDEDQHADLTQSRRPLTSCTIFLGYTSNLISSGIRETIRYLVQHNMQSSLIRVTGQG

SEQ ID NO: 23398 - protein, 212 aa, Artificial Sequence
  Synthetic polypeptide
SQLLGRLRQENRLNPGGGACSEPRSRHCTLAWIEKKLEPLSQDEDQHADLTQSRRPLTSCTIFLGYTSNLISSGIRETIRYLVQHNMVDVLVTTAGGVEEDLIKCLAPTYLGEFSLRGKELRENGINRIGNLLVPNENYCKFEDWLMPILDQMVMEQNTEGVKWTPSKMIARLGKEINNPESVYYWAQKNHIPVFSPALTDGSLGDMIFFHS

SEQ ID NO: 23399 - protein, 95 aa, Artificial Sequence
  Synthetic polypeptide
SQLLGRLRQENRLNPGGGACSEPRSRHCTLAWIEKKLEPLSQDEDQHADLTQSRRPLTSCTIFLGYTSNLISSGIRETIRYLVQHNMVGTWWTYW

SEQ ID NO: 23400 - protein, 547 aa, Artificial Sequence
  Synthetic polypeptide
GRAQWLTPVIPALWKAEAGGSRGKCSAAALDVLANVFREELLPHLLPLLKGLLFHPEWVVKESGILVLGAIAEGCMQGMVPYLPELIPHLIQCLSDKKALVRSIACWTLSRYAHWVVSQPPDMHLKPLMTELLKRILDGNKRVQEAACSAFATLEEEACTELVPYLSYILDTLVFAFGKYQHKNLLILYDAIGTLADSVGHHLNQPEYIQKLMPPLIQKWNELKDEDKDLFPLLECLSSVATALQSGFLPYCEPVYQRCVTLVQKTLAQAMMYTQHPEQYEAPDKDFMIVALDLLSGLAEGLGGHVEQLVARSNIMTLLFQCMQDSMPEVRQSSFALLGDLTKACFIHVKPCIAEFMPILGTNLNPEFISVCNNATWAIGEICMQMGAEMQPYVQMVLNNLVEIINRPNTPKTLLENTGRLTSPSAIPAITIGRLGYVCPQEVAPMLQQFIRPWCTSLRNIRDNEEKDSAFRGICMMIGVNPGGVVQDFIFFCDAVASWVSPKDDLRDMFYKILHGFKDQVGEDNWQQFSEQFPPLLKERLAAFYGV

SEQ ID NO: 23401 - protein, 76 aa, Artificial Sequence
  Synthetic polypeptide
SQHFGRLRRADHEGSAQRLHWTSSPMSSGRNCCPTYSHYSKASSSTPSGWSRSRASWCWAPLLRAACRAWCPTCLS

SEQ ID NO: 23402 - protein, 55 aa, Artificial Sequence
  Synthetic polypeptide
GGRITREVLSGCTGRPRQCLPGGTAAPPTPTTQRPPLPPRVGGQGVGHPGAGRHC

SEQ ID NO: 23403 - protein, 537 aa, Artificial Sequence
  Synthetic polypeptide
GRAQWLTPVIPALWKAEAGGSRGKCSAAALDVLANVFREELLPHLLPLLKGLLFHPEWVVKESGILVLGAIAEGCMQGMVPYLPELIPHLIQCLSDKKALVRSIACWTLSRYAHWVVSQPPDMHLKPLMTELLKRILDGNKRVQEAACSAFATLEEEACTELVPYLSYILDTLVFAFGKYQHKNLLILYDAIGTLADSVGHHLNQPEYIQKLMPPLIQKWNELKDEDKDLFPLLECLSSVATALQSGFLPYCEPVYQRCVTLVQKTLAQAMMYTQHPEQYEAPDKDFMIVALDLLSGLAEGLGGHVEQLVARSNIMTLLFQCMQDSMPEVRQSSFALLGDLTKACFIHVKPCIAEFMPILGTNLNPEFISVCNNATWAIGEICMQMGAEMQPYVQMVLNNLVEIINRPNTPKTLLENTAITIGRLGYVCPQEVAPMLQQFIRPWCTSLRNIRDNEEKDSAFRGICMMIGVNPGGVVQDFIFFCDAVASWVSPKDDLRDMFYKILHGFKDQVGEDNWQQFSEQFPPLLKERLAAFYGV

SEQ ID NO: 23404 - protein, 416 aa, Artificial Sequence
  Synthetic polypeptide
GRAQWLTPVIPALWKAEAGGSRGKCSAAALDVLANVFREELLPHLLPLLKGLLFHPEWVVKESGILVLGAIAEGCMQGMVPYLPELIPHLIQCLSDKKALVRSIACWTLSRYAHWVVSQPPDMHLKPLMTELLKRILDGNKRVQEAACSAFATLEEEACTELVPYLSYILDTLVFAFGKYQHKNLLILYDAIGTLADSVGHHLNQPEYIQKLMPPLIQKWNELKDEDKDLFPLLECLSSVATALQSGFLPYCEPVYQRCVTLVQKTLAQAMMYTQHPEQYEAPDKDFMIVALDLLSGLAEGLGGHVEQLVARSNIMTLLFQCMQDSMPEVRQSSFALLGDLTKACFIHVKPCIAEFMPILGTNLNPEFISVCNNATWAIGEICMQMGAEMQPYVQMVLNNLVEIINRPNTPKTLLE

SEQ ID NO: 23405 - protein, 72 aa, Artificial Sequence
  Synthetic polypeptide
SQQLWEVRAFSSPPSLPRVSCRCGPSCCPSSATCLTRRITTLVREPLEPCRRSVKTHQSFWTVTPSTGPSTS

SEQ ID NO: 23406 - protein, 23 aa, Artificial Sequence
  Synthetic polypeptide
AHACNPSNFGRSGHSHHHHRFQG

SEQ ID NO: 23407 - protein, 801 aa, Artificial Sequence
  Synthetic polypeptide
LTPVIPATLGGQGILITTIASKGELQMWPELLPQLCNLLNSEDYNTCEGAFGALQKICEDSSELLDSDALNRPLNIMIPKFLQFFKHCSPKIRSHAIACVNQFIMDRAQALMDNIDTFIEHLFALAVDDDPEVRKNVCRALVMLLEVRIDRLIPHMHSIIQYMLQRTQDHDENVALEACEFWLTLAEQPICKEVLASHLVQLIPILVNGMKYSEIDIILLKGDVEEDEAVPDSEQDIKPRFHKSRTVTLPHEAERPDGSEDAEDDDDDDALSDWNLRKCSAAALDVLANVFREELLPHLLPLLKGLLFHPEWVVKESGILVLGAIAEGCMQGMVPYLPELIPHLIQCLSDKKALVRSIACWTLSRYAHWVVSQPPDMHLKPLMTELLKRILDGNKRVQEAACSAFATLEEEACTELVPYLSYILDTLVFAFGKYQHKNLLILYDAIGTLADSVGHHLNQPEYIQKLMPPLIQKWNELKDEDKDLFPLLECLSSVATALQSGFLPYCEPVYQRCVTLVQKTLAQAMMYTQHPEQYEAPDKDFMIVALDLLSGLAEGLGGHVEQLVARSNIMTLLFQCMQDSMPEVRQSSFALLGDLTKACFIHVKPCIAEFMPILGTNLNPEFISVCNNATWAIGEICMQMGAEMQPYVQMVLNNLVEIINRPNTPKTLLENTGRLTSPSAIPAITIGRLGYVCPQEVAPMLQQFIRPWCTSLRNIRDNEEKDSAFRGICMMIGVNPGGVVQDFIFFCDAVASWVSPKDDLRDMFYKILHGFKDQVGEDNWQQFSEQFPPLLKERLAAFYGV

SEQ ID NO: 23408 - protein, 791 aa, Artificial Sequence
  Synthetic polypeptide
LTPVIPATLGGQGILITTIASKGELQMWPELLPQLCNLLNSEDYNTCEGAFGALQKICEDSSELLDSDALNRPLNIMIPKFLQFFKHCSPKIRSHAIACVNQFIMDRAQALMDNIDTFIEHLFALAVDDDPEVRKNVCRALVMLLEVRIDRLIPHMHSIIQYMLQRTQDHDENVALEACEFWLTLAEQPICKEVLASHLVQLIPILVNGMKYSEIDIILLKGDVEEDEAVPDSEQDIKPRFHKSRTVTLPHEAERPDGSEDAEDDDDDDALSDWNLRKCSAAALDVLANVFREELLPHLLPLLKGLLFHPEWVVKESGILVLGAIAEGCMQGMVPYLPELIPHLIQCLSDKKALVRSIACWTLSRYAHWVVSQPPDMHLKPLMTELLKRILDGNKRVQEAACSAFATLEEEACTELVPYLSYILDTLVFAFGKYQHKNLLILYDAIGTLADSVGHHLNQPEYIQKLMPPLIQKWNELKDEDKDLFPLLECLSSVATALQSGFLPYCEPVYQRCVTLVQKTLAQAMMYTQHPEQYEAPDKDFMIVALDLLSGLAEGLGGHVEQLVARSNIMTLLFQCMQDSMPEVRQSSFALLGDLTKACFIHVKPCIAEFMPILGTNLNPEFISVCNNATWAIGEICMQMGAEMQPYVQMVLNNLVEIINRPNTPKTLLENTAITIGRLGYVCPQEVAPMLQQFIRPWCTSLRNIRDNEEKDSAFRGICMMIGVNPGGVVQDFIFFCDAVASWVSPKDDLRDMFYKILHGFKDQVGEDNWQQFSEQFPPLLKERLAAFYGV

SEQ ID NO: 23409 - protein, 670 aa, Artificial Sequence
  Synthetic polypeptide
LTPVIPATLGGQGILITTIASKGELQMWPELLPQLCNLLNSEDYNTCEGAFGALQKICEDSSELLDSDALNRPLNIMIPKFLQFFKHCSPKIRSHAIACVNQFIMDRAQALMDNIDTFIEHLFALAVDDDPEVRKNVCRALVMLLEVRIDRLIPHMHSIIQYMLQRTQDHDENVALEACEFWLTLAEQPICKEVLASHLVQLIPILVNGMKYSEIDIILLKGDVEEDEAVPDSEQDIKPRFHKSRTVTLPHEAERPDGSEDAEDDDDDDALSDWNLRKCSAAALDVLANVFREELLPHLLPLLKGLLFHPEWVVKESGILVLGAIAEGCMQGMVPYLPELIPHLIQCLSDKKALVRSIACWTLSRYAHWVVSQPPDMHLKPLMTELLKRILDGNKRVQEAACSAFATLEEEACTELVPYLSYILDTLVFAFGKYQHKNLLILYDAIGTLADSVGHHLNQPEYIQKLMPPLIQKWNELKDEDKDLFPLLECLSSVATALQSGFLPYCEPVYQRCVTLVQKTLAQAMMYTQHPEQYEAPDKDFMIVALDLLSGLAEGLGGHVEQLVARSNIMTLLFQCMQDSMPEVRQSSFALLGDLTKACFIHVKPCIAEFMPILGTNLNPEFISVCNNATWAIGEICMQMGAEMQPYVQMVLNNLVEIINRPNTPKTLLE

SEQ ID NO: 23410 - protein, 70 aa, Artificial Sequence
  Synthetic polypeptide
AVIKKNEIMSFAGTRRELEAIIPSKLTQEQKTKYNVFSLGAAHRRVHGQDATDDCELAAAAAGELGEGPG

SEQ ID NO: 23411 - protein, 118 aa, Artificial Sequence
  Synthetic polypeptide
HRNRKPNTTCSHLEQHIAECMAKMPQMIVNWQQQQRENWEKAQADKERRARLQAEAQELLGYQVDPRSARFQELLQDLEKKERKRLKEEKQKRKKEARAAALAAAVAQDPAASGAPSS

SEQ ID NO: 23412 - protein, 29 aa, Artificial Sequence
  Synthetic polypeptide
QTNTGTENQIQRVLTWSSTSQSAWPRCHR

SEQ ID NO: 23413 - protein, 104 aa, Artificial Sequence
  Synthetic polypeptide
SQHFGRLRQEDHLSPGVPDHPGQQSGGGGPPRRLLAPQAATWCTSDQPGPQQAPRGSHAHHRAGHSAAPAAATLHPGNCPAHFGPALPPSPLPQQCLHWASRTF

SEQ ID NO: 23414 - protein, 250 aa, Artificial Sequence
  Synthetic polypeptide
AQEFQTTLDNRVEEVGHRGGSSPPRLPPGVPVISLGHSRPPGVAMPTTELGTLRPPLLQLSTLGTAPPTLALHYHPHPFLNSVYIGPAGPFSIFPSSRLKRRPSHCELDLAEGHQPQKVARRVFTNSRERWRQQNVNGAFAELRKLLPTHPPDRKLSKNEVLRLAMKYIGFLVRLLRDQAAALAAGPTPPGPRKRPVHRVPDDGARRGSGRRAEAAARSQPAPPADPDGSPGGAARPIKMEQTALSPEVR

SEQ ID NO: 23415 - protein, 53 aa, Artificial Sequence
  Synthetic polypeptide
GALWCMPVIPALWEAEAGGSLEPRSSRPPWTTEWRRWATEEAPRPPGCHLVYQ

SEQ ID NO: 23416 - protein, 703 aa, Artificial Sequence
  Synthetic polypeptide
AAAAAAAAVAEAVLARTATSTKNKRRKEYFLAVQILSLEEKIKVKSTEVEILEKSQIEAIASSLASQNEVPAAPLEELAYRRSLRVALDVLSEGSIWSQESSAGTGRADRSLRGKPMEHVSSPCDSNSSSLPRGDVLGSSRPHRRRPCVQQSLSSSFTCEKDPECKVDHKKGLRKSENPRGPLVLPAGGGAQDESGSRIHHKNWTLASKRGGNSAQKASLCLNGSSLSEDDTERDMGSKGGSWAAPSLPSGVREDDPCANAEGHDPGLPLGSLTAPPAPEPSACSEPGECPAKKRPRLDGSQRPPAVQLEPMAAGAAPSPGPGPGPRESVTPRSTARLGPPPSHASADATRCLPCPDSQKLEKECQSSEESMGSNSMRSILEEDEEDEEPPRVLLYHEPRSFEVGMLVWHKHKKYPFWPAVVKSVRQRDKKASVLYIEGHMNPKMKGFTVSLKSLKHFDCKEKQTLLNQAREDFNQDIGWCVSLITDYRVRLGCGSFAGSFLEYYAADISYPVRKSIQQDVLGTKLPQLSKGSPEEPVVGCPLGQRQPCRKMLPDRSRAARDRANQKLVEYIVKAKGAESHLRAILKSRKPSRWLQTFLSSSQYVTCVETYLEDEGQLDLVVKYLQGVYQEVGAKVLQRTNGDRIRFILDVLLPEAIICAISAVDEVDYKTAEEKYIKGPSLSYREKEIFDNQLLEERNRRRR

SEQ ID NO: 23417 - protein, 30 aa, Artificial Sequence
  Synthetic polypeptide
RRRRRRRRWRRRFWPEPRLQQKIREERNIF

SEQ ID NO: 23418 - protein, 22 aa, Artificial Sequence
  Synthetic polypeptide
GGGGGGGGGGGGFGPNRDFNKK

SEQ ID NO: 23419 - protein, 39 aa, Artificial Sequence
  Synthetic polypeptide
AAAAAAAAVAEAVLARTATSTKNKRRKEYFLAVQILSLE

SEQ ID NO: 23420 - protein, 243 aa, Artificial Sequence
  Synthetic polypeptide
AAAAAAAAVAEAVLARTATSTKNKRRKEYFLAVQILSLEEKIKVKSTEVEILEKSQIEAIASSLASQNEVPAAPLEELAYRRSLRVALDVLSEGSIWSQESSAGTGRADRSLRGKPMEHVSSPCDSNSSSLPRGDVLGSSRPHRRRPCVQQSLSSSFTCEKDPECKVDHKKGLRKSENPRGPLVLPAGGGAQDESGSRIHHKNWTLASKRGGNSAQKASLCLNGSSLSEDDTERDMGSKGGSW

SEQ ID NO: 23421 - protein, 71 aa, Artificial Sequence
  Synthetic polypeptide
AAAAAAAAVAEAVLARTATSTKNKRRKEYFLAVQILSLEEKIKVKSTEVEILEKSQIEAIASSLGNANPLS

SEQ ID NO: 23422 - protein, 724 aa, Artificial Sequence
  Synthetic polypeptide
AAAAAAAAVAEAVLARTATSTKNKRRKEYFLAVQILSLEEKIKVKSTEVEILEKSQIEAIASSLASQNEVPAAPLEELAYRRSLRVALDVLSEGSIWSQESSAGTGRADRSLRGKPMEHVSSPCDSNSSSLPRGDVLGSSRPHRRRPCVQQSLSSSFTCEKDPECKVDHKKGLRKSENPRGPLVLPAGGGAQDESGSRIHHKNWTLASKRGGNSAQKASLCLNGSSLSEDDTERDMGSKGGSWAAPSLPSGVREDDPCANAEGHDPGLPLGSLTAPPAPEPSACSEPGECPAKKRPRLDGSQRPPAVQLEPMAAGAAPSPGPGPGPRESVTPRSTARLGPPPSHASADATRCLPCPDSQKLEKECQSSEESMGSNSMRSILEEDEEDEEPPRVLLYHEPRSFEVGMLVWHKHKKYPFWPAVVKSVRQRDKKASVLYIEGHMNPKMKGFTVSLKSLKHFDCKEKQTLLNQAREDFNQDIGWCVSLITDYRVRLGCGSFAGSFLEYYAADISYPVRKSIQQDVLGTKLPQLSKGSPEEPVVGCPLGQRQPCRKMLPDRSRAARDRANQKLVEYIVKAKGAESHLRAILKSRKPSRWLQTFLSSSQYVTCVETYLEDEGQLDLVVKYLQGVYQEVGAKVLQRTNGDRIRFILDVLLPECWEMRVRALDPVRRRSRLLDPCAEMELLRSCQHQGVRTPSLLRAHRCFPASVGHHLCDLCGGRGGLQDG

SEQ ID NO: 23423 - protein, 91 aa, Artificial Sequence
  Synthetic polypeptide
ARWLTPVIPALWKAKLLACAASGSLVCAPAWARLCRHEVSIRAWPPMAQAAPSLPCQRPEPWLPNPAAGASMWWPSWMTSSTGPAGVLCGP

SEQ ID NO: 23424 - protein, 70 aa, Artificial Sequence
  Synthetic polypeptide
SQHFGRPSSWPARLPDPWSALQRGPGCAGTRCPSERGHRWPKQHPACPAKGQSRGSQTQQPGRVCGGQAG

SEQ ID NO: 23425 - protein, 215 aa, Artificial Sequence
  Synthetic polypeptide
AVAHACNPSTLEGQAPGLRGFRILGLRSSVGPAVQARGVHQSVATDGPSSTQPALPKARAVAPKPSSRGEYVVAKLDDLVNWARRSSLWPMTFGLACCAVEMMHMAAPRYDMDRFGVVFRASPRQSDVMIVAGTLTNKMAPALRKVYDQMPEPRYVVSMGSCANGGGYYHYSYSVVRGCDRIVPVDIYIPGRAGTAPPTRELETGPAPHGARRPL

SEQ ID NO: 23426 - protein, 222 aa, Artificial Sequence
  Synthetic polypeptide
AVAHACNPSTLEGQAPGLRGFRILGLRSSVGPAVQARGVHQSVATDGPSSTQPALPKARAVAPKPSSRGEYVVAKLDDLVNWARRSSLWPMTFGLACCAVEMMHMAAPRYDMDRFGVVFRASPRQSDVMIVAGTLTNKMAPALRKVYDQMPEPRYVVSMGSCANGGGYYHYSYSVVRGCDRIVPVDIYIPGCPPTAEALLYGILQLQRKIKRERRLQIWYRR

SEQ ID NO: 23427 - protein, 191 aa, Artificial Sequence
  Synthetic polypeptide
AVAHACNPSTLEGQAPGLRGFRILGLRSSVGPAVQARGVHQSVATDGPSSTQPALPKARAVAPKPSSRGEYVVAKLDDLVNWARRSSLWPMTFGLACCAVEMMHMAAPRYDMDRFGVVFRASPRQSDVMIVAGTLTNKMAPALRKVYDQMPEPRYVVSMGSCANGGGYYHYSYSVVRGCDRIVPVDIYIPD

SEQ ID NO: 23428 - protein, 78 aa, Artificial Sequence
  Synthetic polypeptide
ARWLTPVIPALWKAKLLACAASGSLVCAPAWARLCRHEVSIRAWPPMAQAAPSLPCQRPEPWLPNPAAGASMWWPSWM

SEQ ID NO: 23429 - protein, 77 aa, Artificial Sequence
  Synthetic polypeptide
AVAHACNPSTLEGQAPGLRGFRILGLRSSVGPAVQARGVHQSVATDGPSSTQPALPKARAVAPKPSSRGEYVVAKLD

SEQ ID NO: 23430 - protein, 69 aa, Artificial Sequence
  Synthetic polypeptide
ARWLTPVIPALWKAKLLACAASGSLVCAPAWARLCRHEVSIRAWPPMAQAGLWQRPWGLASASGKHLRG

SEQ ID NO: 23431 - protein, 100 aa, Artificial Sequence
  Synthetic polypeptide
SQHFGRPSSWPARLPDPWSALQRGPGCAGTRCPSERGHRWPKQASGSGRGGSHPPLGSTCVADASCARVSLCQHPACPAKGQSRGSQTQQPGRVCGGQAG

SEQ ID NO: 23432 - protein, 245 aa, Artificial Sequence
  Synthetic polypeptide
AVAHACNPSTLEGQAPGLRGFRILGLRSSVGPAVQARGVHQSVATDGPSRPLAAAVGARIRLWEAPAWLTPPVPVCLCASTQPALPKARAVAPKPSSRGEYVVAKLDDLVNWARRSSLWPMTFGLACCAVEMMHMAAPRYDMDRFGVVFRASPRQSDVMIVAGTLTNKMAPALRKVYDQMPEPRYVVSMGSCANGGGYYHYSYSVVRGCDRIVPVDIYIPGRAGTAPPTRELETGPAPHGARRPL

SEQ ID NO: 23433 - protein, 35 aa, Artificial Sequence
  Synthetic polypeptide
GGVRWLTPVIPALWEAKAGGSLEPRSSRAAWARKP

SEQ ID NO: 23434 - protein, 308 aa, Artificial Sequence
  Synthetic polypeptide
SQHFGRPKREDHLSPGVQEQPGPASPDEYHAELVFLIHTSGGGYHRGSDGHHTRHSAATAAGHIAEGGALGLRPHPGLAVRDEGPSELRLACPDPVREEPLGLRGGLPDRAGRGGRRPGPRPPLHCGPLYGAPRAAAPGLQAGDAGPGAAQHRLQPGQPPCRQRRALGLLSQPLPGPARALCHRPPHHSQHPLCPNAVRYSAPLDSLGARSGPLRGTPGRQATGCRPGAALPAPGRGSHRLHHHQPLAPHAHQPAALWGFHRIPGQGPGDLPAGARRAPPVLTVLGEPQTDLQGQEETHAFGAGAFWL

SEQ ID NO: 23435 - protein, 294 aa, Artificial Sequence
  Synthetic polypeptide
AQEFKSSLGPQALMNIMQNWYSLFTPVEAATIVAVTGTTHATLLRLQLDTSRREELWACARTLALQCAMKDPQNCALPALTLCEKNHSAFEAAYQIVLDAAAGGLGHAHLFTVARYMEHRGLPLRAYKLATLALAQLSIAFNQDSHPAVNDVLWACSLSHSLGRHELSAIVPLIIRSIHCAPMLSDILRRWTLSAPGLGPLGARRAAKPLGADRAPLCQLLDAAVTAYITTSHSRLTHISPRHYGDFIEFLGKARETFLLAPDGHLQFSQFLENLKQTYKGKKKLMLLVRERFG

SEQ ID NO: 23436 - protein, 96 aa, Artificial Sequence
  Synthetic polypeptide
SQHFGRPKREDHLSPGVQEQPGPASPDEYHAELVFLIHTSGGGYHRGSDGHHTRHSAATAAGHIAEGGALGLRPHPGLAVRDEGPSELRLACPDPV

SEQ ID NO: 23437 - protein, 83 aa, Artificial Sequence
  Synthetic polypeptide
AQEFKSSLGPQALMNIMQNWYSLFTPVEAATIVAVTGTTHATLLRLQLDTSRREELWACARTLALQCAMKDPQNCALPALTLC

SEQ ID NO: 23438 - protein, 291 aa, Artificial Sequence
  Synthetic polypeptide
GQITRPASPDEYHAELVFLIHTSGGGYHRGSDGHHTRHSAATAAGHIAEGGALGLRPHPGLAVRDEGPSELRLACPDPVREEPLGLRGGLPDRAGRGGRRPGPRPPLHCGPLYGAPRAAAPGLQAGDAGPGAAQHRLQPGQPPCRQRRALGLLSQPLPGPARALCHRPPHHSQHPLCPNAVRYSAPLDSLGARSGPLRGTPGRQATGCRPGAALPAPGRGSHRLHHHQPLAPHAHQPAALWGFHRIPGQGPGDLPAGARRAPPVLTVLGEPQTDLQGQEETHAFGAGAFWL

SEQ ID NO: 23439 - protein, 290 aa, Artificial Sequence
  Synthetic polypeptide
GRSQGPQALMNIMQNWYSLFTPVEAATIVAVTGTTHATLLRLQLDTSRREELWACARTLALQCAMKDPQNCALPALTLCEKNHSAFEAAYQIVLDAAAGGLGHAHLFTVARYMEHRGLPLRAYKLATLALAQLSIAFNQDSHPAVNDVLWACSLSHSLGRHELSAIVPLIIRSIHCAPMLSDILRRWTLSAPGLGPLGARRAAKPLGADRAPLCQLLDAAVTAYITTSHSRLTHISPRHYGDFIEFLGKARETFLLAPDGHLQFSQFLENLKQTYKGKKKLMLLVRERFG

SEQ ID NO: 23440 - protein, 8 aa, Artificial Sequence
  Synthetic polypeptide
ADHKARKP

SEQ ID NO: 23441 - protein, 79 aa, Artificial Sequence
  Synthetic polypeptide
GQITRPASPDEYHAELVFLIHTSGGGYHRGSDGHHTRHSAATAAGHIAEGGALGLRPHPGLAVRDEGPSELRLACPDPV

SEQ ID NO: 23442 - protein, 79 aa, Artificial Sequence
  Synthetic polypeptide
GRSQGPQALMNIMQNWYSLFTPVEAATIVAVTGTTHATLLRLQLDTSRREELWACARTLALQCAMKDPQNCALPALTLC

SEQ ID NO: 23443 - protein, 574 aa, Artificial Sequence
  Synthetic polypeptide
EEEEEEEEGKNRSNKTQTVAVAAGRSWVAIPREQLTMSDKLLVWGTKAGQPLWPPVFVNLETQMKPNAPRLGPDVDFSEDDPLEATVHWAPPTWPSHKVLICQFHYRRCQEAAWTLLEPELKTIPLTPVEIQDLELATGYKVYGRCRMEKEEDLWGEWSPILSFQTPPSAPKDVWVSGNLCGTPGGEEPLLLWKAPGPCVQVSYKVWFWVGGRELSPEGITCCCSLIPSGAEWARVSAVNATSWEPLTNLSLVCLDSASAPRSVAVSSIAGSTELLVTWQPGPGEPLEHVVDWARDGDPLEKLNWVRLPPGNLSALLPGNFTVGVPYRITVTAVSASGLASASSVWGFREELAPLVGPTLWRLQDAPPGTPAIAWGEVPRHQLRGHLTHYTLCAQSGTSPSVCMNVSGNTQSVTLPDLPWGPCELWVTASTIAGQGPPGPILRLHLPDNTLRWKVLPGILFLWGLFLLGCGLSLATSGRCYHLRHKVLPRWVWEKVPDPANSSSGQPHMEQVPEAQPLGDLPILEVEEMEPPPVMESSQPAQATAPLDSGYEKHFLPTPEELGLLGPPRPQVLA

SEQ ID NO: 23444 - protein, 57 aa, Artificial Sequence
  Synthetic polypeptide
KKKKRKRREKTVPTKPRLWQWQPDGAGWPFLGNSSPCLTNSLSGALRQASLSGPPSS

SEQ ID NO: 23445 - protein, 37 aa, Artificial Sequence
  Synthetic polypeptide
RRRRGRGGKKPFQQNPDCGSGSRTELGGHSSGTAHHV

SEQ ID NO: 23446 - protein, 24 aa, Artificial Sequence
  Synthetic polypeptide
SQHFGRLRPTPPTHPSSQRLMPWV

SEQ ID NO: 23447 - protein, 140 aa, Artificial Sequence
  Synthetic polypeptide
WLKPVIPALWEAEADAPNPSLIPETDAVGVTVVLITCTYHGQEFIRVGYYVNNEYLNPELRENPPMKPDFSQLQRNILASNPRVTRFHINWDNNMDRLEAIETQDPSLGCGLPLNCTPIKGLGLPGCIPGLLPENSMDCI

SEQ ID NO: 23448 - protein, 20 aa, Artificial Sequence
  Synthetic polypeptide
SQHFGRLRPTPPTHPSSQRL

SEQ ID NO: 23449 - protein, 25 aa, Artificial Sequence
  Synthetic polypeptide
WLKPVIPALWEAEADAPNPSLIPET

SEQ ID NO: 23450 - protein, 103 aa, Artificial Sequence
  Synthetic polypeptide
WLKPVIPALWEAEADAPNPSLIPETDAVGVTVVLITCTYHGQEFIRVGYYVNNEYLNPELRENPPMKPDFSQVGPVSTSCFPQGRSLYLGGVQPFKLRVKVTS

SEQ ID NO: 23451 - protein, 14 aa, Artificial Sequence
  Synthetic polypeptide
AMITPLLSVLGNRV

SEQ ID NO: 23452 - protein, 1390 aa, Artificial Sequence
  Synthetic polypeptide
SHRCSPSWAIECNNRTQCVVVAGSDAFPDPCPGTYKYLEVQYDCVPYKVEQKVFVCPGTLQKVLEPTSTHESEHQSGAWCKDPLQAGDRIYVMPWIPYRTDTLTEYASWEDYVAARHTTTYRLPNRVDGTGFVVYDGAVFYNKERTRNIVKYDLRTRIKSGETVINTANYHDTSPYRWGGKTDIDLAVDENGLWVIYATEGNNGRLVVSQLNPYTLRFEGTWETGYDKRSASNAFMVCGVLYVLRSVYVDDDSEAAGNRVDYAFNTNANREEPVSLTFPNPYQFISSVDYNPRDNQLYVWNNYFVVRYSLEFGPPDPSAGPATSPPLSTTTTARPTPLTSTASPAATTPLRRAPLTTHPVGAINQLGPDLPPATAPVPSTRRPPAPNLHVSPELFCEPREVRRVQWPATQQGMLVERPCPKGTRGIASFQCLPALGLWNPRGPDLSNCTSPWVNQVAQKIKSGENAANIASELARHTRGSIYAGDVSSSVKLMEQLLDILDAQLQALRPIERESAGKNYNKMHKRERTCKDYIKAVVETVDNLLRPEALESWKDMNATEQVHTATMLLDVLEEGAFLLADNVREPARFLAAKENVVLEVTVLNTEGQVQELVFPQEEYPRKNSIQLSAKTIKQNSRNGVVKVVFILYNNLGLFLSTENATVKLAGEAGPGGPGGASLVVNSQVIAASINKESSRVFLMDPVIFTVAHLEDKNHFNANCSFWNYSERSMLGYWSTQGCRLVESNKTHTTCACSHLTNFAVLMAHREIYQGRINELLLSVITWVGIVISLVCLAICISTFCFLRGLQTDRNTIHKNLCINLFLAELLFLVGIDKTQYEIACPIFAGLLHYFFLAAFSWLCLEGVHLYLLLVEVFESEYSRTKYYYLGGYCFPALVVGIAAAIDYRSYGTEKACWLRVDNYFIWSFIGPVSFVIVVNLVFLMVTLHKMIRSSSVLKPDSSRLDNIKSWALGAIALLFLLGLTWAFGLLFINKESVVMAYLFTTFNAFQGVFIFVFHCALQKKVHKEYSKCLRHSYCCIRSPPGGTHGSLKTSAMRSNTRYYTGTQSRIRRMWNDTVRKQTESSFMAGDINSTPTLNRGTMGNHLLTNPVLQPRGGTSPYNTLIAESVGFNPSSPPVFNSPGSYREPKHPLGGREACGMDTLPLNGNFNNSYSLRSGDFPPGDGGPEPPRGRNLADAAAFEKMIISELVHNNLRGSSSAAKGPPPPEPPVPPVPGGGGEEEAGGPGGADRAEIELLYKALEEPLLLPRAQSVLYQSDLDESESCTAEDGATSRPLSSPPGRDSLYASGANLRDSPSYPDSSPEGPSEALPPPPPAPPGPPEIYYTSRPPALVARNPLQGYYQVRRPSHEGYLAAPGLEGPGPDGDGQMQLVTSL

SEQ ID NO: 23453 - protein, 1385 aa, Artificial Sequence
  Synthetic polypeptide
SHRCSPSWAIECNNRTQCVVVAGSDAFPDPCPGTYKYLEVQYDCVPYIFVCPGTLQKVLEPTSTHESEHQSGAWCKDPLQAGDRIYVMPWIPYRTDTLTEYASWEDYVAARHTTTYRLPNRVDGTGFVVYDGAVFYNKERTRNIVKYDLRTRIKSGETVINTANYHDTSPYRWGGKTDIDLAVDENGLWVIYATEGNNGRLVVSQLNPYTLRFEGTWETGYDKRSASNAFMVCGVLYVLRSVYVDDDSEAAGNRVDYAFNTNANREEPVSLTFPNPYQFISSVDYNPRDNQLYVWNNYFVVRYSLEFGPPDPSAGPATSPPLSTTTTARPTPLTSTASPAATTPLRRAPLTTHPVGAINQLGPDLPPATAPVPSTRRPPAPNLHVSPELFCEPREVRRVQWPATQQGMLVERPCPKGTRGIASFQCLPALGLWNPRGPDLSNCTSPWVNQVAQKIKSGENAANIASELARHTRGSIYAGDVSSSVKLMEQLLDILDAQLQALRPIERESAGKNYNKMHKRERTCKDYIKAVVETVDNLLRPEALESWKDMNATEQVHTATMLLDVLEEGAFLLADNVREPARFLAAKENVVLEVTVLNTEGQVQELVFPQEEYPRKNSIQLSAKTIKQNSRNGVVKVVFILYNNLGLFLSTENATVKLAGEAGPGGPGGASLVVNSQVIAASINKESSRVFLMDPVIFTVAHLEDKNHFNANCSFWNYSERSMLGYWSTQGCRLVESNKTHTTCACSHLTNFAVLMAHREIYQGRINELLLSVITWVGIVISLVCLAICISTFCFLRGLQTDRNTIHKNLCINLFLAELLFLVGIDKTQYEIACPIFAGLLHYFFLAAFSWLCLEGVHLYLLLVEVFESEYSRTKYYYLGGYCFPALVVGIAAAIDYRSYGTEKACWLRVDNYFIWSFIGPVSFVIVVNLVFLMVTLHKMIRSSSVLKPDSSRLDNIKSWALGAIALLFLLGLTWAFGLLFINKESVVMAYLFTTFNAFQGVFIFVFHCALQKKVHKEYSKCLRHSYCCIRSPPGGTHGSLKTSAMRSNTRYYTGTQSRIRRMWNDTVRKQTESSFMAGDINSTPTLNRGTMGNHLLTNPVLQPRGGTSPYNTLIAESVGFNPSSPPVFNSPGSYREPKHPLGGREACGMDTLPLNGNFNNSYSLRSGDFPPGDGGPEPPRGRNLADAAAFEKMIISELVHNNLRGSSSAAKGPPPPEPPVPPVPGGGGEEEAGGPGGADRAEIELLYKALEEPLLLPRAQSVLYQSDLDESESCTAEDGATSRPLSSPPGRDSLYASGANLRDSPSYPDSSPEGPSEALPPPPPAPPGPPEIYYTSRPPALVARNPLQGYYQVRRPSHEGYLAAPGLEGPGPDGDGQMQLVTSL

SEQ ID NO: 23454 - protein, 55 aa, Artificial Sequence
  Synthetic polypeptide
ARWRFWTQRQGRSCVSWTRWSPTPPLRRSRTSSLRPIRSGTPPASPSAWTPRASP

SEQ ID NO: 23455 - protein, 33 aa, Artificial Sequence
  Synthetic polypeptide
PGGDSGRKDKGEAVFLGQGGAPRHHCGDQEPLH

SEQ ID NO: 23456 - protein, 304 aa, Artificial Sequence
  Synthetic polypeptide
QVEILDAKTREKLCFLDKVEPHATIAEIKNLFTKTHPQWYPARQSLRLDPKGKSLKDEDVLQKLPVGTTATLYFRDLGAQISWVTVFLTEYAGPLFIYLLFYFRVPFIYGHKYDFTSSRHTVVHLACICHSFHYIKRLLETLFVHRFSHGTMPLRNIFKNCTYYWGFAAWMAYYINHPLYTPPTYGAQQVKLALAIFVICQLGNFSIHMALRDLRPAGSKTRKIPYPTKNPFTWLFLLVSCPNYTYEVGSWIGFAIMTQCLPVALFSLVGFTQMTIWAKGKHRSYLKEFRDYPPLRMPIIPFLL

SEQ ID NO: 23457 - protein, 34 aa, Artificial Sequence
  Synthetic polypeptide
ARWRFWTQRQGRSCVSWTRWSPTPPLRRSRTSSL

SEQ ID NO: 23458 - protein, 33 aa, Artificial Sequence
  Synthetic polypeptide
QVEILDAKTREKLCFLDKVEPHATIAEIKNLFT

SEQ ID NO: 23459 - protein, 102 aa, Artificial Sequence
  Synthetic polypeptide
ARWRFWTQRQGRSCVSWTRWSPTPPLRRSRTSSLRPIRSGTPPASPSAWTPKLPVGTTATLYFRDLGAQISWVTVFLTEYAGPLFIYLLFYFRVPFIYGHKY

SEQ ID NO: 23460 - protein, 101 aa, Artificial Sequence
  Synthetic polypeptide
QVEILDAKTREKLCFLDKVEPHATIAEIKNLFTKTHPQWYPARQSLRLDPKAARGHHGHTVLPGPGGPDQLGDGLPNRVRGAPFHLPALLLPSALHLWPQI

SEQ ID NO: 23461 - protein, 44 aa, Artificial Sequence
  Synthetic polypeptide
ARWRFWTQRQGRSCVSWTRADVPAPVLPPGGAPRHHCGDQEPLH

SEQ ID NO: 23462 - protein, 126 aa, Artificial Sequence
  Synthetic polypeptide
PGGDSGRKDKGEAVFLGQELTSLRLCFPQVEPHATIAEIKNLFTKTHPQWYPARQSLRLDPKGKSLKDEDVLQKLPVGTTATLYFRDLGAQISWVTVFLTEYAGPLFIYLLFYFRVPFIYGHKYDF

SEQ ID NO: 23463 - protein, 19 aa, Artificial Sequence
  Synthetic polypeptide
QVEILDAKTREKLCFLDKS

SEQ ID NO: 23464 - protein, 33 aa, Artificial Sequence
  Synthetic polypeptide
TTETGPWRRRRRMMTMRTQHLPTRTFLPSQPSP

SEQ ID NO: 23465 - protein, 33 aa, Artificial Sequence
  Synthetic polypeptide
LQSRKRSQARTTQLSCSQIPEPQKLDHGGGGGG

SEQ ID NO: 23466 - protein, 259 aa, Artificial Sequence
  Synthetic polypeptide
AALRFLNHRNWTMEEEEEDDDYENSTPPYKDLPPKPALTLSFSSPGSSAPPRPPRAAKETEKPPLPCKPRNMTGLDLAAVTCPPPQLAVNLEPSPLQPSLAATPVPWLNQRSGGPGCCQKRWMVYLCLLVVTSLFLGCLGLTVTLIKYQELMEELRMLSFQQMTWRTNMTGMAGLAGLKHDIARVRADTNQSLVELWGLLDCRRITCPEGWLPFEGKCYYFSPSTKSWDEARMFCQENYSHLVIINSFAEHLLGARGTQ

SEQ ID NO: 23467 - protein, 82 aa, Artificial Sequence
  Synthetic polypeptide
TTETGPWRRRRRMMTMRTQHLPTRTFLPSQGPWRRRRRMMTMRTQHLPTRTFLPSQVQVLHQDLQGQQRKQRNPHFLASPGT

SEQ ID NO: 23468 - protein, 276 aa, Artificial Sequence
  Synthetic polypeptide
AALRFLNHRNWTMEEEEEDDDYENSTPPYKDLPPKPGTMEEEEEDDDYENSTPPYKDLPPKPGSSAPPRPPRAAKETEKPPLPCKPRNMTGLDLAAVTCPPPQLAVNLEPSPLQPSLAATPVPWLNQRSGGPGCCQKRWMVYLCLLVVTSLFLGCLGLTVTLIKYQELMEELRMLSFQQMTWRTNMTGMAGLAGLKHDIARVRADTNQSLVELWGLLDCRRITCPEGWLPFEGKCYYFSPSTKSWDEARMFCQENYSHLVIINSFAEHLLGARGTQ

SEQ ID NO: 23469 - protein, 235 aa, Artificial Sequence
  Synthetic polypeptide
AALRFLNHRNWTMEEEEEDDDYENSTPPYKDLPPKPGTMEEEEEDDDYENSTPPYKDLPPKPGSSAPPRPPRAAKETEKPPLPCKPRNMTGLDLAAVTCPPPQLAVNLEPSPLQPSLAATPVPWLNQRSGGPGCCQKRWMVYLCLLVVTSLFLGCLGLTVTLIKYQELMEELRMLSFQQMTWRTNMTGMAGLAGLKHDIARVRADTNQSLVELWGLLEFCGQGPWLSTGVLAGAE

SEQ ID NO: 23470 - protein, 348 aa, Artificial Sequence
  Synthetic polypeptide
AALRFLNHRNWTMEEEEEDDDYENSTPPYKDLPPKPGTMEEEEEDDDYENSTPPYKDLPPKPGSSAPPRPPRAAKETEKPPLPCKPRNMTGLDLAAVTCPPPQLAVNLEPSPLQPSLAATPVPWLNQRSGGPGCCQKRWMVYLCLLVVTSLFLGCLGLTVTLIKYQELMEELRMLSFQQMTWRTNMTGMAGLAGLKHDIARVRADTNQSLVELWGLLDCRRITCPEGWLPFEGKCYYFSPSTKSWDEARMFCQENYSHLVIINSFAEHNFVAKAHGSPRVYWLGLNDRAQEGDWRWLDGSPVTLSFWEPEEPNNIHDEDCATMNKGGTWNDLSCYKTTYWICERKCSC

SEQ ID NO: 23471 - protein, 197 aa, Artificial Sequence
  Synthetic polypeptide
AALRFLNHRNWTMEEEEEDDDYENSTPPYKDLPPKPGTMEEEEEDDDYENSTPPYKDLPPKPGSSAPPRPPRAAKETEKPPLPCKPRNMTGLDLAAVTCPPPQLAVNLEPSPLQPSLAATPVPWLNQRSGGPGCCQKRWMVYLCLLVVTSLFLGCLGLTVTLIKYQELMEELRMLSFQQMTWRTNIRGGWVGWVLSL

SEQ ID NO: 23472 - protein, 33 aa, Artificial Sequence; identical to SEQ ID NO: 23465
  Synthetic polypeptide

SEQ ID NO: 23473 - protein, 56 aa, Artificial Sequence
  Synthetic polypeptide
TTETGPWRRRRRMMTMRTQHLPTRTFLPSQVQVLHQDLQGQQRKQRNPHFLASPGT

SEQ ID NO: 23474 - protein, 250 aa, Artificial Sequence
  Synthetic polypeptide
AALRFLNHRNWTMEEEEEDDDYENSTPPYKDLPPKPGSSAPPRPPRAAKETEKPPLPCKPRNMTGLDLAAVTCPPPQLAVNLEPSPLQPSLAATPVPWLNQRSGGPGCCQKRWMVYLCLLVVTSLFLGCLGLTVTLIKYQELMEELRMLSFQQMTWRTNMTGMAGLAGLKHDIARVRADTNQSLVELWGLLDCRRITCPEGWLPFEGKCYYFSPSTKSWDEARMFCQENYSHLVIINSFAEHLLGARGTQ

SEQ ID NO: 23475 - protein, 209 aa, Artificial Sequence
  Synthetic polypeptide
AALRFLNHRNWTMEEEEEDDDYENSTPPYKDLPPKPGSSAPPRPPRAAKETEKPPLPCKPRNMTGLDLAAVTCPPPQLAVNLEPSPLQPSLAATPVPWLNQRSGGPGCCQKRWMVYLCLLVVTSLFLGCLGLTVTLIKYQELMEELRMLSFQQMTWRTNMTGMAGLAGLKHDIARVRADTNQSLVELWGLLEFCGQGPWLSTGVLAGAE

SEQ ID NO: 23476 - protein, 322 aa, Artificial Sequence
  Synthetic polypeptide
AALRFLNHRNWTMEEEEEDDDYENSTPPYKDLPPKPGSSAPPRPPRAAKETEKPPLPCKPRNMTGLDLAAVTCPPPQLAVNLEPSPLQPSLAATPVPWLNQRSGGPGCCQKRWMVYLCLLVVTSLFLGCLGLTVTLIKYQELMEELRMLSFQQMTWRTNMTGMAGLAGLKHDIARVRADTNQSLVELWGLLDCRRITCPEGWLPFEGKCYYFSPSTKSWDEARMFCQENYSHLVIINSFAEHNFVAKAHGSPRVYWLGLNDRAQEGDWRWLDGSPVTLSFWEPEEPNNIHDEDCATMNKGGTWNDLSCYKTTYWICERKCSC

SEQ ID NO: 23477 - protein, 171 aa, Artificial Sequence
  Synthetic polypeptide
AALRFLNHRNWTMEEEEEDDDYENSTPPYKDLPPKPGSSAPPRPPRAAKETEKPPLPCKPRNMTGLDLAAVTCPPPQLAVNLEPSPLQPSLAATPVPWLNQRSGGPGCCQKRWMVYLCLLVVTSLFLGCLGLTVTLIKYQELMEELRMLSFQQMTWRTNIRGGWVGWVLSL

SEQ ID NO: 23478 - protein, 33 aa, Artificial Sequence; identical to SEQ ID NO: 23465
  Synthetic polypeptide

SEQ ID NO: 23479 - protein, 56 aa, Artificial Sequence; identical to SEQ ID NO: 23473
  Synthetic polypeptide

SEQ ID NO: 23480 - protein, 250 aa, Artificial Sequence; identical to SEQ ID NO: 23474
  Synthetic polypeptide

SEQ ID NO: 23481 - protein, 209 aa, Artificial Sequence; identical to SEQ ID NO: 23475
  Synthetic polypeptide

SEQ ID NO: 23482 - protein, 322 aa, Artificial Sequence; identical to SEQ ID NO: 23476
  Synthetic polypeptide

SEQ ID NO: 23483 - protein, 171 aa, Artificial Sequence; identical to SEQ ID NO: 23477
  Synthetic polypeptide

SEQ ID NO: 23484 - protein, 624 aa, Artificial Sequence
  Synthetic polypeptide
MRKEQGSCGRSWDVDECSSGQHQCDSSTVCFNTVGSYSCRCRPGWKPRHGIPNNQKDTVCEDMTFSTWTPPPGVHSQTLSRFFDKVQDLGRDYKPGLANNTIQSILQALDELLEAPGDLETLPRLQQHCVASHLLDGLEDVLRGLSKNLSNGLLNFSYPAGTELSLEVQKQVDRSVTLRQNQAVMQLDWNQAQKSGDPGPSVVGLVSIPGMGKLLAEAPLVLEPEKQMLLHETHQGLLQDGSPILLSDVISAFLSNNDTQNLSSPVTFTFSHRSVIPRQKVLCVFWEHGQNGCGHWATTGCSTIGTRDTSTICRCTHLSSFAVLMAHYDVQEEDPVLTVITYMGLSVSLLCLLLAALTFLLCKAIQNTSTSLHLQLSLCLFLAHLLFLVAIDQTGHKVLCSIIAGTLHYLYLATLTWMLLEALYLFLTARNLTVVNYSSINRFMKKLMFPVGYGVPAVTVAISAASRPHLYGTPSRCWLQPEKGFIWGFLGPVCAIFSVNLVLFLVTLWILKNRLSSLNSEVSTLRNTRMLAFKATAQLFILGCTWCLGILQVGPAARVMAYLFTIINSLQGVFIFLVYCLLSQQVREQYGKWSKGIRKLKTESEMHTLSSSAKADTSKPSTVN

SEQ ID NO: 23485 - protein, 61 aa, Artificial Sequence
  Synthetic polypeptide
EKSKGPAEGAGMWTSAAPGSISVTAPPSASTPWVHTAAAAAQAGSPDTESRITKRTLSVKI

SEQ ID NO: 23486 - protein, 38 aa, Artificial Sequence
  Synthetic polypeptide
GGARLCQAFILLRLDEKRARVLRKELGCGRVQLRAASV

SEQ ID NO: 23487 - protein, 613 aa, Artificial Sequence
  Synthetic polypeptide
MRKEQGSCGRSWDVDECSSGQHQCDSSTVCFNTVGSYSCRCRPGWKPRHGIPNNQKDTVCEDMTFSTWTPPPGVHSQTLSRFFDKVQDLGRDYKPGLANNTIQSILQALDELLEAPGDLETLPRLQQHCVASHLLDGLEDVLRGLSKNLSNGLLNFSYPAGTELSLEVQKQVDRSVTLRQNQAVMQLDWNQAQKSGDPGMGKLLAEAPLVLEPEKQMLLHETHQGLLQDGSPILLSDVISAFLSNNDTQNLSSPVTFTFSHRSVIPRQKVLCVFWEHGQNGCGHWATTGCSTIGTRDTSTICRCTHLSSFAVLMAHYDVQEEDPVLTVITYMGLSVSLLCLLLAALTFLLCKAIQNTSTSLHLQLSLCLFLAHLLFLVAIDQTGHKVLCSIIAGTLHYLYLATLTWMLLEALYLFLTARNLTVVNYSSINRFMKKLMFPVGYGVPAVTVAISAASRPHLYGTPSRCWLQPEKGFIWGFLGPVCAIFSVNLVLFLVTLWILKNRLSSLNSEVSTLRNTRMLAFKATAQLFILGCTWCLGILQVGPAARVMAYLFTIINSLQGVFIFLVYCLLSQQVREQYGKWSKGIRKLKTESEMHTLSSSAKADTSKPSTVN

SEQ ID NO: 23488 - protein, 566 aa, Artificial Sequence
  Synthetic polypeptide
MRKEQGSCGRSWDVDECSSGQHQCDSSTVCFNTVGSYSCRCRPGWKPRHGIPNNQKDTVCEDMTFSTWTPPPGVHSQTLSRFFDKVQDLGRDYKPGLANNTIQSILQALDELLEAPGDLETLPRLQQHCVASHLLDGLEDVLRGLSKNLSNGLLNFSYPAGTELSLEVQKQVDRSVTLRQNQAVMQLDWNQAQKSGDPGPSVVGLVSIPGMGKLLAEAPLVLEPEKQMLLHETHQGLLQDGSPILLSDVISAFLSNNDTQNLSSPVTFTFSHREEDPVLTVITYMGLSVSLLCLLLAALTFLLCKAIQNTSTSLHLQLSLCLFLAHLLFLVAIDQTGHKVLCSIIAGTLHYLYLATLTWMLLEALYLFLTARNLTVVNYSSINRFMKKLMFPVGYGVPAVTVAISAASRPHLYGTPSRCWLQPEKGFIWGFLGPVCAIFSVNLVLFLVTLWILKNRLSSLNSEVSTLRNTRMLAFKATAQLFILGCTWCLGILQVGPAARVMAYLFTIINSLQGVFIFLVYCLLSQQVREQYGKWSKGIRKLKTESEMHTLSSSAKADTSKPSTVN

SEQ ID NO: 23489 - protein, 632 aa, Artificial Sequence
  Synthetic polypeptide
MRKEQGSCGRSWDVDECSSGQHQCDSSTVCFNTVGSYSCRCRPGWKPRHGIPNNQKDTVCEDMTFSTWTPPPGVHSQTLSRFFDKVQDLGRDYKPGLANNTIQSILQALDELLEAPGDLETLPRLQQHCVASHLLDGLEDVLRGLSKNLSNGLLNFSYPAGTELSLEVQKQVDRSVTLRQNQAVMQLDWNQAQKSGDPGMGKLLAEAPLVLEPEKQMLLHETHQGLLQDGSPILLSDVISAFLSNNDTQNLSSPVTFTFSHRSVIPRQKVLCVFWEHGQNGCGHWATTGCSTIGTRDTSTICRCTHLSSFAVLMAHYDVQEEDPVLTVITYMGLSVSLLCLLLAALTFLLCKAIQNTSTSLHLQLSLCLFLAHLLFLVAIDQTGHKVLCSIIAGTLHYLYLATLTWMLLEALYLFLTARNLTVVNYSSINRFMKKLMFPVGYGVPAVTVAISAASRPHLYGTPSRCWLQPEKGFIWGFLGPVCAIFSVNLVLFLVTLWILKNRLSSLNSEVSTLRNTRMLAFKATAQLFILGCTWCLGILQVGPAARVMAYLFTIINSLQGVFIFLVYCLLSQQVREQYGKWSKGIRKLKTESEMHTLSSSAKADTSKPSTPGTVVQACNASTLGGQSRKIT

SEQ ID NO: 23490 - protein, 287 aa, Artificial Sequence
  Synthetic polypeptide
MRKEQGSCGRSWDVDECSSGQHQCDSSTVCFNTVGSYSCRCRPGWKPRHGIPNNQKDTVCEDMTFSTWTPPPGVHSQTLSRFFDKVQDLGRDYKPGLANNTIQSILQALDELLEAPGDLETLPRLQQHCVASHLLDGLEDVLRGLSKNLSNGLLNFSYPAGTELSLEVQKQVDRSVTLRQNQAVMQLDWNQAQKSGDPVSDPETEGALCLLGAWPEWMWSLGHHRLQHNRHQRHQHHLPLHPPEQLCRPHGPLRCAGGGSRADCHHLHGAERLSAVPPPGGPHFSPV

SEQ ID NO: 23491 - protein, 229 aa, Artificial Sequence
  Synthetic polypeptide
MRKEQGSCGRSWDVDECSSGQHQCDSSTVCFNTVGSYSCRCRPGWKPRHGIPNNQKDTVCEDMTFSTWTPPPGVHSQTLSRFFDKVQDLGRDYKPGLANNTIQSILQALDELLEAPGDLETLPRLQQHCVASHLLDGLEDVLRGLSKNLSNGLLNFSYPAGTELSLEVQKQVDRSVTLRQNQAVMQLDWNQAQKSGDPGGGSRADCHHLHGAERLSAVPPPGGPHFSPV

SEQ ID NO: 23492 - protein, 58 aa, Artificial Sequence
  Synthetic polypeptide
SRGQEIKTILANTMWTNVSRTQGSVKATAPASTPSAATRASACLASSSNLRTRSSAQM

SEQ ID NO: 23493 - protein, 44 aa, Artificial Sequence
  Synthetic polypeptide
ARHGGSCLQSQHFGRPRWADHEVRRSRPSWLTRCGRMSAEPKAL

SEQ ID NO: 23494 - protein, 706 aa, Artificial Sequence
  Synthetic polypeptide
HDVDECQQNPRLCKSYGTCVNTLGSYTCQCLPGFKLKPEDPKLCTDVNECTSGQNPCHSSTHCLNNVGSYQCRCRPGWQPIPGSPNGPNNTVCEDVDECSSGQHQCDSSTVCFNTVGSYSCRCRPGWKPRHGIPNNQKDTVCEDMTFSTWTPPPGVHSQTLSRFFDKVQDLGRDYKPGLANNTIQSILQALDELLEAPGDLETLPRLQQHCVASHLLDGLEDVLRGLSKNLSNGLLNFSYPAGTELSLEVQKQVDRSVTLRQNQAVMQLDWNQAQKSGDPGPSVVGLVSIPGMGKLLAEAPLVLEPEKQMLLHETHQGLLQDGSPILLSDVISAFLSNNDTQNLSSPVTFTFSHRSVIPRQKVLCVFWEHGQNGCGHWATTGCSTIGTRDTSTICRCTHLSSFAVLMAHYDVQEEDPVLTVITYMGLSVSLLCLLLAALTFLLCKAIQNTSTSLHLQLSLCLFLAHLLFLVAIDQTGHKVLCSIIAGTLHYLYLATLTWMLLEALYLFLTARNLTVVNYSSINRFMKKLMFPVGYGVPAVTVAISAASRPHLYGTPSRCWLQPEKGFIWGFLGPVCAIFSVNLVLFLVTLWILKNRLSSLNSEVSTLRNTRMLAFKATAQLFILGCTWCLGILQVGPAARVMAYLFTIINSLQGVFIFLVYCLLSQQVREQYGKWSKGIRKLKTESEMHTLSSSAKADTSKPSTVN

SEQ ID NO: 23495 - protein, 107 aa, Artificial Sequence
  Synthetic polypeptide
SRGQEIKTILANTMWTNVSRTQGSVKATAPASTPSAATRASACLASSSNLRTRSSAQMWTSAAPGSISVTAPPSASTPWVHTAAAAAQAGSPDTESRITKRTLSVKI

SEQ ID NO: 23496 - protein, 657 aa, Artificial Sequence
  Synthetic polypeptide
HDVDECQQNPRLCKSYGTCVNTLGSYTCQCLPGFKLKPEDPKLCTDVDECSSGQHQCDSSTVCFNTVGSYSCRCRPGWKPRHGIPNNQKDTVCEDMTFSTWTPPPGVHSQTLSRFFDKVQDLGRDYKPGLANNTIQSILQALDELLEAPGDLETLPRLQQHCVASHLLDGLEDVLRGLSKNLSNGLLNFSYPAGTELSLEVQKQVDRSVTLRQNQAVMQLDWNQAQKSGDPGPSVVGLVSIPGMGKLLAEAPLVLEPEKQMLLHETHQGLLQDGSPILLSDVISAFLSNNDTQNLSSPVTFTFSHRSVIPRQKVLCVFWEHGQNGCGHWATTGCSTIGTRDTSTICRCTHLSSFAVLMAHYDVQEEDPVLTVITYMGLSVSLLCLLLAALTFLLCKAIQNTSTSLHLQLSLCLFLAHLLFLVAIDQTGHKVLCSIIAGTLHYLYLATLTWMLLEALYLFLTARNLTVVNYSSINRFMKKLMFPVGYGVPAVTVAISAASRPHLYGTPSRCWLQPEKGFIWGFLGPVCAIFSVNLVLFLVTLWILKNRLSSLNSEVSTLRNTRMLAFKATAQLFILGCTWCLGILQVGPAARVMAYLFTIINSLQGVFIFLVYCLLSQQVREQYGKWSKGIRKLKTESEMHTLSSSAKADTSKPSTVN

SEQ ID NO: 23497 - protein, 695 aa, Artificial Sequence
  Synthetic polypeptide
HDVDECQQNPRLCKSYGTCVNTLGSYTCQCLPGFKLKPEDPKLCTDVNECTSGQNPCHSSTHCLNNVGSYQCRCRPGWQPIPGSPNGPNNTVCEDVDECSSGQHQCDSSTVCFNTVGSYSCRCRPGWKPRHGIPNNQKDTVCEDMTFSTWTPPPGVHSQTLSRFFDKVQDLGRDYKPGLANNTIQSILQALDELLEAPGDLETLPRLQQHCVASHLLDGLEDVLRGLSKNLSNGLLNFSYPAGTELSLEVQKQVDRSVTLRQNQAVMQLDWNQAQKSGDPGMGKLLAEAPLVLEPEKQMLLHETHQGLLQDGSPILLSDVISAFLSNNDTQNLSSPVTFTFSHRSVIPRQKVLCVFWEHGQNGCGHWATTGCSTIGTRDTSTICRCTHLSSFAVLMAHYDVQEEDPVLTVITYMGLSVSLLCLLLAALTFLLCKAIQNTSTSLHLQLSLCLFLAHLLFLVAIDQTGHKVLCSIIAGTLHYLYLATLTWMLLEALYLFLTARNLTVVNYSSINRFMKKLMFPVGYGVPAVTVAISAASRPHLYGTPSRCWLQPEKGFIWGFLGPVCAIFSVNLVLFLVTLWILKNRLSSLNSEVSTLRNTRMLAFKATAQLFILGCTWCLGILQVGPAARVMAYLFTIINSLQGVFIFLVYCLLSQQVREQYGKWSKGIRKLKTESEMHTLSSSAKADTSKPSTVN

SEQ ID NO: 23498 - protein, 648 aa, Artificial Sequence
  Synthetic polypeptide
HDVDECQQNPRLCKSYGTCVNTLGSYTCQCLPGFKLKPEDPKLCTDVNECTSGQNPCHSSTHCLNNVGSYQCRCRPGWQPIPGSPNGPNNTVCEDVDECSSGQHQCDSSTVCFNTVGSYSCRCRPGWKPRHGIPNNQKDTVCEDMTFSTWTPPPGVHSQTLSRFFDKVQDLGRDYKPGLANNTIQSILQALDELLEAPGDLETLPRLQQHCVASHLLDGLEDVLRGLSKNLSNGLLNFSYPAGTELSLEVQKQVDRSVTLRQNQAVMQLDWNQAQKSGDPGPSVVGLVSIPGMGKLLAEAPLVLEPEKQMLLHETHQGLLQDGSPILLSDVISAFLSNNDTQNLSSPVTFTFSHREEDPVLTVITYMGLSVSLLCLLLAALTFLLCKAIQNTSTSLHLQLSLCLFLAHLLFLVAIDQTGHKVLCSIIAGTLHYLYLATLTWMLLEALYLFLTARNLTVVNYSSINRFMKKLMFPVGYGVPAVTVAISAASRPHLYGTPSRCWLQPEKGFIWGFLGPVCAIFSVNLVLFLVTLWILKNRLSSLNSEVSTLRNTRMLAFKATAQLFILGCTWCLGILQVGPAARVMAYLFTIINSLQGVFIFLVYCLLSQQVREQYGKWSKGIRKLKTESEMHTLSSSAKADTSKPSTVN

SEQ ID NO: 23499 - protein, 714 aa, Artificial Sequence
  Synthetic polypeptide
HDVDECQQNPRLCKSYGTCVNTLGSYTCQCLPGFKLKPEDPKLCTDVNECTSGQNPCHSSTHCLNNVGSYQCRCRPGWQPIPGSPNGPNNTVCEDVDECSSGQHQCDSSTVCFNTVGSYSCRCRPGWKPRHGIPNNQKDTVCEDMTFSTWTPPPGVHSQTLSRFFDKVQDLGRDYKPGLANNTIQSILQALDELLEAPGDLETLPRLQQHCVASHLLDGLEDVLRGLSKNLSNGLLNFSYPAGTELSLEVQKQVDRSVTLRQNQAVMQLDWNQAQKSGDPGMGKLLAEAPLVLEPEKQMLLHETHQGLLQDGSPILLSDVISAFLSNNDTQNLSSPVTFTFSHRSVIPRQKVLCVFWEHGQNGCGHWATTGCSTIGTRDTSTICRCTHLSSFAVLMAHYDVQEEDPVLTVITYMGLSVSLLCLLLAALTFLLCKAIQNTSTSLHLQLSLCLFLAHLLFLVAIDQTGHKVLCSIIAGTLHYLYLATLTWMLLEALYLFLTARNLTVVNYSSINRFMKKLMFPVGYGVPAVTVAISAASRPHLYGTPSRCWLQPEKGFIWGFLGPVCAIFSVNLVLFLVTLWILKNRLSSLNSEVSTLRNTRMLAFKATAQLFILGCTWCLGILQVGPAARVMAYLFTIINSLQGVFIFLVYCLLSQQVREQYGKWSKGIRKLKTESEMHTLSSSAKADTSKPSTPGTVVQACNASTLGGQSRKIT

SEQ ID NO: 23500 - protein, 320 aa, Artificial Sequence
  Synthetic polypeptide
HDVDECQQNPRLCKSYGTCVNTLGSYTCQCLPGFKLKPEDPKLCTDVDECSSGQHQCDSSTVCFNTVGSYSCRCRPGWKPRHGIPNNQKDTVCEDMTFSTWTPPPGVHSQTLSRFFDKVQDLGRDYKPGLANNTIQSILQALDELLEAPGDLETLPRLQQHCVASHLLDGLEDVLRGLSKNLSNGLLNFSYPAGTELSLEVQKQVDRSVTLRQNQAVMQLDWNQAQKSGDPVSDPETEGALCLLGAWPEWMWSLGHHRLQHNRHQRHQHHLPLHPPEQLCRPHGPLRCAGGGSRADCHHLHGAERLSAVPPPGGPHFSPV

SEQ ID NO: 23501 - protein, 262 aa, Artificial Sequence
  Synthetic polypeptide
HDVDECQQNPRLCKSYGTCVNTLGSYTCQCLPGFKLKPEDPKLCTDVDECSSGQHQCDSSTVCFNTVGSYSCRCRPGWKPRHGIPNNQKDTVCEDMTFSTWTPPPGVHSQTLSRFFDKVQDLGRDYKPGLANNTIQSILQALDELLEAPGDLETLPRLQQHCVASHLLDGLEDVLRGLSKNLSNGLLNFSYPAGTELSLEVQKQVDRSVTLRQNQAVMQLDWNQAQKSGDPGGGSRADCHHLHGAERLSAVPPPGGPHFSPV

SEQ ID NO: 23502 - protein, 62 aa, Artificial Sequence
  Synthetic polypeptide
GQAWWLMPAIPALWEAEMWTNVSRTQGSVKATAPASTPSAATRASACLASSSNLRTRSSAQM

SEQ ID NO: 23503 - protein, 28 aa, Artificial Sequence
  Synthetic polypeptide
ARHGGSCLQSQHFGRPRCGRMSAEPKAL

SEQ ID NO: 23504 - protein, 721 aa, Artificial Sequence
  Synthetic polypeptide
PGMVAHACNPSTLGGRDVDECQQNPRLCKSYGTCVNTLGSYTCQCLPGFKLKPEDPKLCTDVNECTSGQNPCHSSTHCLNNVGSYQCRCRPGWQPIPGSPNGPNNTVCEDVDECSSGQHQCDSSTVCFNTVGSYSCRCRPGWKPRHGIPNNQKDTVCEDMTFSTWTPPPGVHSQTLSRFFDKVQDLGRDYKPGLANNTIQSILQALDELLEAPGDLETLPRLQQHCVASHLLDGLEDVLRGLSKNLSNGLLNFSYPAGTELSLEVQKQVDRSVTLRQNQAVMQLDWNQAQKSGDPGPSVVGLVSIPGMGKLLAEAPLVLEPEKQMLLHETHQGLLQDGSPILLSDVISAFLSNNDTQNLSSPVTFTFSHRSVIPRQKVLCVFWEHGQNGCGHWATTGCSTIGTRDTSTICRCTHLSSFAVLMAHYDVQEEDPVLTVITYMGLSVSLLCLLLAALTFLLCKAIQNTSTSLHLQLSLCLFLAHLLFLVAIDQTGHKVLCSIIAGTLHYLYLATLTWMLLEALYLFLTARNLTVVNYSSINRFMKKLMFPVGYGVPAVTVAISAASRPHLYGTPSRCWLQPEKGFIWGFLGPVCAIFSVNLVLFLVTLWILKNRLSSLNSEVSTLRNTRMLAFKATAQLFILGCTWCLGILQVGPAARVMAYLFTIINSLQGVFIFLVYCLLSQQVREQYGKWSKGIRKLKTESEMHTLSSSAKADTSKPSTVN

SEQ ID NO: 23505 - protein, 111 aa, Artificial Sequence
  Synthetic polypeptide
GQAWWLMPAIPALWEAEMWTNVSRTQGSVKATAPASTPSAATRASACLASSSNLRTRSSAQMWTSAAPGSISVTAPPSASTPWVHTAAAAAQAGSPDTESRITKRTLSVKI

SEQ ID NO: 23506 - protein, 672 aa, Artificial Sequence
  Synthetic polypeptide
PGMVAHACNPSTLGGRDVDECQQNPRLCKSYGTCVNTLGSYTCQCLPGFKLKPEDPKLCTDVDECSSGQHQCDSSTVCFNTVGSYSCRCRPGWKPRHGIPNNQKDTVCEDMTFSTWTPPPGVHSQTLSRFFDKVQDLGRDYKPGLANNTIQSILQALDELLEAPGDLETLPRLQQHCVASHLLDGLEDVLRGLSKNLSNGLLNFSYPAGTELSLEVQKQVDRSVTLRQNQAVMQLDWNQAQKSGDPGPSVVGLVSIPGMGKLLAEAPLVLEPEKQMLLHETHQGLLQDGSPILLSDVISAFLSNNDTQNLSSPVTFTFSHRSVIPRQKVLCVFWEHGQNGCGHWATTGCSTIGTRDTSTICRCTHLSSFAVLMAHYDVQEEDPVLTVITYMGLSVSLLCLLLAALTFLLCKAIQNTSTSLHLQLSLCLFLAHLLFLVAIDQTGHKVLCSIIAGTLHYLYLATLTWMLLEALYLFLTARNLTVVNYSSINRFMKKLMFPVGYGVPAVTVAISAASRPHLYGTPSRCWLQPEKGFIWGFLGPVCAIFSVNLVLFLVTLWILKNRLSSLNSEVSTLRNTRMLAFKATAQLFILGCTWCLGILQVGPAARVMAYLFTIINSLQGVFIFLVYCLLSQQVREQYGKWSKGIRKLKTESEMHTLSSSAKADTSKPSTVN

SEQ ID NO: 23507 - protein, 710 aa, Artificial Sequence
  Synthetic polypeptide
PGMVAHACNPSTLGGRDVDECQQNPRLCKSYGTCVNTLGSYTCQCLPGFKLKPEDPKLCTDVNECTSGQNPCHSSTHCLNNVGSYQCRCRPGWQPIPGSPNGPNNTVCEDVDECSSGQHQCDSSTVCFNTVGSYSCRCRPGWKPRHGIPNNQKDTVCEDMTFSTWTPPPGVHSQTLSRFFDKVQDLGRDYKPGLANNTIQSILQALDELLEAPGDLETLPRLQQHCVASHLLDGLEDVLRGLSKNLSNGLLNFSYPAGTELSLEVQKQVDRSVTLRQNQAVMQLDWNQAQKSGDPGMGKLLAEAPLVLEPEKQMLLHETHQGLLQDGSPILLSDVISAFLSNNDTQNLSSPVTFTFSHRSVIPRQKVLCVFWEHGQNGCGHWATTGCSTIGTRDTSTICRCTHLSSFAVLMAHYDVQEEDPVLTVITYMGLSVSLLCLLLAALTFLLCKAIQNTSTSLHLQLSLCLFLAHLLFLVAIDQTGHKVLCSIIAGTLHYLYLATLTWMLLEALYLFLTARNLTVVNYSSINRFMKKLMFPVGYGVPAVTVAISAASRPHLYGTPSRCWLQPEKGFIWGFLGPVCAIFSVNLVLFLVTLWILKNRLSSLNSEVSTLRNTRMLAFKATAQLFILGCTWCLGILQVGPAARVMAYLFTIINSLQGVFIFLVYCLLSQQVREQYGKWSKGIRKLKTESEMHTLSSSAKADTSKPSTVN

SEQ ID NO: 23508 - protein, 663 aa, Artificial Sequence
  Synthetic polypeptide
PGMVAHACNPSTLGGRDVDECQQNPRLCKSYGTCVNTLGSYTCQCLPGFKLKPEDPKLCTDVNECTSGQNPCHSSTHCLNNVGSYQCRCRPGWQPIPGSPNGPNNTVCEDVDECSSGQHQCDSSTVCFNTVGSYSCRCRPGWKPRHGIPNNQKDTVCEDMTFSTWTPPPGVHSQTLSRFFDKVQDLGRDYKPGLANNTIQSILQALDELLEAPGDLETLPRLQQHCVASHLLDGLEDVLRGLSKNLSNGLLNFSYPAGTELSLEVQKQVDRSVTLRQNQAVMQLDWNQAQKSGDPGPSVVGLVSIPGMGKLLAEAPLVLEPEKQMLLHETHQGLLQDGSPILLSDVISAFLSNNDTQNLSSPVTFTFSHREEDPVLTVITYMGLSVSLLCLLLAALTFLLCKAIQNTSTSLHLQLSLCLFLAHLLFLVAIDQTGHKVLCSIIAGTLHYLYLATLTWMLLEALYLFLTARNLTVVNYSSINRFMKKLMFPVGYGVPAVTVAISAASRPHLYGTPSRCWLQPEKGFIWGFLGPVCAIFSVNLVLFLVTLWILKNRLSSLNSEVSTLRNTRMLAFKATAQLFILGCTWCLGILQVGPAARVMAYLFTIINSLQGVFIFLVYCLLSQQVREQYGKWSKGIRKLKTESEMHTLSSSAKADTSKPSTVN

SEQ ID NO: 23509 - protein, 729 aa, Artificial Sequence
  Synthetic polypeptide
PGMVAHACNPSTLGGRDVDECQQNPRLCKSYGTCVNTLGSYTCQCLPGFKLKPEDPKLCTDVNECTSGQNPCHSSTHCLNNVGSYQCRCRPGWQPIPGSPNGPNNTVCEDVDECSSGQHQCDSSTVCFNTVGSYSCRCRPGWKPRHGIPNNQKDTVCEDMTFSTWTPPPGVHSQTLSRFFDKVQDLGRDYKPGLANNTIQSILQALDELLEAPGDLETLPRLQQHCVASHLLDGLEDVLRGLSKNLSNGLLNFSYPAGTELSLEVQKQVDRSVTLRQNQAVMQLDWNQAQKSGDPGMGKLLAEAPLVLEPEKQMLLHETHQGLLQDGSPILLSDVISAFLSNNDTQNLSSPVTFTFSHRSVIPRQKVLCVFWEHGQNGCGHWATTGCSTIGTRDTSTICRCTHLSSFAVLMAHYDVQEEDPVLTVITYMGLSVSLLCLLLAALTFLLCKAIQNTSTSLHLQLSLCLFLAHLLFLVAIDQTGHKVLCSIIAGTLHYLYLATLTWMLLEALYLFLTARNLTVVNYSSINRFMKKLMFPVGYGVPAVTVAISAASRPHLYGTPSRCWLQPEKGFIWGFLGPVCAIFSVNLVLFLVTLWILKNRLSSLNSEVSTLRNTRMLAFKATAQLFILGCTWCLGILQVGPAARVMAYLFTIINSLQGVFIFLVYCLLSQQVREQYGKWSKGIRKLKTESEMHTLSSSAKADTSKPSTPGTVVQACNASTLGGQSRKIT

SEQ ID NO: 23510 - protein, 335 aa, Artificial Sequence
  Synthetic polypeptide
PGMVAHACNPSTLGGRDVDECQQNPRLCKSYGTCVNTLGSYTCQCLPGFKLKPEDPKLCTDVDECSSGQHQCDSSTVCFNTVGSYSCRCRPGWKPRHGIPNNQKDTVCEDMTFSTWTPPPGVHSQTLSRFFDKVQDLGRDYKPGLANNTIQSILQALDELLEAPGDLETLPRLQQHCVASHLLDGLEDVLRGLSKNLSNGLLNFSYPAGTELSLEVQKQVDRSVTLRQNQAVMQLDWNQAQKSGDPVSDPETEGALCLLGAWPEWMWSLGHHRLQHNRHQRHQHHLPLHPPEQLCRPHGPLRCAGGGSRADCHHLHGAERLSAVPPPGGPHFSPV

SEQ ID NO: 23511 - protein, 277 aa, Artificial Sequence
  Synthetic polypeptide
PGMVAHACNPSTLGGRDVDECQQNPRLCKSYGTCVNTLGSYTCQCLPGFKLKPEDPKLCTDVDECSSGQHQCDSSTVCFNTVGSYSCRCRPGWKPRHGIPNNQKDTVCEDMTFSTWTPPPGVHSQTLSRFFDKVQDLGRDYKPGLANNTIQSILQALDELLEAPGDLETLPRLQQHCVASHLLDGLEDVLRGLSKNLSNGLLNFSYPAGTELSLEVQKQVDRSVTLRQNQAVMQLDWNQAQKSGDPGGGSRADCHHLHGAERLSAVPPPGGPHFSPV

SEQ ID NO: 23512 - protein, 65 aa, Artificial Sequence
  Synthetic polypeptide
HDHHVQLHRLLTAYGCPAKRMWTNVSRTQGSVKATAPASTPSAATRASACLASSSNLRTRSSAQM

SEQ ID NO: 23513 - protein, 20 aa, Artificial Sequence
  Synthetic polypeptide
LHMDAQPRGCGRMSAEPKAL

SEQ ID NO: 23514 - protein, 716 aa, Artificial Sequence
  Synthetic polypeptide
AADCIWMPSQEDVDECQQNPRLCKSYGTCVNTLGSYTCQCLPGFKLKPEDPKLCTDVNECTSGQNPCHSSTHCLNNVGSYQCRCRPGWQPIPGSPNGPNNTVCEDVDECSSGQHQCDSSTVCFNTVGSYSCRCRPGWKPRHGIPNNQKDTVCEDMTFSTWTPPPGVHSQTLSRFFDKVQDLGRDYKPGLANNTIQSILQALDELLEAPGDLETLPRLQQHCVASHLLDGLEDVLRGLSKNLSNGLLNFSYPAGTELSLEVQKQVDRSVTLRQNQAVMQLDWNQAQKSGDPGPSVVGLVSIPGMGKLLAEAPLVLEPEKQMLLHETHQGLLQDGSPILLSDVISAFLSNNDTQNLSSPVTFTFSHRSVIPRQKVLCVFWEHGQNGCGHWATTGCSTIGTRDTSTICRCTHLSSFAVLMAHYDVQEEDPVLTVITYMGLSVSLLCLLLAALTFLLCKAIQNTSTSLHLQLSLCLFLAHLLFLVAIDQTGHKVLCSIIAGTLHYLYLATLTWMLLEALYLFLTARNLTVVNYSSINRFMKKLMFPVGYGVPAVTVAISAASRPHLYGTPSRCWLQPEKGFIWGFLGPVCAIFSVNLVLFLVTLWILKNRLSSLNSEVSTLRNTRMLAFKATAQLFILGCTWCLGILQVGPAARVMAYLFTIINSLQGVFIFLVYCLLSQQVREQYGKWSKGIRKLKTESEMHTLSSSAKADTSKPSTVN

SEQ ID NO: 23515 - protein, 114 aa, Artificial Sequence
  Synthetic polypeptide
HDHHVQLHRLLTAYGCPAKRMWTNVSRTQGSVKATAPASTPSAATRASACLASSSNLRTRSSAQMWTSAAPGSISVTAPPSASTPWVHTAAAAAQAGSPDTESRITKRTLSVKI

SEQ ID NO: 23516 - protein, 667 aa, Artificial Sequence
  Synthetic polypeptide
AADCIWMPSQEDVDECQQNPRLCKSYGTCVNTLGSYTCQCLPGFKLKPEDPKLCTDVDECSSGQHQCDSSTVCFNTVGSYSCRCRPGWKPRHGIPNNQKDTVCEDMTFSTWTPPPGVHSQTLSRFFDKVQDLGRDYKPGLANNTIQSILQALDELLEAPGDLETLPRLQQHCVASHLLDGLEDVLRGLSKNLSNGLLNFSYPAGTELSLEVQKQVDRSVTLRQNQAVMQLDWNQAQKSGDPGPSVVGLVSIPGMGKLLAEAPLVLEPEKQMLLHETHQGLLQDGSPILLSDVISAFLSNNDTQNLSSPVTFTFSHRSVIPRQKVLCVFWEHGQNGCGHWATTGCSTIGTRDTSTICRCTHLSSFAVLMAHYDVQEEDPVLTVITYMGLSVSLLCLLLAALTFLLCKAIQNTSTSLHLQLSLCLFLAHLLFLVAIDQTGHKVLCSIIAGTLHYLYLATLTWMLLEALYLFLTARNLTVVNYSSINRFMKKLMFPVGYGVPAVTVAISAASRPHLYGTPSRCWLQPEKGFIWGFLGPVCAIFSVNLVLFLVTLWILKNRLSSLNSEVSTLRNTRMLAFKATAQLFILGCTWCLGILQVGPAARVMAYLFTIINSLQGVFIFLVYCLLSQQVREQYGKWSKGIRKLKTESEMHTLSSSAKADTSKPSTVN

SEQ ID NO: 23517 - protein, 705 aa, Artificial Sequence
  Synthetic polypeptide
AADCIWMPSQEDVDECQQNPRLCKSYGTCVNTLGSYTCQCLPGFKLKPEDPKLCTDVNECTSGQNPCHSSTHCLNNVGSYQCRCRPGWQPIPGSPNGPNNTVCEDVDECSSGQHQCDSSTVCFNTVGSYSCRCRPGWKPRHGIPNNQKDTVCEDMTFSTWTPPPGVHSQTLSRFFDKVQDLGRDYKPGLANNTIQSILQALDELLEAPGDLETLPRLQQHCVASHLLDGLEDVLRGLSKNLSNGLLNFSYPAGTELSLEVQKQVDRSVTLRQNQAVMQLDWNQAQKSGDPGMGKLLAEAPLVLEPEKQMLLHETHQGLLQDGSPILLSDVISAFLSNNDTQNLSSPVTFTFSHRSVIPRQKVLCVFWEHGQNGCGHWATTGCSTIGTRDTSTICRCTHLSSFAVLMAHYDVQEEDPVLTVITYMGLSVSLLCLLLAALTFLLCKAIQNTSTSLHLQLSLCLFLAHLLFLVAIDQTGHKVLCSIIAGTLHYLYLATLTWMLLEALYLFLTARNLTVVNYSSINRFMKKLMFPVGYGVPAVTVAISAASRPHLYGTPSRCWLQPEKGFIWGFLGPVCAIFSVNLVLFLVTLWILKNRLSSLNSEVSTLRNTRMLAFKATAQLFILGCTWCLGILQVGPAARVMAYLFTIINSLQGVFIFLVYCLLSQQVREQYGKWSKGIRKLKTESEMHTLSSSAKADTSKPSTVN

SEQ ID NO: 23518 - protein, 658 aa, Artificial Sequence
  Synthetic polypeptide
AADCIWMPSQEDVDECQQNPRLCKSYGTCVNTLGSYTCQCLPGFKLKPEDPKLCTDVNECTSGQNPCHSSTHCLNNVGSYQCRCRPGWQPIPGSPNGPNNTVCEDVDECSSGQHQCDSSTVCFNTVGSYSCRCRPGWKPRHGIPNNQKDTVCEDMTFSTWTPPPGVHSQTLSRFFDKVQDLGRDYKPGLANNTIQSILQALDELLEAPGDLETLPRLQQHCVASHLLDGLEDVLRGLSKNLSNGLLNFSYPAGTELSLEVQKQVDRSVTLRQNQAVMQLDWNQAQKSGDPGPSVVGLVSIPGMGKLLAEAPLVLEPEKQMLLHETHQGLLQDGSPILLSDVISAFLSNNDTQNLSSPVTFTFSHREEDPVLTVITYMGLSVSLLCLLLAALTFLLCKAIQNTSTSLHLQLSLCLFLAHLLFLVAIDQTGHKVLCSIIAGTLHYLYLATLTWMLLEALYLFLTARNLTVVNYSSINRFMKKLMFPVGYGVPAVTVAISAASRPHLYGTPSRCWLQPEKGFIWGFLGPVCAIFSVNLVLFLVTLWILKNRLSSLNSEVSTLRNTRMLAFKATAQLFILGCTWCLGILQVGPAARVMAYLFTIINSLQGVFIFLVYCLLSQQVREQYGKWSKGIRKLKTESEMHTLSSSAKADTSKPSTVN

SEQ ID NO: 23519 - protein, 724 aa, Artificial Sequence
  Synthetic polypeptide
AADCIWMPSQEDVDECQQNPRLCKSYGTCVNTLGSYTCQCLPGFKLKPEDPKLCTDVNECTSGQNPCHSSTHCLNNVGSYQCRCRPGWQPIPGSPNGPNNTVCEDVDECSSGQHQCDSSTVCFNTVGSYSCRCRPGWKPRHGIPNNQKDTVCEDMTFSTWTPPPGVHSQTLSRFFDKVQDLGRDYKPGLANNTIQSILQALDELLEAPGDLETLPRLQQHCVASHLLDGLEDVLRGLSKNLSNGLLNFSYPAGTELSLEVQKQVDRSVTLRQNQAVMQLDWNQAQKSGDPGMGKLLAEAPLVLEPEKQMLLHETHQGLLQDGSPILLSDVISAFLSNNDTQNLSSPVTFTFSHRSVIPRQKVLCVFWEHGQNGCGHWATTGCSTIGTRDTSTICRCTHLSSFAVLMAHYDVQEEDPVLTVITYMGLSVSLLCLLLAALTFLLCKAIQNTSTSLHLQLSLCLFLAHLLFLVAIDQTGHKVLCSIIAGTLHYLYLATLTWMLLEALYLFLTARNLTVVNYSSINRFMKKLMFPVGYGVPAVTVAISAASRPHLYGTPSRCWLQPEKGFIWGFLGPVCAIFSVNLVLFLVTLWILKNRLSSLNSEVSTLRNTRMLAFKATAQLFILGCTWCLGILQVGPAARVMAYLFTIINSLQGVFIFLVYCLLSQQVREQYGKWSKGIRKLKTESEMHTLSSSAKADTSKPSTPGTVVQACNASTLGGQSRKIT

SEQ ID NO: 23520 - protein, 330 aa, Artificial Sequence
  Synthetic polypeptide
AADCIWMPSQEDVDECQQNPRLCKSYGTCVNTLGSYTCQCLPGFKLKPEDPKLCTDVDECSSGQHQCDSSTVCFNTVGSYSCRCRPGWKPRHGIPNNQKDTVCEDMTFSTWTPPPGVHSQTLSRFFDKVQDLGRDYKPGLANNTIQSILQALDELLEAPGDLETLPRLQQHCVASHLLDGLEDVLRGLSKNLSNGLLNFSYPAGTELSLEVQKQVDRSVTLRQNQAVMQLDWNQAQKSGDPVSDPETEGALCLLGAWPEWMWSLGHHRLQHNRHQRHQHHLPLHPPEQLCRPHGPLRCAGGGSRADCHHLHGAERLSAVPPPGGPHFSPV

SEQ ID NO: 23521 - protein, 272 aa, Artificial Sequence
  Synthetic polypeptide
AADCIWMPSQEDVDECQQNPRLCKSYGTCVNTLGSYTCQCLPGFKLKPEDPKLCTDVDECSSGQHQCDSSTVCFNTVGSYSCRCRPGWKPRHGIPNNQKDTVCEDMTFSTWTPPPGVHSQTLSRFFDKVQDLGRDYKPGLANNTIQSILQALDELLEAPGDLETLPRLQQHCVASHLLDGLEDVLRGLSKNLSNGLLNFSYPAGTELSLEVQKQVDRSVTLRQNQAVMQLDWNQAQKSGDPGGGSRADCHHLHGAERLSAVPPPGGPHFSPV

SEQ ID NO: 23522 - protein, 54 aa, Artificial Sequence
  Synthetic polypeptide
SQLLGRLRWEDRWSPGVRGLISWWARTATCTRDAAGTGWAPTRSATTPGASAWP

SEQ ID NO: 23523 - protein, 215 aa, Artificial Sequence
  Synthetic polypeptide
WAWCCAPVVPATRQAKVGGSLEPRSSRLDFVVGSDGYVYEGRGWHWVGAHTLGHNSRGFGVAIVGNYTAALPTEAALRTVRDTLPSCAVRAGLLRPDYALLGHRQLVRTDCPGDALFDLLRTWPHFTAVSLRSLHYTARRPSVYTSSTRPLPPACNSCARTASARPPTSRRHVYSGNLGPAFAGHSAGNIPDPVTSAYAASAQPQTQPACPFPSS

SEQ ID NO: 23524 - protein, 157 aa, Artificial Sequence
  Synthetic polypeptide
WAWCCAPVVPATRQAKVGGSLEPRSSRLDFVVGSDGYVYEGRGWHWVGAHTLGHNSRGFGVAIVGNYTAALPTEAALRTVRDTLPSCAVRAGLLRPDYALLGHRQLVRTDCPGDALFDLLRTWPHFTATVKPRPARSVSKRSRREPPPRTLPATDLQ

SEQ ID NO: 23525 - protein, 56 aa, Artificial Sequence
  Synthetic polypeptide
GQAQWLTPVIPALWEAEAGGSRVSWWARTATCTRDAAGTGWAPTRSATTPGASAWP

SEQ ID NO: 23526 - protein, 139 aa, Artificial Sequence
  Synthetic polypeptide
SQHFGRPRREDHEFRGGLGRLRVRGTRLALGGRPHARPQLPGLRRGHSGQLHRGAAHRGRSAHGARHAPELCGARRPPAARLRAAGPPPAGAHRLPRRRALRPAAHLAALHRGESSQPALHGPPPLRLHKLHEAPAPCL

SEQ ID NO: 23527 - protein, 208 aa, Artificial Sequence
  Synthetic polypeptide
PGAVAHACNPSTLGGRGGRITSFVVGSDGYVYEGRGWHWVGAHTLGHNSRGFGVAIVGNYTAALPTEAALRTVRDTLPSCAVRAGLLRPDYALLGHRQLVRTDCPGDALFDLLRTWPHFTAVSLRSLHYTARRPSVYTSSTRPLPPACNSCARTASARPPTSRRHVYSGNLGPAFAGHSAGNIPDPVTSAYAASAQPQTQPACPFPSS

SEQ ID NO: 23528 - protein, 114 aa, Artificial Sequence
  Synthetic polypeptide
SQHFGRPRREDHEFRGGLGRLRVRGTRLALGGRPHARPQLPGLRRGHSGQLHRGAAHRGRSAHGARHAPELCGARRPPAARLRAAGPPPAGAHRLPRRRALRPAAHLAALHRDC

SEQ ID NO: 23529 - protein, 150 aa, Artificial Sequence
  Synthetic polypeptide
PGAVAHACNPSTLGGRGGRITSFVVGSDGYVYEGRGWHWVGAHTLGHNSRGFGVAIVGNYTAALPTEAALRTVRDTLPSCAVRAGLLRPDYALLGHRQLVRTDCPGDALFDLLRTWPHFTATVKPRPARSVSKRSRREPPPRTLPATDLQ

SEQ ID NO: 23530 - protein, 72 aa, Artificial Sequence
  Synthetic polypeptide
RPAWPTWKQEELVQQVRKRLEEALMADMLAHVEELARDGEAPLDKACAEDDDEEDEEEEEEEPDPDPEMEHV

SEQ ID NO: 23531 - protein, 41 aa, Artificial Sequence
  Synthetic polypeptide
SQHFGRPRREDHLRSGVEDQPGQHGSRKSWCSRCGSGWRRR

SEQ ID NO: 23532 - protein, 41 aa, Artificial Sequence
  Synthetic polypeptide
GQELKTSLANMEAGRAGAAGAEAAGGGADGRHAGARGGAGP

SEQ ID NO: 23533 - protein, 23 aa, Artificial Sequence
  Synthetic polypeptide
HARAGRSSAASRSWRATWAAPWT

SEQ ID NO: 23534 - protein, 126 aa, Artificial Sequence
  Synthetic polypeptide
AQEFQTSLGNMPEREEVPQQAAAGALPGRLHGPEHLRLPHGQDADEQDEQEPPARALRLLQPGQGQARPEHGAARAPDGVHLQAAGDQDYQPPQQQGQERPAEGGGPAAPALLGEEAERPERLRHC

SEQ ID NO: 23535 - protein, 282 aa, Artificial Sequence
  Synthetic polypeptide
LTFNPKALGGKMGGLLELRSSRPAWVTCPSGKKFRSKPQLARYLGGSMDLSTFDFRTGKMLMSKMNKSRQRVRYDSSNQVKGKPDLNTALPVRQTASIFKQPVTKITNHPSNKVKSDPQKAVDQPRQLFWEKKLSGLNAFDIAEELVKTMDLPKGLQGVGPGCTDETLLSAIASALHTSTMPITGQLSAAVEKNPGVWLNTTQPLCKAFMVTDEDIRKQEELVQQVRKRLEEALMADMLAHVEELARDGEAPLDKACAEDDDEEDEEEEEEEPDPDPEMEHV

SEQ ID NO: 23536 - protein, 205 aa, Artificial Sequence
  Synthetic polypeptide
WAEGDVAALNRRIQLVEEELDRAQERLATALQKLEEAEKAADESERGMKVIENRAMKDEEKMEIQEMQLKEAKHIAEEADRKYEEVARKLVILEGELERAEERAEVSELKCGDLEEELKNVTNNLKSLEAASEKYSEKEDKYEEEIKLLSDKLKEAETRAEFAERTVAKLEKTIDDLEEKLAQAKEENVGLHQTLDQTLNELNCI

SEQ ID NO: 23537 - protein, 50 aa, Artificial Sequence
  Synthetic polypeptide
TANGLKVMWPPSTDASSSLRRSWTGLRNDWPRPCRSWRRQKKLQMRVREE

SEQ ID NO: 23538 - protein, 4 aa, Artificial Sequence
  Synthetic polypeptide
MLMG

SEQ ID NO: 23539 - protein, 107 aa, Artificial Sequence
  Synthetic polypeptide
WAEGDVAALNRRIQLVEEELDRAQERLATALQKLEEAEKAADESERGMKVIENRAMKDEEKMEIQEMQLKEAKHIAEEADRKYEEVARKLVILEGELERAEERAEVS

SEQ ID NO: 23540 - protein, 137 aa, Artificial Sequence
  Synthetic polypeptide
WAEGDVAALNRRIQLVEEELDRAQERLATALQKLEEAEKAADESERGMKVIENRAMKDEEKMEIQEMQLKEAKHIAEEADRKYEEVARKLVILEGELERAEERAEVSELKCGDLEEELKNVTNNLKSLEAASEKYSE

SEQ ID NO: 23541 - protein, 98 aa, Artificial Sequence
  Synthetic polypeptide
WAEGDVAALNRRIQLVEEELDRAQERLATALQKLEEAEKAADESERGMKVIENRAMKDEEKMEIQEMQLKEAKHIAEEADRKYEEVARKLVILEGELE

SEQ ID NO: 23542 - protein, 8 aa, Artificial Sequence
  Synthetic polypeptide
DQPAQHKE

SEQ ID NO: 23543 - protein, 23 aa, Artificial Sequence
  Synthetic polypeptide
AQEFETSLRNIRNEGDRKPGHEG

SEQ ID NO: 23544 - protein, 21 aa, Artificial Sequence
  Synthetic polypeptide
EDKAAVSSQGTTALQPGQQKE

SEQ ID NO: 23545 - protein, 25 aa, Artificial Sequence
  Synthetic polypeptide
ALRAPLHSNLGNRRNEGDRKPGHEG

SEQ ID NO: 23546 - protein, 194 aa, Artificial Sequence
  Synthetic polypeptide
SQLLRRPRQQDCLSLRGQGCRELSGHHCTPTWATEGMKVIENRAMKDEEKMEIQEMQLKEAKHIAEEADRKYEEVARKLVILEGELERAEERAEVSELKCGDLEEELKNVTNNLKSLEAASEKYSEKEDKYEEEIKLLSDKLKEAETRAEFAERTVAKLEKTIDDLEEKLAQAKEENVGLHQTLDQTLNELNCI

SEQ ID NO: 23547 - protein, 96 aa, Artificial Sequence
  Synthetic polypeptide
SQLLRRPRQQDCLSLRGQGCRELSGHHCTPTWATEGMKVIENRAMKDEEKMEIQEMQLKEAKHIAEEADRKYEEVARKLVILEGELERAEERAEVS

SEQ ID NO: 23548 - protein, 126 aa, Artificial Sequence
  Synthetic polypeptide
SQLLRRPRQQDCLSLRGQGCRELSGHHCTPTWATEGMKVIENRAMKDEEKMEIQEMQLKEAKHIAEEADRKYEEVARKLVILEGELERAEERAEVSELKCGDLEEELKNVTNNLKSLEAASEKYSE

SEQ ID NO: 23549 - protein, 87 aa, Artificial Sequence
  Synthetic polypeptide
SQLLRRPRQQDCLSLRGQGCRELSGHHCTPTWATEGMKVIENRAMKDEEKMEIQEMQLKEAKHIAEEADRKYEEVARKLVILEGELE

SEQ ID NO: 23550 - protein, 25 aa, Artificial Sequence
  Synthetic polypeptide
AKIVPLHSSLGDRARLHLKKKKRKN

SEQ ID NO: 23551 - protein, 238 aa, Artificial Sequence
  Synthetic polypeptide
DQPGQHGETPSLLKTQKLAGHCGRHLWSQLLGRLRQENHLNLGDRGCSEPRLCHCTPAWATERDSISKKKKERIDFKIRTIELDGKRIKLQIWDTAGQERFRTITTAYYRGAMGIMLVYDITNEKSFDNIRNWIRNIEEHASADVEKMILGNKCDVNDKRQVSKERGEKLALDYGIKFMETSAKANINVENAFFTLARDIKAKMDKKLEGNSPQGSNQGVKITPDQQKRSSFFRCVLL

SEQ ID NO: 23552 - protein, 40 aa, Artificial Sequence
  Synthetic polypeptide
TWETEAAVSQDCATALQPGRQSETPSQKKKKKELTLKLGP

SEQ ID NO: 23553 - protein, 238 aa, Artificial Sequence
  Synthetic polypeptide
DQPGQHGETPSLLKTQKLAGHCGRHLWSQLLGRLRQENHLNLGDRGCSEPRLCHCTPAWATERDSISKKKKERIDFKIRTIELDGKRIKLQIWDTAGQERFRTITTAYYRGAMGIMLVYDITNEKSFDNIRNWIRNIEEHASADVEKMILGNKCDVNDKRQVSKERGEKLALDYGIKFMETSAKANINVENRYQSKNGQKIGRQQPPGEQPGSQNHTGPAEEEQLFPMCSSVRNTALL

SEQ ID NO: 23554 - protein, 42 aa, Artificial Sequence
  Synthetic polypeptide
SQHFGRPRASCWSTTSPTRSPSTTSGTGFATLRSTPLQTSKR

SEQ ID NO: 23555 - protein, 40 aa, Artificial Sequence
  Synthetic polypeptide
PGAVADACNPSTLGGRGHHAGLRHHQREVLRQHPELDSQH

SEQ ID NO: 23556 - protein, 141 aa, Artificial Sequence
  Synthetic polypeptide
QAQWLMPVIPALWEAEGIMLVYDITNEKSFDNIRNWIRNIEEHASADVEKMILGNKCDVNDKRQVSKERGEKLALDYGIKFMETSAKANINVENAFFTLARDIKAKMDKKLEGNSPQGSNQGVKITPDQQKRSSFFRCVLL

SEQ ID NO: 23557 - protein, 141 aa, Artificial Sequence
  Synthetic polypeptide
QAQWLMPVIPALWEAEGIMLVYDITNEKSFDNIRNWIRNIEEHASADVEKMILGNKCDVNDKRQVSKERGEKLALDYGIKFMETSAKANINVENRYQSKNGQKIGRQQPPGEQPGSQNHTGPAEEEQLFPMCSSVRNTALL

SEQ ID NO: 23558 - protein, 345 aa, Artificial Sequence
  Synthetic polypeptide
NIQKISRAWWLAPVVPATWEAEAGEWRESGRRSLQDAENLLESQPLGSFLIRVSHSHVGYTLSYKAQSSCCHFMVKLLDDGTFMIPGEKVAHTSLDALVTFHQQKPIEPRRELLTQPCRQKDPANVDYEDLFLYSNAVAEEAACPVSAPEEASPKPVLCHQSKERKPSAEMNRITTKEATSSCPPKSPLGETRQKLWRSLKMLPERGQRVRQQLKSHLATVNLSSLLDVRRSTVISGPGTGKGSQDHSGDPTSGDRGYTDPCVATSLKSPSQPQAPKDRKVPTRKAERSVSCIEVTPGDRSWHQMVVRALSSQESKPEHQGLAEPENDQLPEEYQQPPPFAPGYC

SEQ ID NO: 23559 - protein, 80 aa, Artificial Sequence
  Synthetic polypeptide
NPISTKIYKKLAGRGGWRLWSQLLGRLRQENGVNPGGGACRMLRTCWSHSHWDPFSSGSVTAMWATHSPTKPKAAAAISW

SEQ ID NO: 23560 - protein, 9 aa, Artificial Sequence
  Synthetic polypeptide
IREAELAGC

SEQ ID NO: 23561 - protein, 293 aa, Artificial Sequence
  Synthetic polypeptide
NIQKISRAWWLAPVVPATWEAEAGEWRESGRRSLQDAENLLESQPLGSFLIRVSHSHVGYTLSYKAQSSCCHFMVKLLDDGTFMIPGEKVAHTSLDALVTFHQQKPIEPRRELLTQPCRQKDPANVDYEDLFLYSNAVAEEAACPVSAPEEASPKPVLCHQSKERKPSAEMNRITTKEATSSCPPKSPLGETRQKLWRSLKMLPERGQRVRQQLKKPPRHCELVVTLGCPEIHGDLRPWDRKRQPRSLRGSHLGGQRLHGSLCGHISQKPLTAPGTKRQKGPHQEGREVGQLH

SEQ ID NO: 23562 - protein, 65 aa, Artificial Sequence
  Synthetic polypeptide
NIQKISRAWWLAPVVPATWEAEAGEWRESGRRSLQDAENLLESQPLGSFLIRVSHSHVGYTLSYK

SEQ ID NO: 23563 - protein, 71 aa, Artificial Sequence
  Synthetic polypeptide
NPISTKIYKKLAGRGGWRLWSQLLGRLRQENGVNPGGGACRMLRTCWSHSHWDPFSSGSVTAMWATHSPTS

SEQ ID NO: 23564 - protein, 193 aa, Artificial Sequence
  Synthetic polypeptide
NPISTKIYKKLAGRGGWRLWSQLLGRLRQENGVNPGGGACRMLRTCWSHSHWDPFSSGSVTAMWATHSPTSKAWAGIQGRGRWALGFPWRGQGVLHVIASQKAAVTEAVDLRTGAASQAMSEAFVRSGMFYLRPAFVLLCYKWGKLRHSEVSNLLGVAWPVSEEACMGTWGSLAVAVTLPAQGLGTWGRDEGE

SEQ ID NO: 23565 - protein, 78 aa, Artificial Sequence
  Synthetic polypeptide
NIQKISRAWWLAPVVPATWEAEAGEWRESGRRSLQDAENLLESQPLGSFLIRVSHSHVGYTLSYNVSAEPKAAAAISW

SEQ ID NO: 23566 - protein, 84 aa, Artificial Sequence
  Synthetic polypeptide
NPISTKIYKKLAGRGGWRLWSQLLGRLRQENGVNPGGGACRMLRTCWSHSHWDPFSSGSVTAMWATHSPTMSPQSPKQLLPFHG

SEQ ID NO: 23567 - protein, 191 aa, Artificial Sequence
  Synthetic polypeptide
NIQKISRAWWLAPVVPATWEAEAGEWRESGRRSLQDAENLLESQPLGSFLIRVSHSHVGYTLSYKAQSSCCHFMVKLLDDGTFMIPGEKVAHTSLDALVTFHQQKPIEPRRELLTQPCRQKDPANVDYEDLFLYSNAVAEEAACPVSAPEEASPKPVLCHQSKERKPSAEMNRITTKEATSSCPPKSPLGE

SEQ ID NO: 23568 - protein, 75 aa, Artificial Sequence
  Synthetic polypeptide
NIQKISRAWWLAPVVPATWEAEAGEWRESGRRSLQDAENLLESQPLGSFLIRVSHSHVGYTLSYKAQSSCCHFMV

SEQ ID NO: 23569 - protein, 166 aa, Artificial Sequence
  Synthetic polypeptide
ETGDSIWLVCLCFSHPSERTCHIEGLPKASPVSPIKGKEAVSRDEQNNHQGSHFLLPPKIPSWRDPPETLEEPQNAPRERPEGPAAAKKPPRHCELVVTLGCPEIHGDLRPWDRKRQPRSLRGSHLGGQRLHGSLCGHISQKPLTAPGTKRQKGPHQEGREVGQLH

SEQ ID NO: 23570 - protein, 265 aa, Artificial Sequence
  Synthetic polypeptide
SNTFWILLHITLFIHCSGLPKSVPQNPIYLWVYMLPGCLSSQTVSSERLETPSGLFAFASPTPLKGPAILKASPKPVLCHQSKERKPSAEMNRITTKEATSSCPPKSPLGETRQKLWRSLKMLPERGQRVRQQLKSHLATVNLSSLLDVRRSTVISGPGTGKGSQDHSGDPTSGDRGYTDPCVATSLKSPSQPQAPKDRKVPTRKAERSVSCIEVTPGDRSWHQMVVRALSSQESKPEHQGLAEPENDQLPEEYQQPPPFAPGYC

SEQ ID NO: 23571 - protein, 165 aa, Artificial Sequence
  Synthetic polypeptide
ETGDSIWLVCLCFSHPSERTCHIEGLPKASPVSPIKGKEAVSRDEQNNHQGSHFLLPPKIPSWRDPPETLEEPQNAPRERPEGPAAEKPPRHCELVVTLGCPEIHGDLRPWDRKRQPRSLRGSHLGGQRLHGSLCGHISQKPLTAPGTKRQKGPHQEGREVGQLH

SEQ ID NO: 23572 - protein, 264 aa, Artificial Sequence
  Synthetic polypeptide
SNTFWILLHITLFIHCSGLPKSVPQNPIYLWVYMLPGCLSSQTVSSERLETPSGLFAFASPTPLKGPAILKASPKPVLCHQSKERKPSAEMNRITTKEATSSCPPKSPLGETRQKLWRSLKMLPERGQRVRQQKSHLATVNLSSLLDVRRSTVISGPGTGKGSQDHSGDPTSGDRGYTDPCVATSLKSPSQPQAPKDRKVPTRKAERSVSCIEVTPGDRSWHQMVVRALSSQESKPEHQGLAEPENDQLPEEYQQPPPFAPGYC

SEQ ID NO: 23573 - protein, 94 aa, Artificial Sequence
  Synthetic polypeptide
ETGDSIWLVCLCFSHPSERTCHIEGLPKASPVSPIKGKEAVSRDEQNNHQGSHFLLPPKIPSWRDPPETLEEPQNAPRERPEGPAAAKKATSPL

SEQ ID NO: 23574 - protein, 213 aa, Artificial Sequence
  Synthetic polypeptide
SNTFWILLHITLFIHCSGLPKSVPQNPIYLWVYMLPGCLSSQTVSSERLETPSGLFAFASPTPLKGPAILKASPKPVLCHQSKERKPSAEMNRITTKEATSSCPPKSPLGETRQKLWRSLKMLPERGQRVRQQLKKPPRHCELVVTLGCPEIHGDLRPWDRKRQPRSLRGSHLGGQRLHGSLCGHISQKPLTAPGTKRQKGPHQEGREVGQLH

SEQ ID NO: 23575 - protein, 64 aa, Artificial Sequence
  Synthetic polypeptide
ETGDSIWLVCLCFSHPSERTCHIEGLPKASPVSPIKGKEAVSRDEQNNHQGSHFLLPPKIPSWR

SEQ ID NO: 23576 - protein, 111 aa, Artificial Sequence
  Synthetic polypeptide
SNTFWILLHITLFIHCSGLPKSVPQNPIYLWVYMLPGCLSSQTVSSERLETPSGLFAFASPTPLKGPAILKASPKPVLCHQSKERKPSAEMNRITTKEATSSCPPKSPLGE

SEQ ID NO: 23577 - protein, 37 aa, Artificial Sequence
  Synthetic polypeptide
GWARWLTPVIPALWESEARAVSGAPMPPSGETQAWAA

SEQ ID NO: 23578 - protein, 11 aa, Artificial Sequence
  Synthetic polypeptide
YQHFGRARQER

SEQ ID NO: 23579 - protein, 568 aa, Artificial Sequence
  Synthetic polypeptide
MGSVAHACNTSTLGERGKSGERGAYASFGRDAGVGGLTQAGFLSGELALNSPGPLSPSGMKGTSQYYPSYSGSSRRRAADGSLDTQPKKVRKVPPGLPSSVYPPSSGEDYGRDATAYPSAKTPSSTYPAPFYVADGSLHPSAELWSPPGQAGFGPMLGGGSSPLPLPPGSGPVGSSGSSSTFGGLHQHERMGYQLHGAEVNGGLPSASSFSSAPGATYGGVSSHTPPVSGADSLLGSRGTTAGSSGDALGKALASIYSPDHSSNNFSSSPSTPVGSPQGLAGTSQWPRAGAPGALSPSYDGGLHGLQSKIEDHLDEAIHVLRSHAVGTAGDMHTLLPGHGALASGFTGPMSLGGRHAGLVGGSHPEDGLAGSTSLMHNHAALPSQPGTLPDLSRPPDSYSGLGRAGATAAASEIKREEKEDEENTSAADHSEEEKKELKAPRARTSSTDEVLSLEEKDLRDRERRMANNARERVRVRDINEAFRELGRMCQMHLKSDKAQTKLLILQQAVQVILGLEQQVRERNLNPKAACLKRREEEKVSGVVGDPQMVLSAPHPGLSEAHNPAGHM

SEQ ID NO: 23580 - protein, 571 aa, Artificial Sequence
  Synthetic polypeptide
MGSVAHACNTSTLGERGKSGERGAYASFGRDAGVGGLTQAGFLSGELALNSPGPLSPSGMKGTSQYYPSYSGSSRRRAADGSLDTQPKKVRKVPPGLPSSVYPPSSGEDYGRDATAYPSAKTPSSTYPAPFYVADGSLHPSAELWSPPGQAGFGPMLGGGSSPLPLPPGSGPVGSSGSSSTFGGLHQHERMGYQLHGAEVNGGLPSASSFSSAPGATYGGVSSHTPPVSGADSLLGSRGTTAGSSGDALGKALASIYSPDHSSNNFSSSPSTPVGSPQGLAGTSQWPRAGAPGALSPSYDGGLHGLQSKIEDHLDEAIHVLRSHAVGTAGDMHTLLPGHGALASGFTGPMSLGGRHAGLVGGSHPEDGLAGSTSLMHNHAALPSQPGTLPDLSRPPDSYSGLGRAGATAAASEIKREEKEDEENTSAADHSEEEKKELKAPRARTSPDEDEDDLLPPEQKAEREKERRVANNARERLRVRDINEAFKELGRMCQLHLNSEKPQTKLLILHQAVSVILNLEQQVRERNLNPKAACLKRREEEKVSGVVGDPQMVLSAPHPGLSEAHNPAGHM

SEQ ID NO: 23581 - protein, 626 aa, Artificial Sequence
  Synthetic polypeptide
MGSVAHACNTSTLGERGKSGERGAYASFGRDAGVGGLTQAGFLSGELALNSPGPLSPSGMKGTSQYYPSYSGSSRRRAADGSLDTQPKKVRKVPPGLPSSVYPPSSGEDYGRDATAYPSAKTPSSTYPAPFYVADGSLHPSAELWSPPGQAGFGPMLGGGSSPLPLPPGSGPVGSSGSSSTFGGLHQHERMGYQLHGAEVNGGLPSASSFSSAPGATYGGVSSHTPPVSGADSLLGSRGTTAGSSGDALGKALASIYSPDHSSNNFSSSPSTPVGSPQGLAGTSQWPRAGAPGALSPSYDGGLHGLQSKIEDHLDEAIHVLRSHAVGTAGDMHTLLPGHGALASGFTGPMSLGGRHAGLVGGSHPEDGLAGSTSLMHNHAALPSQPGTLPDLSRPPDSYSGLGRAGATAAASEIKREEKEDEENTSAADHSEEEKKELKAPRARTRCQPTPRHSPPSPHQDAHVHRPHAHRTHTGRPSAGPTLFPQPHCLPLAPSRRPPHSPDEDEDDLLPPEQKAEREKERRVANNARERLRVRDINEAFKELGRMCQLHLNSEKPQTKLLILHQAVSVILNLEQQVRERNLNPKAACLKRREEEKVSGVVGDPQMVLSAPHPGLSEAHNPAGHM

SEQ ID NO: 23582 - protein, 101 aa, Artificial Sequence
  Synthetic polypeptide
MGSVAHACNTSTLGERGKSGERGAYASFGRDAGVGGLTQAGFLSGELALNSPGPLSPSGMKGTSQYYPSYSGSSRRRAADGSLDTQPKKVRKVPPGLPSSV

SEQ ID NO: 23583 - protein, 2 aa, Artificial Sequence
  Synthetic polypeptide
AR

SEQ ID NO: 23584 - protein, 7 aa, Artificial Sequence
  Synthetic polypeptide
GQVKVHL

SEQ ID NO: 23585 - protein, 7 aa, Artificial Sequence
  Synthetic polypeptide
PGKSTPV

SEQ ID NO: 23586 - protein, 118 aa, Artificial Sequence
  Synthetic polypeptide
PGKSTPVSQLGSADFPEAPDPFQPLGADSGDPFQSKKGFGDPFSGKDPFVPSSAAKPSKASASGFADFTSFGNEEQQLAWAKRESEKAEQERLARLRRQEQEDLELAIALSKADMPAA

SEQ ID NO: 23587 - protein, 72 aa, Artificial Sequence
  Synthetic polypeptide
PGKSTPVSQLGSADFPEAPDPFQPLGADSGDPFQSKKGFGDPFSGKDPFVPSSAAKPSKASASGFADFTSVS

SEQ ID NO: 23588 - protein, 214 aa, Artificial Sequence
  Synthetic polypeptide
KTWTECMKQLLENREINGSRQMGGGKTRIQSALEPPVSSSFFFLLCLQPGHEAAQKTYVYQWPWTLLLLAVSGFCNFAQNVIAFSILNLVSPLSYSVANATKRIMVITVSLIMLRNPVTSTNVLGMMTAILGVFLYNKTKYDANQQARKHLLPVTTADLSSKERHRSPLEKPHNGLLFPQHGDYQYGRNNILTDHFQYSRQSYPNSYSLNRYDV

SEQ ID NO: 23589 - protein, 55 aa, Artificial Sequence
  Synthetic polypeptide
VRHSSSSCVFSLDMRQLRRPTSTSGPGRSCSWLSAASVTLPRMLSPSASSTSLAP

SEQ ID NO: 23590 - protein, 23 aa, Artificial Sequence
  Synthetic polypeptide
GSSEDLRLPVALDAPAPGCQRLL

SEQ ID NO: 23591 - protein, 169 aa, Artificial Sequence
  Synthetic polypeptide
KTWTECMKQLLENREINGSRQMGGGKTRIQSALEPPVSSSFFFLLCLQPGHEAAQKTYVYQWPWTLLLLAVSGFCNFAQNVIAFSILNLVSPLSYSVANATKRIMVITVSLIMLRNPVTSTNVLGMMTAILGVFLYNKTKYDANQQARKHLLPVTTADLSSKERHRSPL

SEQ ID NO: 23592 - protein, 101 aa, Artificial Sequence
  Synthetic polypeptide
TWEAEVAVSRDHATAFHPGDRARLRLKKKKKEYTCHSSPSSAVSCWPPSPSCLLTCGDSSAPSPPRCASRFRTFSPKRSCEIHGSTISGCSTSWAATPSSL

SEQ ID NO: 23593 - protein, 45 aa, Artificial Sequence
  Synthetic polypeptide
AEIMPLHSILVTERDSVSKKKKKSILVTHPHHQRCPAGHRHRVVF

SEQ ID NO: 23594 - protein, 258 aa, Artificial Sequence
  Synthetic polypeptide
QSETPSQKKKKRVYLSLIPIISGVLLATVTELSFDMWGLVSALAATLCFSLQNIFSKKVLRDSRIHHLRLLNILGCHAVFFMIPTWVLVDLSAFLVSSDLTYVYQWPWTLLLLAVSGFCNFAQNVIAFSILNLVSPLSYSVANATKRIMVITVSLIMLRNPVTSTNVLGMMTAILGVFLYNKTKYDANQQARKHLLPVTTADLSSKERHRSPLEKPHNGLLFPQHGDYQYGRNNILTDHFQYSRQSYPNSYSLNRYDV

SEQ ID NO: 23595 - protein, 108 aa, Artificial Sequence
  Synthetic polypeptide
QSETPSQKKKKRVYLSLIPIISGVLLATVTELSFDMWGLVSALAATLCFSLQNIFSKKVLRDSRIHHLRLLNILGCHAVFFMIPTWVLVDLSAFLVSSDLGLPSENVL

SEQ ID NO: 23596 - protein, 38 aa, Artificial Sequence
  Synthetic polypeptide
GCAEWLTPVIPALWEAEAGGSLEVRSSKPAQPTWLFGS

SEQ ID NO: 23597 - protein, 29 aa, Artificial Sequence
  Synthetic polypeptide
SQHFGRLRRVDHLRSGVRNQPSQHGCSAL

SEQ ID NO: 23598 - protein, 16 aa, Artificial Sequence
  Synthetic polypeptide
GQEFETSPANMAVRLL

SEQ ID NO: 23599 - protein, 33 aa, Artificial Sequence
  Synthetic polypeptide
SQHFGRLRRVDHLRSGVRNQPSQHGCSALESQR

SEQ ID NO: 23600 - protein, 20 aa, Artificial Sequence
  Synthetic polypeptide
GQEFETSPANMAVRLLNPSD

SEQ ID NO: 23601 - protein, 37 aa, Artificial Sequence
  Synthetic polypeptide
SQEQSNCPGATPSRPGCAPCCIASGATSWLICSLGSH

SEQ ID NO: 23602 - protein, 38 aa, Artificial Sequence
  Synthetic polypeptide
PGLVAGACNPRSSRTVPAPPHRVLAVRHAALLRELHPG

SEQ ID NO: 23603 - protein, 313 aa, Artificial Sequence
  Synthetic polypeptide
RVRGLMPVIPALWEAEEGGSPEVRSLRPAWPTWRNPISTKNTKVSRAWWRVPVIPGAVELSRRHPIASWLCAMLHCFGSYILADLLLGEPLIDYFSNNSSILLASAVWYLIFFCPLDLFYKCVCFLPVKLIFVAMKEVVRVRKIAVGIHHAHHHYHHGWFVMIATGWVKGSGVALMSNFEQLLRGVWKPETNEILHMSFPTKASLYGAILFTLQQTRWLPVSKASLIFIFTLFMVSCKVFLTATHSHSSPFDALEGYICPVLFGSACGGDHHHDNHGGSHSGGGPGAQHSAMPAKSKEELSEGSRKKKAKKAD

SEQ ID NO: 23604 - protein, 143 aa, Artificial Sequence
  Synthetic polypeptide
RVRGLMPVIPALWEAEEGGSPEVRSLRPAWPTWRNPISTKNTKVSRAWWRVPVIPGAVELSRRHPIASWLCAMLHCFGSYILADLLLGEPLIDYFSNNSSILLASAVWYLIFFCPLDLFYKCVCFLPVKLIFVAMKEVEVAVS

SEQ ID NO: 23605 - protein, 18 aa, Artificial Sequence
  Synthetic polypeptide
DLPSHVKLCPRASGAKRF

SEQ ID NO: 23606 - protein, 120 aa, Artificial Sequence
  Synthetic polypeptide
NCAHGPPGPSASESVGPRLAGGGGAPLSQPDLGDRGRPGRFCIHPDGQACVQTPAPSAHKHLHRLSKSEACQREAGSLHPGPPRLSDDRVETLKAVLLRHHQHELPLVRPACVGRMVHFC

SEQ ID NO: 23607 - protein, 1832 aa, Artificial Sequence
  Synthetic polypeptide
GETPFCLALILSCLPPCKTCLSPFAMIVRPPQPRETVPTGLRGQALLKVWGRGWQAEEGPLFHNQTSVTVDGRGASVFIQTDKPVYRPQHRVLISIFTVSPNLRPVNEKLEAYILDPRGSRMIEWRHLKPFCCGITNMSFPLSDQPVLGEWFIFVEMQGHAYNKSFEVQKYVLPKFELLIDPPRYIQDLDACETGTVRARYTFGKPVAGALMINMTVNGVGYYSHEVGRPVLRTTKILGSRDFDICVRDMIPADVPEHFRGRVSIWAMVTSVDGSQQVAFDDSTPVQRQLVDIRYSKDTRKQFKPGLAYVGKVELSYPDGSPAEGVTVQIKAELTPKDNIYTSEVVSQRGLVGFEIPSIPTSAQHVWLETKVMALNGKPVGAQYLPSYLSLGSWYSPSQCYLQLQPPSHPLQVGEEAYFSVKSTCPCNFTLYYEVAARGNIVLSGQQPAHTTQQRSKRAAPALEKPIRLTHLSETEPPPAPEAEVDVCVTSLHLAVTPSMVPLGRLLVFYVRENGEGVADSLQFAVETFFENQVSVTYSANETQPGEVVDLRIRAARGSCVCVAAVDKSVYLLRSGFRLTPAQVFQELEDYDVSDSFGVSREDGPFWWAGLTAQRRRRSSVFPWPWGITKDSGFAFTETGLVVMTDRVSLNHRQDGGLYTDEAVPAFQPHTGSLVAVAPSRHPPRTEKRKRTFFPETWIWHCLNISDPSGEGTLSVKVPDSITSWVGEAVALSTSQGLGIAEPSLLKTFKPFFVDFMLPALIIRGEQVKIPLSVYNYMGTCAEVYMKLSVPKGIQFVGHPGKRHVTKKMCVAPGEAEPIWVVLSFSDLGLNNITAKALAYGDTNCCRDGRSSKHPEENHADRRVPIGVDHVRRSVMVEAEGVPRAYTYSAFFCPSERVHISTPNKYEFQYVQRPLRLTRFDVAVRAHNDARVALSSGPQDTAGMIEIVLGGHQNTRSWISTSKMGEPVASAHTAKILSWDEFRTFWISWRGGLIQVGHGPEPSNESVIVAWTLPRPPEVQFIGFSTGWGSMGEFRIWRKMEVDESYSEAFTLGVPHGAIPGSERATASIIGDVMGPTLNHLNNLLRLPFGCGEQNMIHFAPNVFVLKYLQKTQQLSPEVERETTDYLVQGYQRQLTYKRQDGSYSAFGERDASGSMWLTAFVLKSFAQARSFIFVDPRELAAAKSWIIQQQQADGSFLAVGRVLNKDIQGGIHGTVPLTAYVVVALLETGTASEEERGSTDKARHFLESAAPLAMDPYSCALTTYALTLLRSPAAPEALRKLRSLAIMRDGVTHWSLSNSWDVDKGTFLSFSDRVSQSVVSAEVEMTAYALLTYTLLGDVAAALPVVKWLSQQRNALGGFSSTQDTCVALQALAEYAILSYAGGINLTVSLASTNLDYQETFELHRTNQKVLQTAAIPSLPTGLFVSAKGDGCCLMQIDVTYNVPDPVAKPAFQLLVSLQEPEAQGRPPPMPASAAEGSRGDWPPADDDDPAADQHHQEYKVMLEVCTRWLHAGSSNMAVLEVPLLSGFRADIESLEQLLLDKHMGMKRYEVAGRRVLFYFDEIPSRCLTCVRFRALRECVVGRTSALPVSVYDYYEPAFEATRFYNVSTHSPLARELCAGPACNEVERAPARGPGWFPGESGPAVAPEEGAAIARCGCDHDCGAQGNPVCGSDGVVYASACRLREAACRQAAPLEPAPPSCCALEQRLPASSSSTYGDDLASVAPGPLQQDVKLNGAGLEVEDSDPEPEGEAEDRVTAGPRPPVSSGNLESSTQSASPFHRWGQTPAPQRHSGRVVGAHRPGLLSPVFVYSPAFQSGGEEGLWMSNTCTLR

SEQ ID NO: 23608 - protein, 450 aa, Artificial Sequence
  Synthetic polypeptide
GETPFCLALILSCLPPCKTCLSPFAMIVRPPQPRETVPTGLRGQALLKVWGRGWQAEEGPLFHNQTSVTVDGRGASVFIQTDKPVYRPQHRVLISIFTVSPNLRPVNEKLEAYILDPRGSRMIEWRHLKPFCCGITNMSFPLSDQPVLGEWFIFVEMQGHAYNKSFEVQKYVLPKFELLIDPPRYIQDLDACETGTVRARYTFGKPVAGALMINMTVNGVGYYSHEVGRPVLRTTKILGSRDFDICVRDMIPADVPEHFRGRVSIWAMVTSVDGSQQVAFDDSTPVQRQLVDIRYSKDTRKQFKPGLAYVGKVELSYPDGSPAEGVTVQIKAELTPKDNIYTSEVVSQRGLVGFEIPSIPTSAQHVWLEVFQELEDYDVSDSFGVSREDGPFWWAGLTAQRRRRSSVFPWPWGITKDSGFAFTVRRGNGTGGDDRPSEPEPPAGRWPLHR

SEQ ID NO: 23609 - protein, 43 aa, Artificial Sequence
  Synthetic polypeptide
TREAEVAVSQDCATSLQPRLLEMPRQPTTTTPAGLGNSSKSAT

SEQ ID NO: 23610 - protein, 50 aa, Artificial Sequence
  Synthetic polypeptide
AKIVPLHSSPGFWKCQDSPQQQLQPVWEIHPSQLPREWHRERSCRREISA

SEQ ID NO: 23611 - protein, 1774 aa, Artificial Sequence
  Synthetic polypeptide
SQLLRRLRHENCLNPGGRGCSEPRLCHFTPAQAFGNAKTAHNNNSSRFGKFIQVSYLESGIVRGAVVEKYLLEKSRLVSQEKDERNYHVFYYLLLGVSEEERQEFQLKQPEDYFYLNQHNLKIEDGEDLKHDFERLKQAMEMVGFLPATKKQIFAVLSAILYLGNVTYKKRATGREEGLEVGPPEVLDTLSQLLKVKREILVEVLTKRKTVTVNDKLILPYSLSEAITARDSMAKSLYSALFDWIVLRINHALLNKKDVEEAVSCLSIGVLDIFGFEDFERNSFEQFCINYANEQLQYYFNQHIFKLEQEEYQGEGITWHNIGYTDNVGCIHLISKKPTGLFYLLDEESNFPHATSQTLLAKFKQQHEDNKYFLGTPVMEPAFIIQHFAGKVKYQIKDFREKNMDYMRPDIVALLRGSDSSYVRELIGMDPVAVFRWAVLRAAIRAMAVLREAGRLRAERAEKAAGMSSPGAQSHPEELPRGASTPSEKLYRDLHNQMIKSIKGLPWQGEDPRSLLQSLSRLQKPRAFILKSKGIKQKQIIPKNLLDSKSLKLIISMTLHDRTTKSLLHLHKKKKPPSISAQFQTSLNKLLEALGKAEPFFIRCIRSNAEKKELCFDDELVLQQLRYTGMLETVRIRRSGYSAKYTFQDFTEQFQVLLPKDAQPCREVISTLLEKMKIDKRNYQIGKTKVFLKETERQALQETLHREVVRKILLLQSWFRMVLERRHFLQMKRAAVTIQACWRSYRVRRALERTQAAVYLQASWRGYWQRKLYRHQKQSIIRLQSLCRGHLQRKSFSQMISEKQKAEEKEREALEAARAGAEEGGQGQAAGGQQVAEQGPEPAEDGGHLASEPEVQPSDRSPLEHSSPEKEAPSPEKTLPPQKTVAAESHEKVPSSREKRESRRQRGLEHVKFQNKHIQSCKEESALREPSRRVTQEQGVSLLEDKKESREDETLLVVETEAENTSQKQPTEQPQAMAVGKVSEETEKTLPSGSPRPGQLERPTSLALDSRVSPPAPGSAPETPEDKSKPCGSPRVQEKPDSPGGSTQIQRYLDAERLASAVELWRGKKLVAAASPSAMLSQSLDLSDRHRATGAALTPTEERRTSFSTSDVSKLLPSLAKAQPAAETTDGERSAKKPAVQKKKPGDASSLPDAGLSPGSQVDSKSTFKRLFLHKTKDKKYSLEGAEELENAVSGHVVLEATTMKKGLEAPSGQQHRHAAGEKRTKEPGGKGKKNRNVKIGKITVSEKWRESVFRQITNANELKYLDEFLLNKINDLRSQKTPIESLFIEATEKFRSNIKTMYSVPNGKIHVGYKDLMENYQIVVSNLATERGQKDTNLVLNLFQSLLDEFTRGYTKNDFEPVKQSKAQKKKRKQERAVQEHNGHVFASYQVSIPQSCEQCLSYIWLMDKALLCSVCKMTCHKKCVHKIQSHCSYTYGRKGEPGVEPGHFGVCVDSLTSDKASVPIVLEKLLEHVEMHGLYTEGLYRKSGAANRTRELRQALQTDPAAVKLENFPIHAITGVLKQWLRELPEPLMTFAQYGDFLRAVELPEKQEQLAAIYAVLEHLPEANHNSLERLIFHLVKVALLEDVNRMSPGALAIIFAPCLLRCPDNSDPLTSMKDVLKITTCVEMLIKEQMRKYKVKMEEISQLEAAESIAFRRLSLLRQNAPWPLKLGFSSPYEGVLNKSPKTRDIQEEELEVLLEEEAAGGDEDREKEILIERIQSIKEEKEDITYRLPELDPRGSDEENLDSETSASTESLLEERAGRGASEGQY

SEQ ID NO: 23612 - protein, 1909 aa, Artificial Sequence
  Synthetic polypeptide
SQLLRRLRHENCLNPGGRGCSEPRLCHFTPAQAFGNAKTAHNNNSSRFGKFIQVSYLESGIVRGAVVEKYLLEKSRLVSQEKDERNYHVFYYLLLGVSEEERQEFQLKQPEDYFYLNQHNLKIEDGEDLKHDFERLKQAMEMVGFLPATKKQIFAVLSAILYLGNVTYKKRATGREEGLEVGPPEVLDTLSQLLKVKREILVEVLTKRKTVTVNDKLILPYSLSEAITARDSMAKSLYSALFDWIVLRINHALLNKKDVEEAVSCLSIGVLDIFGFEDFERNSFEQFCINYANEQLQYYFNQHIFKLEQEEYQGEGITWHNIGYTDNVGCIHLISKKPTGLFYLLDEESNFPHATSQTLLAKFKQQHEDNKYFLGTPVMEPAFIIQHFAGKVKYQIKDFREKNMDYMRPDIVALLRGSDSSYVRELIGMDPVAVFRWAVLRAAIRAMAVLREAGRLRAERAEKAAGMSSPGAQSHPEELPRGASTPSEKLYRDLHNQMIKSIKGLPWQGEDPRSLLQSLSRLQKPRAFILKSKGIKQKQIIPKNLLDSKSLKLIISMTLHDRTTKSLLHLHKKKKPPSISAQFQTSLNKLLEALGKAEPFFIRCIRSNAEKKELCFDDELVLQQLRYTGMLETVRIRRSGYSAKYTFQDFTEQFQVLLPKDAQPCREVISTLLEKMKIDKRNYQIGKTKVFLKETERQALQETLHREVVRKILLLQSWFRMVLERRHFLQMKRAAVTIQACWRSYRVRRALERTQAAVYLQASWRGYWQRKLYRHQKQSIIRLQSLCRGHLQRKSFSQMISEKQKAEEKEREALEAARAGAEEGGQGQAAGGQQVAEQGPEPAEDGGHLASEPEVQPSDRSPLEHSSPEKEAPSPEKTLPPQKTVAAESHEKVPSSREKRESRRQRGLEHVKFQNKHIQSCKEESALREPSRRVTQEQGVSLLEDKKESREDETLLVVETEAENTSQKQPTEQPQAMAVGKVSEETEKTLPSGSPRPGQLERPTSLALDSRVSPPAPGSAPETPEDKSKPCGSPRVQEKPDSPGGSTQIQRYLDAERLASAVELWRGKKLVAAASPSAMLSQSLDLSDRHRATGAALTPTEERRTSFSTSDVSKLLPSLAKAQPAAETTDGERSAKKPAVQKKKPGDASSLPDAGLSPGSQVDSKSTFKRLFLHKTKDKKYSLEGAEELENAVSGHVVLEATTMKKGLEAPSGQQHRHAAGEKRTKEPGGKGKKNRNVKIGKITVSEKWRESVFRQITNANELKYLDEFLLNKINDLRSQKTPIESLFIEATEKFRSNIKTMYSVPNGKIHVGYKDLMENYQIVVSNLATERGQKDTNLVLNLFQSLLDEFTRGYTKNDFEPVKQSKAQKKKRKQERAVQEHNGHVFASYQVSIPQSCEQCLSYIWLMDKALLCSVCKMTCHKKCVHKIQSHCSYTYGRKGEPGVEPGHFGVCVDSLTSDKASVPIVLEKLLEHVEMHGLYTEGLYRKSGAANRTRELRQALQTDPAAVKLENFPIHAITGVLKQWLRELPEPLMTFAQYGDFLRAVELPEKQEQLAAIYAVLEHLPEANHNSLERLIFHLVKVALLEDVNRMSPGALAIIFAPCLLRCPDNSDPLTSMKDVLKITTCVEMLIKEQMRKYKVKMEEISQLEAAESIAFRRLSLLRQNAPWPLKLGFSSPYEGVLNKSPKTRDIQEEELEVLLEEEAAGGDEDREKEILIERIQSIKEEKQDITYRLPELDPRGSDEENLDSETSASTESLLEERAGRGASEGPPAPALPCPGAPTPSPLPTVAAPPRRRPSSFVTVRVKTPRRTPIMPTANIKLPPGLPSHLPRWAPGAREAAAPVRRREPPARRPDQIHSVYITPGADLPVQGALEPLEEDGQPPGAKRRYSDPPTYCLPPASGQTNG

SEQ ID NO: 23613 - protein, 1823 aa, Artificial Sequence
  Synthetic polypeptide
SQLLRRLRHENCLNPGGRGCSEPRLCHFTPAQAFGNAKTAHNNNSSRFGKFIQVSYLESGIVRGAVVEKYLLEKSRLVSQEKDERNYHVFYYLLLGVSEEERQEFQLKQPEDYFYLNQHNLKIEDGEDLKHDFERLKQAMEMVGFLPATKKQIFAVLSAILYLGNVTYKKRATGREEGLEVGPPEVLDTLSQLLKVKREILVEVLTKRKTVTVNDKLILPYSLSEAITARDSMAKSLYSALFDWIVLRINHALLNKKDVEEAVSCLSIGVLDIFGFEDFERNSFEQFCINYANEQLQYYFNQHIFKLEQEEYQGEGITWHNIGYTDNVGCIHLISKKPTGLFYLLDEESNFPHATSQTLLAKFKQQHEDNKYFLGTPVMEPAFIIQHFAGKVKYQIKDFREKNMDYMRPDIVALLRGSDSSYVRELIGMDPVAVFRWAVLRAAIRAMAVLREAGRLRAERAEKAAGMSSPGAQSHPEELPRGASTPSEKLYRDLHNQMIKSIKGLPWQGEDPRSLLQSLSRLQKPRAFILKSKGIKQKQIIPKNLLDSKSLKLIISMTLHDRTTKSLLHLHKKKKPPSISAQFQTSLNKLLEALGKAEPFFIRCIRSNAEKKELCFDDELVLQQLRYTGMLETVRIRRSGYSAKYTFQDFTEQFQVLLPKDAQPCREVISTLLEKMKIDKRNYQIGKTKVFLKETERQALQETLHREVVRKILLLQSWFRMVLERRHFLQMKRAAVTIQACWRSYRVRRALERTQAAVYLQASWRGYWQRKLYRHQKQSIIRLQSLCRGHLQRKSFSQMISEKQKAEEKEREALEAARAGAEEGGQGQAAGGQQVAEQGPEPAEDGGHLASEPEVQPSDRSPLEHSSPEKEAPSPEKTLPPQKTVAAESHEKVPSSREKRESRRQRGLEHVKFQNKHIQSCKEESALREPSRRVTQEQGVSLLEDKKESREDETLLVVETEAENTSQKQPTEQPQAMAVGKVSEETEKTLPSGSPRPGQLERPTSLALDSRVSPPAPGSAPETPEDKSKPCGSPRVQEKPDSPGGSTQIQRYLDAERLASAVELWRGKKLVAAASPSAMLSQSLDLSDRHRATGAALTPTEERRTSFSTSDVSKLLPSLAKAQPAAETTDGERSAKKPAVQKKKPGDASSLPDAGLSPGSQVDSKSTFKRLFLHKTKDKKYSLEGAEELENAVSGHVVLEATTMKKGLEAPSGQQHRHAAGEKRTKEPGGKGKKNRNVKIGKITVSEKWRESVFRQITNANELKYLDEFLLNKINDLRSQKTPIESLFIEATEKFRSNIKTMYSVPNGKIHVGYKDLMENYQIVVSNLATERGQKDTNLVLNLFQSLLDEFTRGYTKNDFEPVKQSKAQKKKRKQERAVQEHNGHVFASYQVSIPQSCEQCLSYIWLMDKALLCSVCKMTCHKKCVHKIQSHCSYTYGRKGEPGVEPGHFGVCVDSLTSDKASVPIVLEKLLEHVEMHGLYTEGLYRKSGAANRTRELRQALQTDPAAVKLENFPIHAITGVLKQWLRELPEPLMTFAQYGDFLRAVELPEKQEQLAAIYAVLEHLPEANHNSLERLIFHLVKVALLEDVNRMSPGALAIIFAPCLLRCPDNSDPLTSMKDVLKITTCVEMLIKEQMRKYKVKMEEISQLEAAESIAFRRLSLLRQNANKSPKTRDIQEEELEVLLEEEAAGGDEDREKEILIERIQSIKEEKEDITYRLPELDPRGSDEENLDSETSASTESLLEERAGRGASEGPPAPALPCPGAPTPSPLPTVAAPPRRRPSSFVTVRVKTPRRTPIMPTANIKLPPGLPSHLPRWAPGA

SEQ ID NO: 23614 - protein, 12 aa, Artificial Sequence
  Synthetic polypeptide
FRRLRQVDHLRA

SEQ ID NO: 23615 - protein, 23 aa, Artificial Sequence
  Synthetic polypeptide
AQWLTPVISEAEAGGSPESLRWT

SEQ ID NO: 23616 - protein, 11 aa, Artificial Sequence
  Synthetic polypeptide
REGAWLLRQIF

SEQ ID NO: 23617 - protein, 111 aa, Artificial Sequence
  Synthetic polypeptide
VMKRRSLASEADFLKGLPVYNKSNFSRFHADSVCKASNRRPSVYLPTREYPSEQIIVTEKTNILLRYLHQQWDKKNAAKKRDQEQVELEGESSAPPRKVARTDSPDMHEDT

SEQ ID NO: 23618 - protein, 548 aa, Artificial Sequence
  Synthetic polypeptide
NGDKLFGKRLLQAGRYLVSHKAWMKTVPTENCDVLMTFPDTTDDHTLLWLLNHIRVGIPELIVQVRHHRHTRAYAFFVTATYESLLRGADELGLRKAVKAEFGGGTRGFSCEEDFIYENVESELRFFTSQERQSIIRFWLQNLRAKQGEALHNVRFLEDQPIIPELAARGIIQQVFPVHEQRILNRLMKSWVQAVCENQPLDDICDYFGVKIAMYFAWLGFYTSAMVYPAVFGSVLYTFTEADQTSRDVSCVVFALFNVIWSTLFLEEWKRRGAELAYKWGTLDSPGEAVEEPRPQFRGVRRISPITRAEEFYYPPWKRLLFQLLVSLPLCLACLVCVFLLMLGCFQLQELVLSVKGLPRLARFLPKVMLALLVSVSAEGYKKLAIWLNDMENYRLESAYEKHLIIKVVLFQFVNSYLSLFYIGFYLKDMERLKELLLVLSLSQSLERQLQAVLVPLAALRFRLLLLSLRGLLLAARAKVRAGGEPVGPRRGGQRGCAGGLARRAEGACAEGIWGRGRPASRCRRLGAHAAQCTDRARGGVETRWACP

SEQ ID NO: 23619 - protein, 40 aa, Artificial Sequence
  Synthetic polypeptide
PWARDLNALGLSFLTCEMGISFSESGSCRLVATWCPTRRG

SEQ ID NO: 23620 - protein, 13 aa, Artificial Sequence
  Synthetic polypeptide
TLWASVSSPVKWG

SEQ ID NO: 23621 - protein, 1199 aa, Artificial Sequence
  Synthetic polypeptide
NGDKLFGKRLLQAGRYLVSHKAWMKTVPTENCDVLMTFPDTTDDHTLLWLLNHIRVGIPELIVQVRHHRHTRAYAFFVTATYESLLRGADELGLRKAVKAEFGGGTRGFSCEEDFIYENVESELRFFTSQERQSIIRFWLQNLRAKQGEALHNVRFLEDQPIIPELAARGIIQQVFPVHEQRILNRLMKSWVQAVCENQPLDDICDYFGVKIAMYFAWLGFYTSAMVYPAVFGSVLYTFTEADQTSRDVSCVVFALFNVIWSTLFLEEWKRRGAELAYKWGTLDSPGEAVEEPRPQFRGVRRISPITRAEEFYYPPWKRLLFQLLVSLPLCLACLVCVFLLMLGCFQLQELVLSVKGLPRLARFLPKVMLALLVSVSAEGYKKLAIWLNDMENYRLESAYEKHLIIKVVLFQFVNSYLSLFYIGFYLKDMERLKEMLATLLITRQFLQNVREVLQPHLYRRLGRGELGLRAVWELARALLGLLSLRRPAPRRLEPQADEGGGGGSGGGGRRCLSGGCGAPEEEEEAALVERRRAGEGGEEGDGPPGGKEEDEDDEEEEDEEEEEDEEEGEEGGLLDCGLRLKKVSFAERGAGRRRPGPSPEALLEEGSPTMVEKGLEPGVFTLAEEDDEAEGAPGSPEREPPAILFRRAGGEGRDQGPDGGPDPEPGSNSDSTRRQRRQNRSSWIDPPEEEHSPQLTQAELESCMKKYEDTFQDYQEMFVQFGYVVLFSSAFPLAALCALVNNLIEIRSDAFKLCTGLQRPFGQRVESIGQWQKVMEAMGVLAIVVNCYLIGQCGQLQRLFPWLSPEAAIVSVVVLEHFALLLKYLIHVAIPDIPGWVAEEMAKLEYQRREAFKRHERQAQHRYQQQQRRRREEEERQRHAEHHARREHDSGGREEARAEGSGLDPATSSEKASAKAKGSTAGGHGPERPKRPGSLLAPNNVMKLKQIIPLQGKFLSSGATSSLAAAGAGATTRPPPAQSPTGSDTRLPAFLSFKFLKSPETRRDSERSHSPPKAFHAGKLFPFGGTRAEPGSNGAGGQARPDGTPSSGSSRVQRSGPVDEALAEELEAPRPEEEGSGTALAPVGAPALRTRRSRSPAPPPPMPLPRPPTPPAGCWQWDGPWGCGGEGAAPRQALAAAECPPCAMAGPPPAPQPLPGDASFYSLPPPPLPPTSDPLETPAPSPSPSPSPQAVCWPSGWH

SEQ ID NO: 23622 - protein, 122 aa, Artificial Sequence
  Synthetic polypeptide
CEQQKASVSKKKRMCVKLLPLGATDTAVFDVRLSGKTKTVPGYLRIGDMGGFAIWCKKAKAPRPVPKPRGLSRDMQGLSLDAASQPSKGGLLERTASRLGSRASTLRRNDSIYEASSLYGIS

SEQ ID NO: 23623 - protein, 32 aa, Artificial Sequence
  Synthetic polypeptide
SQHLGRRITRAQKIKTSVSNKRPLCPRRNACV

SEQ ID NO: 23624 - protein, 27 aa, Artificial Sequence
  Synthetic polypeptide
ATKGLCVQEETHVCEAVAPGSHGHGCV

SEQ ID NO: 23625 - protein, 182 aa, Artificial Sequence
  Synthetic polypeptide
CEQQKASVSKKKRMCVKLLPLGATDTAVFDVRLSGKTKTVPGYLRIGDMGGFAIWCKKAKAPRPVPKPRGLSRDMQGLSLDAASQPSKGGLLERTASRLGSRASTLRRNDSIYEASSLYGISAMDGVPFTLHPRFEGKSCSPLAFSAFGDLTIKSLADIEEEYNYGFVVEKTAAARLPPSVS

SEQ ID NO: 23626 - protein, 142 aa, Artificial Sequence
  Synthetic polypeptide
CEQQKASVSKKKRMCVKLLPLGATDTAVFDVRLSGKTKTVPGYLRIGKGGLLERTASRLGSRASTLRRNDSIYEASSLYGISAMDGVPFTLHPRFEGKSCSPLAFSAFGDLTIKSLADIEEEYNYGFVVEKTAAARLPPSVS

SEQ ID NO: 23627 - protein, 182 aa, Artificial Sequence
  Synthetic polypeptide
CEQQKASVSKKKRMCVKLLPLGATDTAVFDVRLSGKTKTVPGYLRIGDMGGFAIWCKKAKAPRPVPKPRGLSRDMQGLSLDAASQPSKGGLLERTASRLGSRASTLRRNDSIYEASSLYGISAMDGVPFTLHPRFEGKSCSPLAGLPSSRNTLKAARQTHIRCLESGGFGCSPRTSLALRLT

SEQ ID NO: 23628 - protein, 80 aa, Artificial Sequence
  Synthetic polypeptide
CEQQRTWAALPSGARRPRPRGQCPSPEVSAGTCRASLWMQPASQVRAASWSGQRQGWALGHPLCGGMTPSTRPPASMASQ

SEQ ID NO: 23629 - protein, 61 aa, Artificial Sequence
  Synthetic polypeptide
SQHLGRRITRAQKIKTSVSNKGHGRLCHLVQEGQGPEASAQAPRSQPGHAGPLSGCSQPAK

SEQ ID NO: 23630 - protein, 78 aa, Artificial Sequence
  Synthetic polypeptide
ATKDMGGFAIWCKKAKAPRPVPKPRGLSRDMQGLSLDAASQPSKGGLLERTASRLGSRASTLRRNDSIYEASSLYGIS

SEQ ID NO: 23631 - protein, 108 aa, Artificial Sequence
  Synthetic polypeptide
CEQQRTWAALPSGARRPRPRGQCPSPEVSAGTCRASLWMQPASQVRAASWSGQRQGWALGHPLCGGMTPSTRPPASMASQPWMGFPSHSTHDLRARAAAPWPSLLLGT

SEQ ID NO: 23632 - protein, 138 aa, Artificial Sequence
  Synthetic polypeptide
ATKDMGGFAIWCKKAKAPRPVPKPRGLSRDMQGLSLDAASQPSKGGLLERTASRLGSRASTLRRNDSIYEASSLYGISAMDGVPFTLHPRFEGKSCSPLAFSAFGDLTIKSLADIEEEYNYGFVVEKTAAARLPPSVS

SEQ ID NO: 23633 - protein, 110 aa, Artificial Sequence
  Synthetic polypeptide
CEQQRTWAALPSGARRPRPRGQCPSPEVSAGTCRASLWMQPASQVRAASWSGQRQGWALGHPLCGGMTPSTRPPASMASQPWMGFPSHSTHDLRARAAAPWQVCPAPGTL

SEQ ID NO: 23634 - protein, 138 aa, Artificial Sequence
  Synthetic polypeptide
ATKDMGGFAIWCKKAKAPRPVPKPRGLSRDMQGLSLDAASQPSKGGLLERTASRLGSRASTLRRNDSIYEASSLYGISAMDGVPFTLHPRFEGKSCSPLAGLPSSRNTLKAARQTHIRCLESGGFGCSPRTSLALRLT

SEQ ID NO: 23635 - protein, 107 aa, Artificial Sequence
  Synthetic polypeptide
ATKDMGGFAIWCKKAKAPRPVPKPRGLSRDMQGLSLDAASQPSKGGLLERTASRLGSRASTLRRNDSIYEASSLYGISAMDGVPFTLHPRFEGKSCSPLAFSAFGDL

SEQ ID NO: 23636 - protein, 121 aa, Artificial Sequence
  Synthetic polypeptide
CEQQRTWAALPSGARRPRPRGQCPSPEVSAGTCRASLWMQPASQVRAASWSGQRQGWALGHPLCGGMTPSTRPPASMASQPWMGFPSHSTHDLRARAAAPCITTASWWRRPRLPACPPASH

SEQ ID NO: 23637 - protein, 119 aa, Artificial Sequence
  Synthetic polypeptide
ATKDMGGFAIWCKKAKAPRPVPKPRGLSRDMQGLSLDAASQPSKGGLLERTASRLGSRASTLRRNDSIYEASSLYGISAMDGVPFTLHPRFEGKSCSPLYNYGFVVEKTAAARLPPSVS

SEQ ID NO: 23638 - protein, 546 aa, Artificial Sequence
  Synthetic polypeptide
LHHCTPAWATEVATDHNMDNTSTVLREWLVAVKSLYHSVEWRPAEEPRSYPDEEGPKHWSDSRYEHVMKLRQAALKSARDMWADYILFVDADNLILNPDTLSLLIAENKTVVAPMLDSRAAYSNFWCGMTSQGYYKRTPAYIPIRKRDRRGCFAVPMVHSTFLIDLRKAASRNLAFYPPHPDYTWSFDDIIVFAFSCKQAEVQMYVCNKEEYGFLPVPLRAHSTLQDEAESFMHVQLEVMVKHPPAEPSRFISAPTKTPDKMGFDEVFMINLRRRQDRRERMLRALQAQEIECRLVEAVDGKAMNTSQVEALGIQMLPGYRDPYHGRPLTKGELGCFLSHYNIWKEVVDRGLQKSLVFEDDLRFEIFFKRRLMNLMRDVEREGLDWDLIYVGRKRMQVEHPEKAVPRVRNLVEADYSYWTLAYVISLQGARKLLAAEPLSKMLPVDEFLPVMFDKHPVSEYKAHFSLRNLHAFSVEPLLIYPTHYTGDDGYVSDTETSVVWNNEHVKTDWDRAKSQKMREQQALSREAKNSDVLQSPLDSAARDEL

SEQ ID NO: 23639 - protein, 42 aa, Artificial Sequence
  Synthetic polypeptide
AQEFEAAVTYDCTTALQPGLQRWLRTTTWITRQLCCGSGWWP

SEQ ID NO: 23640 - protein, 21 aa, Artificial Sequence
  Synthetic polypeptide
PMIAPLHSSLGYRGGYGPQHG

SEQ ID NO: 23641 - protein, 38 aa, Artificial Sequence
  Synthetic polypeptide
GRARWLTLVKSSTLGGQGWLRTTTWITRQLCCGSGWWP

SEQ ID NO: 23642 - protein, 25 aa, Artificial Sequence
  Synthetic polypeptide
AGRGGSRLLSPALWEAKGGYGPQHG

SEQ ID NO: 23643 - protein, 543 aa, Artificial Sequence
  Synthetic polypeptide
VQHFGRPRVATDHNMDNTSTVLREWLVAVKSLYHSVEWRPAEEPRSYPDEEGPKHWSDSRYEHVMKLRQAALKSARDMWADYILFVDADNLILNPDTLSLLIAENKTVVAPMLDSRAAYSNFWCGMTSQGYYKRTPAYIPIRKRDRRGCFAVPMVHSTFLIDLRKAASRNLAFYPPHPDYTWSFDDIIVFAFSCKQAEVQMYVCNKEEYGFLPVPLRAHSTLQDEAESFMHVQLEVMVKHPPAEPSRFISAPTKTPDKMGFDEVFMINLRRRQDRRERMLRALQAQEIECRLVEAVDGKAMNTSQVEALGIQMLPGYRDPYHGRPLTKGELGCFLSHYNIWKEVVDRGLQKSLVFEDDLRFEIFFKRRLMNLMRDVEREGLDWDLIYVGRKRMQVEHPEKAVPRVRNLVEADYSYWTLAYVISLQGARKLLAAEPLSKMLPVDEFLPVMFDKHPVSEYKAHFSLRNLHAFSVEPLLIYPTHYTGDDGYVSDTETSVVWNNEHVKTDWDRAKSQKMREQQALSREAKNSDVLQSPLDSAARDEL

SEQ ID NO: 23644 - protein, 54 aa, Artificial Sequence
  Synthetic polypeptide
GRARWLTLVKSSTLGGQGGRITRSGDRDQPGQHGWLRTTTWITRQLCCGSGWWP

SEQ ID NO: 23645 - protein, 41 aa, Artificial Sequence
  Synthetic polypeptide
AGRGGSRLLSPALWEAKVGGSRGQEIETSLANMGGYGPQHG

SEQ ID NO: 23646 - protein, 559 aa, Artificial Sequence
  Synthetic polypeptide
VQHFGRPRWADHEVRRSRPAWPTWVATDHNMDNTSTVLREWLVAVKSLYHSVEWRPAEEPRSYPDEEGPKHWSDSRYEHVMKLRQAALKSARDMWADYILFVDADNLILNPDTLSLLIAENKTVVAPMLDSRAAYSNFWCGMTSQGYYKRTPAYIPIRKRDRRGCFAVPMVHSTFLIDLRKAASRNLAFYPPHPDYTWSFDDIIVFAFSCKQAEVQMYVCNKEEYGFLPVPLRAHSTLQDEAESFMHVQLEVMVKHPPAEPSRFISAPTKTPDKMGFDEVFMINLRRRQDRRERMLRALQAQEIECRLVEAVDGKAMNTSQVEALGIQMLPGYRDPYHGRPLTKGELGCFLSHYNIWKEVVDRGLQKSLVFEDDLRFEIFFKRRLMNLMRDVEREGLDWDLIYVGRKRMQVEHPEKAVPRVRNLVEADYSYWTLAYVISLQGARKLLAAEPLSKMLPVDEFLPVMFDKHPVSEYKAHFSLRNLHAFSVEPLLIYPTHYTGDDGYVSDTETSVVWNNEHVKTDWDRAKSQKMREQQALSREAKNSDVLQSPLDSAARDEL

SEQ ID NO: 23647 - protein, 19 aa, Artificial Sequence
  Synthetic polypeptide
GWMRWLIPVIPTFWEAKMV

SEQ ID NO: 23648 - protein, 568 aa, Artificial Sequence
  Synthetic polypeptide
SQHFGRPRWFEPFVIQWLDENEEVSRDFLHGALERDKKDGFQQTSEHALFSCSVVDVFSQLNQSFEIIKKLECPDPQIVGHYMRRFAKTISNVLLQYADIISKDFASYCSKEKEKVPCILMNNTQQLRVQLEKMFEAMGGKELDAEASDILKELQVKLNNVLDELSRVFATSFQPHIEECVKQMGDILSQVKGTGNVPASACSSVAQDADNVLQPIMDLLDSNLTLFAKICEKTVLKRVLKELWKLVMNTMEKTIVLPPLTDQTMIGNLLRKHGKGLEKGRVKLPSHSDGTQMIFNAAKELGQLSKLKDHMVREEAKSLTPKQCAVVELALDTIKQYFHAGGVGLKKTFLEKSPDLQSLRYALSLYTQATDLLIKTFVQTQSAQGLGVEDPVGEVSVHVELFTHPGTGEHKVTVKVVAANDLKWQTSGIFRPFIEVNIIGPQLSDKKRKFATKSKNNSWAPKYNESFQFTLSADAGPECYELQVCVKDYCFAREDRTVGLAVLQLRELAQRGSAACWLPLGRRIHMDDTGLTVLRILSQRSNDEVAKEFVKLKSDTRSAEEGGAAPAP

SEQ ID NO: 23649 - protein, 91 aa, Artificial Sequence
  Synthetic polypeptide
MDAVAHSCNPNILGGQDGLNPSSSSGWMRMRRCPGISCTVPWSETRRMGSSRPQSMPYSPAPWWMFSPNSTRALKSSRNSSVPTLRSWGTT

SEQ ID NO: 23650 - protein, 568 aa, Artificial Sequence
  Synthetic polypeptide
SQHFGRPRWFEPFVIQWLDENEEVSRDFLHGALERDKKDGFQQTSEHALFSCSVVDVFSQLNQSFEIIKKLECPDPQIVGHYMRRFAKTISNVLLQYADIISKDFASYCSKEKEKVPCILMNNTQQLRVQLEKMFEAMGGKELDAEASDILKELQVKLNNVLDELSRVFATSFQPHIEECVKQMGDILSQVKGTGNVPASACSSVAQDADNVLQPIMDLLDSNLTLFAKICEKTVLKRVLKELWKLVMNTMEKTIVLPPLTDQTLQGNLLRKHGKGLEKGRVKLPSHSDGTQMIFNAAKELGQLSKLKDHMVREEAKSLTPKQCAVVELALDTIKQYFHAGGVGLKKTFLEKSPDLQSLRYALSLYTQATDLLIKTFVQTQSAQGLGVEDPVGEVSVHVELFTHPGTGEHKVTVKVVAANDLKWQTSGIFRPFIEVNIIGPQLSDKKRKFATKSKNNSWAPKYNESFQFTLSADAGPECYELQVCVKDYCFAREDRTVGLAVLQLRELAQRGSAACWLPLGRRIHMDDTGLTVLRILSQRSNDEVAKEFVKLKSDTRSAEEGGAAPAP

SEQ ID NO: 23651 - protein, 587 aa, Artificial Sequence
  Synthetic polypeptide
SQHFGRPRWFEPFVIQWLDENEEVSRDFLHGALERDKKDGFQQTSEHALFSCSVVDVFSQLNQSFEIIKKLECPDPQIVGHYMRRFAKTISNVLLQYADIISKDFASYCSKEKEKVPCILMNNTQQLRVQLEKMFEAMGGKELDAEASDILKELQVKLNNVLDELSRVFATSFQPHIEECVKQMGDILSQVKGTGNVPASACSSVAQDADNVLQPIMDLLDSNLTLFAKICEKTVLKRVLKELWKLVMNTMEKTIVLPPLTDQTMIGNLLRKHGKGLEKGRVKLPSHSDGTQMIFNAAKELGQLSKLKDHMVREEAKSLTPKQCAVVELALDTIKQYFHAGGVGLKKTFLEKSPDLQSLRYALSLYTQATDLLIKTFVQTQSAQVHGGKGTRFTLSEDIYPEKGLGVEDPVGEVSVHVELFTHPGTGEHKVTVKVVAANDLKWQTSGIFRPFIEVNIIGPQLSDKKRKFATKSKNNSWAPKYNESFQFTLSADAGPECYELQVCVKDYCFAREDRTVGLAVLQLRELAQRGSAACWLPLGRRIHMDDTGLTVLRILSQRSNDEVAKEFVKLKSDTRSAEEGGAAPAP

SEQ ID NO: 23652 - protein, 562 aa, Artificial Sequence
  Synthetic polypeptide
SQHFGRPRWFEPFVIQWLDENEEVSRDFLHGALERDKKDGFQQTSEHALFSCSVVDVFSQLNQSFEIIKKLECPDPQIVGHYMRRFAKTISNVLLQYADIISKDFASYCSKEKEKVPCILMNNTQQLRVQLEKMFEAMGGKELDAEASDILKELQVKLNNVLDELSRVFATSFQPHIEECVKQMGDILSQVKGTGNVPASACSSVAQDADNVLQPIMDLLDSNLTLFAKICEKTVLKRVLKELWKLVMNTMEKTIVLPPLTDQTGTQMIFNAAKELGQLSKLKDHMVREEAKSLTPKQCAVVELALDTIKQYFHAGGVGLKKTFLEKSPDLQSLRYALSLYTQATDLLIKTFVQTQSAQVHGGKGTRFTLSEDIYPEKGLGVEDPVGEVSVHVELFTHPGTGEHKVTVKVVAANDLKWQTSGIFRPFIEVNIIGPQLSDKKRKFATKSKNNSWAPKYNESFQFTLSADAGPECYELQVCVKDYCFAREDRTVGLAVLQLRELAQRGSAACWLPLGRRIHMDDTGLTVLRILSQRSNDEVAKEFVKLKSDTRSAEEGGAAPAP

SEQ ID NO: 23653 - protein, 543 aa, Artificial Sequence
  Synthetic polypeptide
SQHFGRPRWFEPFVIQWLDENEEVSRDFLHGALERDKKDGFQQTSEHALFSCSVVDVFSQLNQSFEIIKKLECPDPQIVGHYMRRFAKTISNVLLQYADIISKDFASYCSKEKEKVPCILMNNTQQLRVQLEKMFEAMGGKELDAEASDILKELQVKLNNVLDELSRVFATSFQPHIEECVKQMGDILSQVKGTGNVPASACSSVAQDADNVLQPIMDLLDSNLTLFAKICEKTVLKRVLKELWKLVMNTMEKTIVLPPLTDQTGTQMIFNAAKELGQLSKLKDHMVREEAKSLTPKQCAVVELALDTIKQYFHAGGVGLKKTFLEKSPDLQSLRYALSLYTQATDLLIKTFVQTQSAQGLGVEDPVGEVSVHVELFTHPGTGEHKVTVKVVAANDLKWQTSGIFRPFIEVNIIGPQLSDKKRKFATKSKNNSWAPKYNESFQFTLSADAGPECYELQVCVKDYCFAREDRTVGLAVLQLRELAQRGSAACWLPLGRRIHMDDTGLTVLRILSQRSNDEVAKEFVKLKSDTRSAEEGGAAPAP

SEQ ID NO: 23654 - protein, 38 aa, Artificial Sequence
  Synthetic polypeptide
GRAQWLMPVIPALWEAEAGESLEARSSRPAWPTRKSAS

SEQ ID NO: 23655 - protein, 36 aa, Artificial Sequence
  Synthetic polypeptide
SQHFGRPRLENHLRPGVRDQPGQHERALRETPGPAA

SEQ ID NO: 23656 - protein, 785 aa, Artificial Sequence
  Synthetic polypeptide
GQEFETSLANTKERFVKLLDQLHNSLRIDLSMYRNNFPASSPERLQDLKSTVDLLTSITFFRMKVQELQSPPRASQVVKDCVKACLNSTYEYIFNNCHELYSREYQTDPAKKGEVLPEEQGPSIKNLDFWSKLITLIVSIIEEDKNSYTPCLNQFPQELNVGKISAEVMWNLFAQDMKYAMEEHDKHRLCKSADYMNLHFKVKWLYNEYVTELPAFKDRVPEYPAWFEPFVIQWLDENEEVSRDFLHGALERDKKDGFQQTSEHALFSCSVVDVFSQLNQSFEIIKKLECPDPQIVGHYMRRFAKTISNVLLQYADIISKDFASYCSKEKEKVPCILMNNTQQLRVQLEKMFEAMGGKELDAEASDILKELQVKLNNVLDELSRVFATSFQPHIEECVKQMGDILSQVKGTGNVPASACSSVAQDADNVLQPIMDLLDSNLTLFAKICEKTVLKRVLKELWKLVMNTMEKTIVLPPLTDQTMIGNLLRKHGKGLEKGRVKLPSHSDGTQMIFNAAKELGQLSKLKDHMVREEAKSLTPKQCAVVELALDTIKQYFHAGGVGLKKTFLEKSPDLQSLRYALSLYTQATDLLIKTFVQTQSAQGLGVEDPVGEVSVHVELFTHPGTGEHKVTVKVVAANDLKWQTSGIFRPFIEVNIIGPQLSDKKRKFATKSKNNSWAPKYNESFQFTLSADAGPECYELQVCVKDYCFAREDRTVGLAVLQLRELAQRGSAACWLPLGRRIHMDDTGLTVLRILSQRSNDEVAKEFVKLKSDTRSAEEGGAAPAP

SEQ ID NO: 23657 - protein, 785 aa, Artificial Sequence
  Synthetic polypeptide
GQEFETSLANTKERFVKLLDQLHNSLRIDLSMYRNNFPASSPERLQDLKSTVDLLTSITFFRMKVQELQSPPRASQVVKDCVKACLNSTYEYIFNNCHELYSREYQTDPAKKGEVLPEEQGPSIKNLDFWSKLITLIVSIIEEDKNSYTPCLNQFPQELNVGKISAEVMWNLFAQDMKYAMEEHDKHRLCKSADYMNLHFKVKWLYNEYVTELPAFKDRVPEYPAWFEPFVIQWLDENEEVSRDFLHGALERDKKDGFQQTSEHALFSCSVVDVFSQLNQSFEIIKKLECPDPQIVGHYMRRFAKTISNVLLQYADIISKDFASYCSKEKEKVPCILMNNTQQLRVQLEKMFEAMGGKELDAEASDILKELQVKLNNVLDELSRVFATSFQPHIEECVKQMGDILSQVKGTGNVPASACSSVAQDADNVLQPIMDLLDSNLTLFAKICEKTVLKRVLKELWKLVMNTMEKTIVLPPLTDQTLQGNLLRKHGKGLEKGRVKLPSHSDGTQMIFNAAKELGQLSKLKDHMVREEAKSLTPKQCAVVELALDTIKQYFHAGGVGLKKTFLEKSPDLQSLRYALSLYTQATDLLIKTFVQTQSAQGLGVEDPVGEVSVHVELFTHPGTGEHKVTVKVVAANDLKWQTSGIFRPFIEVNIIGPQLSDKKRKFATKSKNNSWAPKYNESFQFTLSADAGPECYELQVCVKDYCFAREDRTVGLAVLQLRELAQRGSAACWLPLGRRIHMDDTGLTVLRILSQRSNDEVAKEFVKLKSDTRSAEEGGAAPAP

SEQ ID NO: 23658 - protein, 804 aa, Artificial Sequence
  Synthetic polypeptide
GQEFETSLANTKERFVKLLDQLHNSLRIDLSMYRNNFPASSPERLQDLKSTVDLLTSITFFRMKVQELQSPPRASQVVKDCVKACLNSTYEYIFNNCHELYSREYQTDPAKKGEVLPEEQGPSIKNLDFWSKLITLIVSIIEEDKNSYTPCLNQFPQELNVGKISAEVMWNLFAQDMKYAMEEHDKHRLCKSADYMNLHFKVKWLYNEYVTELPAFKDRVPEYPAWFEPFVIQWLDENEEVSRDFLHGALERDKKDGFQQTSEHALFSCSVVDVFSQLNQSFEIIKKLECPDPQIVGHYMRRFAKTISNVLLQYADIISKDFASYCSKEKEKVPCILMNNTQQLRVQLEKMFEAMGGKELDAEASDILKELQVKLNNVLDELSRVFATSFQPHIEECVKQMGDILSQVKGTGNVPASACSSVAQDADNVLQPIMDLLDSNLTLFAKICEKTVLKRVLKELWKLVMNTMEKTIVLPPLTDQTMIGNLLRKHGKGLEKGRVKLPSHSDGTQMIFNAAKELGQLSKLKDHMVREEAKSLTPKQCAVVELALDTIKQYFHAGGVGLKKTFLEKSPDLQSLRYALSLYTQATDLLIKTFVQTQSAQVHGGKGTRFTLSEDIYPEKGLGVEDPVGEVSVHVELFTHPGTGEHKVTVKVVAANDLKWQTSGIFRPFIEVNIIGPQLSDKKRKFATKSKNNSWAPKYNESFQFTLSADAGPECYELQVCVKDYCFAREDRTVGLAVLQLRELAQRGSAACWLPLGRRIHMDDTGLTVLRILSQRSNDEVAKEFVKLKSDTRSAEEGGAAPAP

SEQ ID NO: 23659 - protein, 779 aa, Artificial Sequence
  Synthetic polypeptide
GQEFETSLANTKERFVKLLDQLHNSLRIDLSMYRNNFPASSPERLQDLKSTVDLLTSITFFRMKVQELQSPPRASQVVKDCVKACLNSTYEYIFNNCHELYSREYQTDPAKKGEVLPEEQGPSIKNLDFWSKLITLIVSIIEEDKNSYTPCLNQFPQELNVGKISAEVMWNLFAQDMKYAMEEHDKHRLCKSADYMNLHFKVKWLYNEYVTELPAFKDRVPEYPAWFEPFVIQWLDENEEVSRDFLHGALERDKKDGFQQTSEHALFSCSVVDVFSQLNQSFEIIKKLECPDPQIVGHYMRRFAKTISNVLLQYADIISKDFASYCSKEKEKVPCILMNNTQQLRVQLEKMFEAMGGKELDAEASDILKELQVKLNNVLDELSRVFATSFQPHIEECVKQMGDILSQVKGTGNVPASACSSVAQDADNVLQPIMDLLDSNLTLFAKICEKTVLKRVLKELWKLVMNTMEKTIVLPPLTDQTGTQMIFNAAKELGQLSKLKDHMVREEAKSLTPKQCAVVELALDTIKQYFHAGGVGLKKTFLEKSPDLQSLRYALSLYTQATDLLIKTFVQTQSAQVHGGKGTRFTLSEDIYPEKGLGVEDPVGEVSVHVELFTHPGTGEHKVTVKVVAANDLKWQTSGIFRPFIEVNIIGPQLSDKKRKFATKSKNNSWAPKYNESFQFTLSADAGPECYELQVCVKDYCFAREDRTVGLAVLQLRELAQRGSAACWLPLGRRIHMDDTGLTVLRILSQRSNDEVAKEFVKLKSDTRSAEEGGAAPAP

SEQ ID NO: 23660 - protein, 760 aa, Artificial Sequence
  Synthetic polypeptide
GQEFETSLANTKERFVKLLDQLHNSLRIDLSMYRNNFPASSPERLQDLKSTVDLLTSITFFRMKVQELQSPPRASQVVKDCVKACLNSTYEYIFNNCHELYSREYQTDPAKKGEVLPEEQGPSIKNLDFWSKLITLIVSIIEEDKNSYTPCLNQFPQELNVGKISAEVMWNLFAQDMKYAMEEHDKHRLCKSADYMNLHFKVKWLYNEYVTELPAFKDRVPEYPAWFEPFVIQWLDENEEVSRDFLHGALERDKKDGFQQTSEHALFSCSVVDVFSQLNQSFEIIKKLECPDPQIVGHYMRRFAKTISNVLLQYADIISKDFASYCSKEKEKVPCILMNNTQQLRVQLEKMFEAMGGKELDAEASDILKELQVKLNNVLDELSRVFATSFQPHIEECVKQMGDILSQVKGTGNVPASACSSVAQDADNVLQPIMDLLDSNLTLFAKICEKTVLKRVLKELWKLVMNTMEKTIVLPPLTDQTGTQMIFNAAKELGQLSKLKDHMVREEAKSLTPKQCAVVELALDTIKQYFHAGGVGLKKTFLEKSPDLQSLRYALSLYTQATDLLIKTFVQTQSAQGLGVEDPVGEVSVHVELFTHPGTGEHKVTVKVVAANDLKWQTSGIFRPFIEVNIIGPQLSDKKRKFATKSKNNSWAPKYNESFQFTLSADAGPECYELQVCVKDYCFAREDRTVGLAVLQLRELAQRGSAACWLPLGRRIHMDDTGLTVLRILSQRSNDEVAKEFVKLKSDTRSAEEGGAAPAP

SEQ ID NO: 23661 - protein, 176 aa, Artificial Sequence
  Synthetic polypeptide
FCLEWALREYKVVGRCLPTPKCHTPPLYRMRIFAPNHVVAKSRFWYFVSQLKKMKKSSGEIVYCGQVFEKSPLRVKNFGIWLRYDSRSGTHNMYREYRDLTTAGAVTQCYRDMGARHRARAHSIQIMKVEEIAASKCRRPAVKQFHDSKIKFPLPHRVLRRQHKPRFTTKRPNTFF

SEQ ID NO: 23662 - protein, 30 aa, Artificial Sequence
  Synthetic polypeptide
RGNSAGIPGLGRDLRSCPSSAWNGLYESTR

SEQ ID NO: 23663 - protein, 39 aa, Artificial Sequence
  Synthetic polypeptide
GLVLVLPGMGSTRVQGSGSLPAHPQMPHAAPLPHANLCA

SEQ ID NO: 23664 - protein, 154 aa, Artificial Sequence
  Synthetic polypeptide
FCLEWALREYKVVGRCLPTPKCHTPPLYRMRIFAPNHVVAKSRFWYFVSQLKKMKKSSGEIVYCGQVFEKSPLRVKNFGIWLRYDSRSGTHNMYREYRDLTTAGAVTQCYRDMGARHRARAHSIQIMKVEEIAASKCRRPHKPRFTTKRPNTFF

SEQ ID NO: 23665 - protein, 137 aa, Artificial Sequence
  Synthetic polypeptide
FCLEWALREYKLKKMKKSSGEIVYCGQVFEKSPLRVKNFGIWLRYDSRSGTHNMYREYRDLTTAGAVTQCYRDMGARHRARAHSIQIMKVEEIAASKCRRPAVKQFHDSKIKFPLPHRVLRRQHKPRFTTKRPNTFF

SEQ ID NO: 23666 - protein, 30 aa, Artificial Sequence
  Synthetic polypeptide
RGNSAGIPGLGRDLRSCPSSAWNGLYESTS

SEQ ID NO: 23667 - protein, 33 aa, Artificial Sequence
  Synthetic polypeptide
GLVLVLPGMGSTRVQVKEDEEVFRGDCLLWAGV

SEQ ID NO: 23668 - protein, 76 aa, Artificial Sequence
  Synthetic polypeptide
SLRGVTAALASTSPNRLGFLGGQLQRLQNTPLPLQSQAHSRRSINVRWLPAEPVSAVFRTRHIRMQTQARPRALGT

SEQ ID NO: 23669 - protein, 9 aa, Artificial Sequence
  Synthetic polypeptide
MFVGCLQNQ

SEQ ID NO: 23670 - protein, 705 aa, Artificial Sequence
  Synthetic polypeptide
MGQAPPSLAVSPLSQLITPWGHRCSGVYLPQQVGVSRRAAPEVAEHSAASPEPGTQQALHKCSLAACRTSECCFQDPPYPDADSGSASGPRDLRCYRISSDRYECSWQYEGPTAGVSHFLRCCLSSGRCCYFAAGSATRLQFSDQAGVSVLYTVTLWVESWARNQTEKSPEVTLQLYNSVKYEPPLGDIKVSKLAGQLRMEWETPDNQVGAEVQFRHRTPSSPWKLGDCGPQDDDTESCLCPLEMNVAQEFQLRRRQLGSQGSSWSKWSSPVCVPPENPPQPQVRFSVEQLGQDGRRRLTLKEQPTQLELPEGCQGLAPGTEVTYRLQLHMLSCPCKAKATRTLHLGKMPYLSGAAYNVAVISSNQFGPGLNQTWHIPADTHTEPVALNISVGTNGTTMYWPARAQSMTYCIEWQPVGQDGGLATCSLTAPQDPDPAGMATYSWSRESGAMGQEKCYYITIFASAHPEKLTLWSTVLSTYHFGGNASAAGTPHHVSVKNHSLDSVSVDWAPSLLSTCPGVLKEYVVRCRDEDSKQVSEHPVQPTETQVTLSGLRAGVAYTVQVRADTAWLRGVWSQPQRFSIEVQVSDWLIFFASLGSFLSILLVGVLGYLGLNRAARHLCPPLPTPCASSAIEFPGGKETWQWINPVDFQEEASLQEALVVEMSWDKGERTEPLEKTELPEGAPELALDTELSLEDGDRCKAKM

SEQ ID NO: 23671 - protein, 424 aa, Artificial Sequence
  Synthetic polypeptide
MGQAPPSLAVSPLSQLITPWGHRCSGVYLPQQVGVSRRAAPEVAEHSAASPEPGTQQALHKCSLAACRTSECCFQDPPYPDADSGSASGPRDLRCYRISSDRYECSWQYEGPTAGVSHFLRCCLSSGRCCYFAAGSATRLQFSDQAGVSVLYTVTLWVESWARNQTEKSPEVTLQLYNSVKYEPPLGDIKVSKLAGQLRMEWETPDNQVGAEVQFRHRTPSSPWKLGDCGPQDDDTESCLCPLEMNVAQEFQLRRRQLGSQGSSWSKWSSPVCVPPENPPQPQVRFSVEQLGQDGRRRLTLKEQPTQLELPEGCQGLAPGTEVTYRLQLHMLSCPCKAKATRTLHLGKMPYLSGAAYNVAVISSNQFGPGLNQTWHIPADTHTDGMISAHCNLRLPDSRDSPASASRVAGITGICHHTRLILYF

SEQ ID NO: 23672 - protein, 80 aa, Artificial Sequence
  Synthetic polypeptide
SLRGVTAALASTSPNRLGFLGGQLQRLQNTPLPLQSQAHSRRSINVRWLPAEPVSAVFRTRHIRMQTQDLFQARPRALGT

SEQ ID NO: 23673 - protein, 161 aa, Artificial Sequence
  Synthetic polypeptide
MGQAPPSLAVSPLSQLITPWGHRCSGVYLPQQVGVSRRAAPEVAEHSAASPEPGTQQALHKCSLAACRTSECCFQDPPYPDADSGSLPGSASGPRDLRCYRISSDRYECSWQYEGPTAGVSHFLRCCLSSGRCCYFAAGSATRLQFSDQAGVSVLYTVTLW

SEQ ID NO: 23674 - protein, 110 aa, Artificial Sequence
  Synthetic polypeptide
MGQAPPSLAVSPLSQLITPWGHRCSGVYLPQQVGVSRRAAPEVAEHSAASPEPGTQQALHKCSLAACRTSECCFQDPPYPDADSGSASGPRDLRCYRISSDRYECSWQYE

SEQ ID NO: 23675 - protein, 94 aa, Artificial Sequence
  Synthetic polypeptide
MGQAPPSLAVSPLSQLITPWGHRCSGVYLPQQVGVSRRAAPEVAEHSAASPEPGTQQALHKCSLAACRTSECCFQDPPYPDADSGSASGPRDLR

SEQ ID NO: 23676 - protein, 932 aa, Artificial Sequence
  Synthetic polypeptide
ARAVYLVRHRDTRQRFAIKKINKQNLILRNQIQQVFVERDILTFAENPFVVSMFCSFETRRHLCMVMEYVEGGDCATLLKNMGPLPVDMARLYFAETVLALEYLHNYGIVHRDLKPDNLLITSLGHIKLTDFGLSKIGLMSMATNLYEGHIEKDAREFIDKQVCGTPEYIAPEVIFRQGYGKPVDWWAMGVVLYEFLVGCVPFFGDTPEELFGQVVSDEIMWPEGDEALPADAQDLITRLLRQSPLDRLGTGGTHEVKQHPFFLALDWAGLLRHKAEFVPQLEAEDDTSYFDTRSERYRHLGSEDDETNDEESSTEIPQFSSCSHRFSKVYSSSEFLAVQPTPTFAERSFSEDREEGWERSEVDYGRRLSADIRLRSWTSSGSSCQSSSSQPERGPSPSLLNTISLDTMPKFAFSSEDEGVGPGPAGPKRPVFILGEPDPPPAATPVMPKPSSLSADTAALSHARLRSNSIGARHSTPRPLDAGRGRRLGGPRDPAPEKSRASSSGGSGGGSGGRVPKSASVSALSLIITADDGSGGPLMSPLSPRSLSSNPSSRDSSPSRDPSPVCGSLRPPIVIHSSGKKYGFSLRAIRVYMGDSDVYTVHHVVWSVEDGSPAQEAGLRAGDLITHINGESVLGLVHMDVVELLLKSGNKISLRTTALENTSIKVGPARKNVAKGRMARRSKRSRRRETQDRRKSLFKKISKQTSVLHTSRSFSSGLHHSLSSSESLPGSPTHSLSPSPTTPCRSPAPDVPADTTASPPSASPSSSSPASPAAAGHTRPSSLHGLAAKLGPPRPKTGRRKSTSSIPPSPLACPPISAPPPRSPSPLPGHPPAPARSPRLRRGQSADKLGTGERLDGEAGRRTRGPEAELVVMRRLHLSERRDSFKKQEAVQEVSFDEPQEEATGLPTSVPQIAVEGEEAVPVALGPTGRD

SEQ ID NO: 23677 - protein, 25 aa, Artificial Sequence
  Synthetic polypeptide
PGPSTWCGTVTHGSALPSRRSTNRT

SEQ ID NO: 23678 - protein, 9 aa, Artificial Sequence
  Synthetic polypeptide
QGRLPGAAP

SEQ ID NO: 23679 - protein, 117 aa, Artificial Sequence
  Synthetic polypeptide
VYEFKASLANMGWVTTPTTLSCPSPPRRGRMAPWAWGRSRARMCWSWSWSTRPSRPCAVRWSWSSGATGSCWRRPVSTAPPRPPPWRPAAPTPAPLWARTRMPSHWPSTTAPAATAY

SEQ ID NO: 23680 - protein, 41 aa, Artificial Sequence
  Synthetic polypeptide
PGTAAWAIVPAILEAEVGGLLESTSSKPAWPIWAGLRPLQP

SEQ ID NO: 23681 - protein, 1193 aa, Artificial Sequence
  Synthetic polypeptide
SQLSWRLRWEDCLSLRVQSQPGQYGLGYDPYNPELPKPPAQRENGTLGLGEEPRPDVLELELVNQAIEAVRSEVELEQRRYRELLETTREHRSAEAPALAPRGPNASPTVGPDEDAFPLAFDYSPGSHGLLSPDAGYQPTPLAAPAEPGSKYSLASLDRGQGRGGGGGGALEYVPKAVSQPRRHSRPVPSGKYVVDNSRPPTDLEYDPLSNYSARHLSRASSRDERAAKRPRGSRGSEPYTPAPKKLCDPFGSCDARFSDSEDEAATVPGNEPTTASTPKARADPEIKATGQPPSKEGLEAEGGGLRETKETAVQCDVGDLQPPPAKPASPAQVQSSQDGGCPKEGKPKKKKTGAPPAPSCKDGAQGKDKTKDKGRGRPVEKPRADKKGPQASSPRRKAERPEGTKKKPSSATPVATSGKGRPDRPARRPSPTSGDSRPAAGRGPPRPLQLPDRKSTKAPSGKLVERKARSLDEGASQDAPKLKKRALSHADLFGDESEDEAAGPGVPSVWPSALPSLSSDSDSDSDSSLGFPEAQGPPKRLKASPPPSPAPSSSSSSSSSTSSAGADVDYSALEKEVDFDSDPMEECLRIFNESTSVKTEDRGRLARQPPKEEKSEEKGLSGLTTLFPGQKRRISHLSKQGQEVEPPRRGPAVPPARPPTAQEVCYLRAQQAQRASASLLQAPARLAEKSPSVHISAPGEKRRIAHIPNPRLAAAPTGAKRTLAASGSQSSNGPEPGGQQLKTRTLSGMASKTTTTIIPKRIAHSPSLQSLKKPIIPKEFGGKVPTVIRQRYLNLFIEECLKFCTSNQEAIEKALNEEKVAYDRSPSKNIYLNVAVNTLKKLRGLAPSAVPGLSKTSGRRVVSHEVVLGGRLAAKTSFSLSRPSSPRVEDLKGAALYSRLREYLLTQDQLKENGYPFPHPERPGGAIIFTAEEKRPKDSSCRTCCRCGTEYLVSSSGRCIRDEECYYHWGRLRRNRVAGGWETQYMCCSAAAGSVGCQVAKQHVQDGRKERLEGFVKTFEKELSGDTHPGIYALDCEMSYTTYGLELTRVTVVDTDVHVVYDTFVKPDNEIVDYNTRFSGVTEADLADTSVTLRDVQAVLLSMFSADTILIGHSLESDLLALKVIHSTVVDTSVLFPHRLGLPYKRSLRNLMADYLRQIIQDNVDGHSSSEDAGACMHLVIWKVREDAKTKR

SEQ ID NO: 23682 - protein, 101 aa, Artificial Sequence
  Synthetic polypeptide
QDAPGVAGALVAAAWGRPVSGRGEPRKFPGTLRVALRRLQIPRVAETLRGPANQAAGQPELGRFEHRPRPGPCSPDTHARSAAGIRRPPAPAYLSGRPSRG

SEQ ID NO: 23683 - protein, 126 aa, Artificial Sequence
  Synthetic polypeptide
SQHFGRPRQADHLRSGVRDQTGQHDRMLLVLLVLSWLPHGGALSLAEASRASFPGPSELHSEDSRFRELRKRYEDLLTRLRANQSWEDSNTDLVPAPAVRILTPEVRLGSGGHLHLRISRAALPEG

SEQ ID NO: 23684 - protein, 63 aa, Artificial Sequence
  Synthetic polypeptide
DQEFETRLANMTGCSWCCWCSRGCRMGAPCLWPRRAAQVSRDPQSCTPKTPDSESCGNATRTC

SEQ ID NO: 23685 - protein, 285 aa, Artificial Sequence
  Synthetic polypeptide
QDAPGVAGALVAAAWGRPVSGRGEPRKFPGTLRVALRRLQIPRVAETLRGPANQAAGQPELGRFEHRPRPGPCSPDTHARSAAGIRRPPAPAYLSGRPSRGAPRGLPPSPGSVPAVPDGVKVVGRDTTAAASAQPCKTPGARAAPATVAAAVAVGPTAGRIFVRTAPAGVALAAASRQGAPQSACAQRGPLSARARALLPSAHGPRVAGRPGLGRLGAVATGGASDHVHRRVPEPVPGGKHARADQDEPAPPEARHGASALLRARQLQSHGAHSKDRHRGVAPDL

SEQ ID NO: 23686 - protein, 321 aa, Artificial Sequence
  Synthetic polypeptide
SQHFGRPRQADHLRSGVRDQTGQHDRMLLVLLVLSWLPHGGALSLAEASRASFPGPSELHSEDSRFRELRKRYEDLLTRLRANQSWEDSNTDLVPAPAVRILTPEVRLGSGGHLHLRISRAALPEGLPEASRLHRALFRLSPTASRSWDVTRPLRRQLSLARPQAPALHLRLSPPPSQSDQLLAESSSARPQLELHLRPQAARGRRRARARNGDHCPLGPGRCCRLHTVRASLEDLGWADWVLSPREVQVTMCIGACPSQFRAANMHAQIKTSLHRLKPDTVPAPCCVPASYNPMVLIQKTDTGVSLQTYDDLLAKDCHCI

SEQ ID NO: 23687 - protein, 20 aa, Artificial Sequence
  Synthetic polypeptide
FDCPPPPSDSELQEVGAVRL

SEQ ID NO: 23688 - protein, 206 aa, Artificial Sequence
  Synthetic polypeptide
MTVRLPHQILSSKRLALYVYEYLLHIGAQKSAQTFLSEIRWEKNITLGEPPGFLHSWWCVFWDLYCAAPDRREACEHSGEAKAFQDYSAAAAPSPVMGSMAPGDTMAAGSMAAGFFQPFMSPRFPGGPRPTLRMPSQPPAGLPGSQPLLPGAMEPSPRAQGHPSMGGPMQRVTPPRGMASVGPQSYGGGMRPPPNSLAGPGLPAMN

SEQ ID NO: 23689 - protein, 161 aa, Artificial Sequence
  Synthetic polypeptide
APRGWRCTFMSTCCTSVPRSQPRPSCLRSDGRRTSRWGSPLGSCTPGGASSGTCTARRLTEERPASTPARPRPSRTIVLQPPPAPLWGVWPQVTQWPQAPWRLASSSPSCHRASQGAPGPPCGCRVSLPQASLAPSPSSLAPWSPPHEPRGIRAWAAQCRG

SEQ ID NO: 23690 - protein, 357 aa, Artificial Sequence
  Synthetic polypeptide
MTVRLPHQILSSKRLALYVYEYLLHIGAQKSAQTFLSEIRWEKNITLGEPPGFLHSWWCVFWDLYCAAPDRREACEHSGEAKAFQDYSAAAAPSPVMGSMAPGDTMAAGSMAAGFFQPFMSPRFPGGPRPTLRMPSQPPAGLPGSQPLLPGAMEPSPRAQGHPSMGGPMQRVTPPRGMASVGPQSYGGGMRPPPNSLAGPGLPAMNMGPGVRGPWASPSGNSIPYSSSSPGSYTGPPGGGGPPGTPIMPSPGDSTNSSENMYTIMNPIGQGAGRANFPLGPGPEGPMAAMSAMEPHHVNGSLGSGDMDGLPKSSPGAVAGLSNAPGTPRDDGEMAAAGTFLHPFPSESYSPGMTMSV

SEQ ID NO: 23691 - protein, 379 aa, Artificial Sequence
  Synthetic polypeptide
MTVRLPHQILSSKRLALYVYEYLLHIGAQKSAQTFLSEIRWEKNITLGEPPGFLHSWWCVFWDLYCAAPDRREACEHSGEAKAFQDYSAAAAPSPVMGSMAPGDTMAAGSMAAGFFQGPPGSQPSPHNPNAPMMGPHGQPFMSPRFPGGPRPTLRMPSQPPAGLPGSQPLLPGAMEPSPRAQGHPSMGGPMQRVTPPRGMASVGPQSYGGGMRPPPNSLAGPGLPAMNMGPGVRGPWASPSGNSIPYSSSSPGSYTGPPGGGGPPGTPIMPSPGDSTNSSENMYTIMNPIGQGAGRANFPLGPGPEGPMAAMSAMEPHHVNGSLGSGDMDGLPKSSPGAVAGLSNAPGTPRDDGEMAAAGTFLHPFPSESYSPGMTMSV

SEQ ID NO: 23692 - protein, 122 aa, Artificial Sequence
  Synthetic polypeptide
APRGWRCTFMSTCCTSVPRSQPRPSCLRSDGRRTSRWGSPLGSCTPGGASSGTCTARRLTEERPASTPARPRPSRTIVLQPPPAPLWGVWPQVTQWPQAPWRLASSRAPPAPSRPPTTPTPP

SEQ ID NO: 23693 - protein, 48 aa, Artificial Sequence
  Synthetic polypeptide
MTVRLPHQILSSKRLALYVYEYLLHIGAQKSAQTFLSERLLGPVLRGA

SEQ ID NO: 23694 - protein, 38 aa, Artificial Sequence
  Synthetic polypeptide
APRGWRCTFMSTCCTSVPRSQPRPSCLSVFWDLYCAAP

SEQ ID NO: 23695 - protein, 262 aa, Artificial Sequence
  Synthetic polypeptide
GRAWWLTPVIPAFWEAKRKFGVVLDEIKPSSAPELQAVRMFADYLAHESRRDSIVAELDREMSRSVDVTNTTFLLMAASIYLHDQNPDAALRALHQGDSLECTAMTVQILLKLDRLDLARKELKRMQDLDEDATLTQLATAWVSLATGGEKLQDAYYIFQEMADKCSPTLLLLNGQAACHMAQGRWEAAEGLLQEALDKDSGYPETLVNLIVLSQHLGKPPEVTNRYLSQLKDAHRSHPFIKEYQAKENDFDRLVLQYAPSA

SEQ ID NO: 23696 - protein, 52 aa, Artificial Sequence
  Synthetic polypeptide
SQHFGRPRGSSVWSWMRSSPPRPLSSRPCACLLTTSPTRVGGTASWPSWTER

SEQ ID NO: 23697 - protein, 24 aa, Artificial Sequence
  Synthetic polypeptide
PGVVAHTCNPSILGGQEEVRCGPG

SEQ ID NO: 23698 - protein, 210 aa, Artificial Sequence
  Synthetic polypeptide
GRAWWLTPVIPAFWEAKRKFGVVLDEIKPSSAPELQAVRMFADYLAHESRRDSIVAELDREMSRSVDVTNTTFLLMAASIYLHDQNPDAALRALHQGDSLECTAMTVQILLKLDRLDLARKELKRMQDLDEDATLTQLATAWVSLATDSGYPETLVNLIVLSQHLGKPPEVTNRYLSQLKDAHRSHPFIKEYQAKENDFDRLVLQYAPSA

SEQ ID NO: 23699 - protein, 285 aa, Artificial Sequence
  Synthetic polypeptide
GRAWWLTPVIPAFWEAKRKFGVVLDEIKPSSAPELQAVRMFADYLAHESRRDSIVAELDREMSRSVDVTNTTFLLMAASIYLHDQNPDAALRALHQGDSLEWVSSPGRALHLEAQPMEAASPDGRTAMTVQILLKLDRLDLARKELKRMQDLDEDATLTQLATAWVSLATGGEKLQDAYYIFQEMADKCSPTLLLLNGQAACHMAQGRWEAAEGLLQEALDKDSGYPETLVNLIVLSQHLGKPPEVTNRYLSQLKDAHRSHPFIKEYQAKENDFDRLVLQYAPSA

SEQ ID NO: 23700 - protein, 211 aa, Artificial Sequence
  Synthetic polypeptide
GRAWWLTPVIPAFWEAKRKFGVVLDEIKPSSAPELQAVRMFADYLAHESRSTAMTVQILLKLDRLDLARKELKRMQDLDEDATLTQLATAWVSLATGGEKLQDAYYIFQEMADKCSPTLLLLNGQAACHMAQGRWEAAEGLLQEALDKDSGYPETLVNLIVLSQHLGKPPEVTNRYLSQLKDAHRSHPFIKEYQAKENDFDRLVLQYAPSA

SEQ ID NO: 23701 - protein, 44 aa, Artificial Sequence
  Synthetic polypeptide
SQHFGRPRGSSVWSWMRSSPPRPLSSRPCACLLTTSPTRVGAQP

SEQ ID NO: 23702 - protein, 100 aa, Artificial Sequence
  Synthetic polypeptide
GRAWWLTPVIPAFWEAKRKFGVVLDEIKPSSAPELQAVRMFADYLAHESRRVVRSCRMPTTSSRRWLTSARPPCCCSMGRRPATWPRAAGRPLRACCRRR

SEQ ID NO: 23703 - protein, 43 aa, Artificial Sequence
  Synthetic polypeptide
SQHFGRPRGSSVWSWMRSSPPRPLSSRPCACLLTTSPTRVGGW

SEQ ID NO: 23704 - protein, 68 aa, Artificial Sequence
  Synthetic polypeptide
TQEAEVAGAGLPDRRAVPGPGEASRAERLHHRRWHGHGGPGAGALSETTRGHRHAGAPGRSPAQLQHF

SEQ ID NO: 23705 - protein, 432 aa, Artificial Sequence
  Synthetic polypeptide
LGMVAHAVIPATREAEAGESLEPRRRRLRELAYQIAEQFRVLGKPLGLKDCIIVGGMDMVAQALELSRKPHVVIATPGRLADHLRSSNTFSIKKIRFLVMDEADRLLEQGCTDFTVDLEAILAAVPARRQTLLFSATLTDTLRELQGLATNQPFFWEAQAPVSTVEQLDQRYLLVPEKVKDAYLVHLIQRFQDEHEDWSIIIFTNTCKTCQILCMMLRKFSFPTVALHSMMKQKERFAALAKFKSSIYRILIATDVASRGLDIPTVQVVINHNTPGLPKIYIHRVGRTARAGRQGQAITLVTQYDIHLVHAIEEQIKKKLEEFSVEEAEVLQILTQVNVVRRECEIKLEAAHFDEKKEINKRKQLILEGKDPDLEAKRKAELAKIKQKNRRFKEKVEETLKRQKAGRAGHKGRPPRTPSGSHSGPVPSQGLV

SEQ ID NO: 23706 - protein, 37 aa, Artificial Sequence
  Synthetic polypeptide
SQLLGRPRQENRLNPGGGGCGSWPTRSQSSSGSWGSL

SEQ ID NO: 23707 - protein, 24 aa, Artificial Sequence
  Synthetic polypeptide
TQEAEVAGAGLPDRRAVPGPGEAS

SEQ ID NO: 23708 - protein, 46 aa, Artificial Sequence
  Synthetic polypeptide
LGMVAHAVIPATREAEAGESLEPRRRRLRELAYQIAEQFRVLGKPL

SEQ ID NO: 23709 - protein, 90 aa, Artificial Sequence
  Synthetic polypeptide
LGMVAHAVIPATREAEAGESLEPRRRRLRELAYQIAEQFRVLGKPLGLKDCIIVGGMDMVAQALELSRKPHVVIATPGRLADHLRSSNTF

SEQ ID NO: 23710 - protein, 41 aa, Artificial Sequence
  Synthetic polypeptide
QCQQELVYGAACQGHATSHSAANAVQHTATLLLVGLSLVFV

SEQ ID NO: 23711 - protein, 428 aa, Artificial Sequence
  Synthetic polypeptide
LACHWFLSDENSLEYKYYKLKLAEMQRMSENLRGADQKPTSADCAVRAMLYSRAVRNLKKKLLPWQRRGLLRAQGLRGWKARRATTGTQTLLSSGTRLKHHGRQAPGLSQAKPSLPDRNDAAKDCPPDPVGPSPQDPSLEASGPSPKPAGVDISEAPQTSSPCPSADIDMKTMETAEKLARFVAQVGPEIEQFSIENSTDNPDLWFLHDQNSSAFKFYRKKVFELCPSICFTSSPHNLHTGGGDTTGSQESPVDLMEGEAEFEDEPPPREAELESPEASSGTCFPRKRISSKSLKVGMIPAPKRVCLIQEPKVHEPVRIAYDRPRGRPMSKKKKPKDLDFAQQKLTDKNLGFQMLQKMGWKEGHGLGSLGKGIREPVSVYAAGSLGWEWVGPQSFHLQPAAWLLHSQDGLQLAVDFCFLNRRHLQMRS

SEQ ID NO: 23712 - protein, 88 aa, Artificial Sequence
  Synthetic polypeptide
GMILQDATVSPTECQGSSGAGTQSFCQVQTDLNWLTVSAGACVWSCLPGTCHITQCCQCCATHSHLTSSWLVTGFCLMKIVWSINITS

SEQ ID NO: 23713 - protein, 418 aa, Artificial Sequence
  Synthetic polypeptide
LACHWFLSDENSLEYKYYKLKLAEMQRMSENLRGADQKPTSADCAVRAMLYSRAVRNLKKKLLPWQRRGLLRAQGLRGWKARRATTGTQTLLSSGTRLKHHGRQAPGLSQAKPSLPDRNDAAKDCPPDPVGPSPQDPSLEASGPSPKPAGVDISEAPQTSSPCPSADIDMKTMETAEKLARFVAQVGPEIEQFSIENSTDNPDLWFLHDQNSSAFKFYRKKVFELCPSICFTSSPHNLHTGGGDTTGSQESPVDLMEGEAEFEDEPPPREAELESPEASSGTCFPRKRISSKSLKVGMIPAPKRVCLIQEPKVHEPVRIAYDRPRGRPMSKKKKPKDLDFAQQKLTDKNLGFQMLQKMGWKEGHGLGSLGKGIREPVSVGTPSEGEGLGADGQEHKEDTFDVFRQRMMQMYRHKRANK

SEQ ID NO: 23714 - protein, 470 aa, Artificial Sequence
  Synthetic polypeptide
LACHWFLSDENSLEYKYYKLKLAEMQRMSENLRGADQKPTSADCAVRAMLYSRAVRNLKKKLLPWQRRGLLRAQGLRGWKARRATTGTQTLLSSGTRLKHHGRQAPGLSQAKPSLPDRNDAAKDCPPDPVGPSPQDPSLEASGPSPKPAGVDISEAPQTSSPCPSADIDMKTMETAEKLARFVAQVGPEIEQFSIENSTDNPDLWFLHDQNSSAFKFYRKKVFELCPSICFTSSPHNLHTGGGDTTGSQESPVDLMEGEAEFEDEPPPREAELESPEVMPEEEDEDDEDGGEEAPAPGGAGKSEGSTPADGLPGEAAEDDLAGAPALSQASSGTCFPRKRISSKSLKVGMIPAPKRVCLIQEPKVHEPVRIAYDRPRGRPMSKKKKPKDLDFAQQKLTDKNLGFQMLQKMGWKEGHGLGSLGKGIREPVSVGTPSEGEGLGADGQEHKEDTFDVFRQRMMQMYRHKRANK

SEQ ID NO: 23715 - protein, 229 aa, Artificial Sequence
  Synthetic polypeptide
LACHWFLSDENSLEYKYYKLKLAEMQRMSENLRGADQKPTSADCAVRAMLYSRAVRNLKKKLLPWQRRGLLRAQGLRGWKARRATTGTQTLLSSGTRLKHHGRQAPGLSQAKPSLPDRNDAAKDCPPDPVGPSPQDPSLEASGPSPKPAGVDISEAPQTSSPCPSADIDMKTMETAEKLARFVAQVGPEIEQFSIENSTDNPDLWGPAFISGIRKNLPRGTFNLHPKAK

SEQ ID NO: 23716 - protein, 480 aa, Artificial Sequence
  Synthetic polypeptide
LACHWFLSDENSLEYKYYKLKLAEMQRMSENLRGADQKPTSADCAVRAMLYSRAVRNLKKKLLPWQRRGLLRAQGLRGWKARRATTGTQTLLSSGTRLKHHGRQAPGLSQAKPSLPDRNDAAKDCPPDPVGPSPQDPSLEASGPSPKPAGVDISEAPQTSSPCPSADIDMKTMETAEKLARFVAQVGPEIEQFSIENSTDNPDLWFLHDQNSSAFKFYRKKVFELCPSICFTSSPHNLHTGGGDTTGSQESPVDLMEGEAEFEDEPPPREAELESPEVMPEEEDEDDEDGGEEAPAPGGAGKSEGSTPADGLPGEAAEDDLAGAPALSQASSGTCFPRKRISSKSLKVGMIPAPKRVCLIQEPKVHEPVRIAYDRPRGRPMSKKKKPKDLDFAQQKLTDKNLGFQMLQKMGWKEGHGLGSLGKGIREPVSVYAAGSLGWEWVGPQSFHLQPAAWLLHSQDGLQLAVDFCFLNRRHLQMRS

SEQ ID NO: 23717 - protein, 23 aa, Artificial Sequence
  Synthetic polypeptide
LENQSAHVGFCLMKIVWSINITS

SEQ ID NO: 23718 - protein, 28 aa, Artificial Sequence
  Synthetic polypeptide
FCALPLMRSCLAGAVFDLRTRVPMLVFV

SEQ ID NO: 23719 - protein, 430 aa, Artificial Sequence
  Synthetic polypeptide
EPECPCWFLSDENSLEYKYYKLKLAEMQRMSENLRGADQKPTSADCAVRAMLYSRAVRNLKKKLLPWQRRGLLRAQGLRGWKARRATTGTQTLLSSGTRLKHHGRQAPGLSQAKPSLPDRNDAAKDCPPDPVGPSPQDPSLEASGPSPKPAGVDISEAPQTSSPCPSADIDMKTMETAEKLARFVAQVGPEIEQFSIENSTDNPDLWFLHDQNSSAFKFYRKKVFELCPSICFTSSPHNLHTGGGDTTGSQESPVDLMEGEAEFEDEPPPREAELESPEASSGTCFPRKRISSKSLKVGMIPAPKRVCLIQEPKVHEPVRIAYDRPRGRPMSKKKKPKDLDFAQQKLTDKNLGFQMLQKMGWKEGHGLGSLGKGIREPVSVYAAGSLGWEWVGPQSFHLQPAAWLLHSQDGLQLAVDFCFLNRRHLQMRS

SEQ ID NO: 23720 - protein, 420 aa, Artificial Sequence
  Synthetic polypeptide
EPECPCWFLSDENSLEYKYYKLKLAEMQRMSENLRGADQKPTSADCAVRAMLYSRAVRNLKKKLLPWQRRGLLRAQGLRGWKARRATTGTQTLLSSGTRLKHHGRQAPGLSQAKPSLPDRNDAAKDCPPDPVGPSPQDPSLEASGPSPKPAGVDISEAPQTSSPCPSADIDMKTMETAEKLARFVAQVGPEIEQFSIENSTDNPDLWFLHDQNSSAFKFYRKKVFELCPSICFTSSPHNLHTGGGDTTGSQESPVDLMEGEAEFEDEPPPREAELESPEASSGTCFPRKRISSKSLKVGMIPAPKRVCLIQEPKVHEPVRIAYDRPRGRPMSKKKKPKDLDFAQQKLTDKNLGFQMLQKMGWKEGHGLGSLGKGIREPVSVGTPSEGEGLGADGQEHKEDTFDVFRQRMMQMYRHKRANK

SEQ ID NO: 23721 - protein, 472 aa, Artificial Sequence
  Synthetic polypeptide
EPECPCWFLSDENSLEYKYYKLKLAEMQRMSENLRGADQKPTSADCAVRAMLYSRAVRNLKKKLLPWQRRGLLRAQGLRGWKARRATTGTQTLLSSGTRLKHHGRQAPGLSQAKPSLPDRNDAAKDCPPDPVGPSPQDPSLEASGPSPKPAGVDISEAPQTSSPCPSADIDMKTMETAEKLARFVAQVGPEIEQFSIENSTDNPDLWFLHDQNSSAFKFYRKKVFELCPSICFTSSPHNLHTGGGDTTGSQESPVDLMEGEAEFEDEPPPREAELESPEVMPEEEDEDDEDGGEEAPAPGGAGKSEGSTPADGLPGEAAEDDLAGAPALSQASSGTCFPRKRISSKSLKVGMIPAPKRVCLIQEPKVHEPVRIAYDRPRGRPMSKKKKPKDLDFAQQKLTDKNLGFQMLQKMGWKEGHGLGSLGKGIREPVSVGTPSEGEGLGADGQEHKEDTFDVFRQRMMQMYRHKRANK

SEQ ID NO: 23722 - protein, 231 aa, Artificial Sequence
  Synthetic polypeptide
EPECPCWFLSDENSLEYKYYKLKLAEMQRMSENLRGADQKPTSADCAVRAMLYSRAVRNLKKKLLPWQRRGLLRAQGLRGWKARRATTGTQTLLSSGTRLKHHGRQAPGLSQAKPSLPDRNDAAKDCPPDPVGPSPQDPSLEASGPSPKPAGVDISEAPQTSSPCPSADIDMKTMETAEKLARFVAQVGPEIEQFSIENSTDNPDLWGPAFISGIRKNLPRGTFNLHPKAK

SEQ ID NO: 23723 - protein, 482 aa, Artificial Sequence
  Synthetic polypeptide
EPECPCWFLSDENSLEYKYYKLKLAEMQRMSENLRGADQKPTSADCAVRAMLYSRAVRNLKKKLLPWQRRGLLRAQGLRGWKARRATTGTQTLLSSGTRLKHHGRQAPGLSQAKPSLPDRNDAAKDCPPDPVGPSPQDPSLEASGPSPKPAGVDISEAPQTSSPCPSADIDMKTMETAEKLARFVAQVGPEIEQFSIENSTDNPDLWFLHDQNSSAFKFYRKKVFELCPSICFTSSPHNLHTGGGDTTGSQESPVDLMEGEAEFEDEPPPREAELESPEVMPEEEDEDDEDGGEEAPAPGGAGKSEGSTPADGLPGEAAEDDLAGAPALSQASSGTCFPRKRISSKSLKVGMIPAPKRVCLIQEPKVHEPVRIAYDRPRGRPMSKKKKPKDLDFAQQKLTDKNLGFQMLQKMGWKEGHGLGSLGKGIREPVSVYAAGSLGWEWVGPQSFHLQPAAWLLHSQDGLQLAVDFCFLNRRHLQMRS

SEQ ID NO: 23724 - protein, 45 aa, Artificial Sequence
  Synthetic polypeptide
GQEFKTSLANMGKITWQPDELHRRLLMLYYKKKPNDITWMPVVRL

SEQ ID NO: 23725 - protein, 36 aa, Artificial Sequence
  Synthetic polypeptide
ARRSGSRPGIPALWEAEAGESLEVRNSRPAWPTWAK

SEQ ID NO: 23726 - protein, 1119 aa, Artificial Sequence
  Synthetic polypeptide
PGAVAHGLESQHFGRPKRANHLRSGIQDQPGQHGQNNMAARRITQETFDAVLQEKAKRYHMDASGEAVSETLQFKAQDLLRAVPRSRAEMYDDVHSDGRYSLSGSVAHSRDAGREGLRSDVFPGPSFRSSNPSISDDSYFRKECGRDLEFSHSDSRDQVIGHRKLGHFRSQDWKFALRGSWEQDFGHPVSQESSWSQEYSFGPSAVLGDFGSSRLIEKECLEKESRDYDVDHPGEADSVLRGGSQVQARGRALNIVDQEGSLLGKGETQGLLTAKGGVGKLVTLRNVSTKKIPTVNRITPKTQGTNQIQKNTPSPDVTLGTNPGTEDIQFPIQKIPLGLDLKNLRLPRRKMSFDIIDKSDVFSRFGIEIIKWAGFHTIKDDIKFSQLFQTLFELETETCAKMLASFKCSLKPEHRDFCFFTIKFLKHSALKTPRVDNEFLNMLLDKGAVKTKNCFFEIIKPFDKYIMRLQDRLLKSVTPLLMACNAYELSVKMKTLSNPLDLALALETTNSLCRKSLALLGQTFSLASSFRQEKILEAVGLQDIAPSPAAFPNFEDSTLFGREYIDHLKAWLVSSGCPLQVKKAEPEPMREEEKMIPPTKPEIQAKAPSSLSDAVPQRADHRVVGTIDQLVKRVIEGSLSPKERTLLKEDPAYWFLSDENSLEYKYYKLKLAEMQRMSENLRGADQKPTSADCAVRAMLYSRAVRNLKKKLLPWQRRGLLRAQGLRGWKARRATTGTQTLLSSGTRLKHHGRQAPGLSQAKPSLPDRNDAAKDCPPDPVGPSPQDPSLEASGPSPKPAGVDISEAPQTSSPCPSADIDMKTMETAEKLARFVAQVGPEIEQFSIENSTDNPDLWFLHDQNSSAFKFYRKKVFELCPSICFTSSPHNLHTGGGDTTGSQESPVDLMEGEAEFEDEPPPREAELESPEVMPEEEDEDDEDGGEEAPAPGGAGKSEGSTPADGLPGEAAEDDLAGAPALSQASSGTCFPRKRISSKSLKVGMIPAPKRVCLIQEPKVHEPVRIAYDRPRGRPMSKKKKPKDLDFAQQKLTDKNLGFQMLQKMGWKEGHGLGSLGKGIREPVSVGTPSEGEGLGADGQEHKEDTFDVFRQRMMQMYRHKRANK

SEQ ID NO: 23727 - protein, 57 aa, Artificial Sequence
  Synthetic polypeptide
ARRSGSRPGIPALWEAEAGESLEGKITWQPDELHRRLLMLYYKKKPNDITWMPVVRL

SEQ ID NO: 23728 - protein, 25 aa, Artificial Sequence
  Synthetic polypeptide
PGAVAHGLESQHFGRPKRANHLRAK

SEQ ID NO: 23729 - protein, 113 aa, Artificial Sequence
  Synthetic polypeptide
PQRLCSHLDPWNLKGEQLPATAQVHPCEALLLPELLRRDPSGAPGPGEEDLPAVDVLLRHPRRQPHCLPGLVDRRRLGDQLRPGLRVAAPVHALRLRVLVPACLQGLPSRQLL

SEQ ID NO: 23730 - protein, 18 aa, Artificial Sequence
  Synthetic polypeptide
SLEPKRRTTSRHCPSSSL

SEQ ID NO: 23731 - protein, 206 aa, Artificial Sequence
  Synthetic polypeptide
PQRLCSHLDPWNLKGEQLPATAQVHPCEALLLPELLRRDPSGAPGPGEEDLPAVDVLLRHPRRQPHCLPGLVDRRRLGDQLRPGLRVAAPVHALRLRVLVPACLQGLPRLAVGNWILPVQPGRCRGHAASSHHVLRVGCHDGHRDHEGAQDLPRGWRKLPEGTDGVEHGHLAEPTVEGGPVQQLLRQQPARVPHCAQLPGQWPVAL

SEQ ID NO: 23732 - protein, 55 aa, Artificial Sequence
  Synthetic polypeptide
PQRLCSHLDPWNLKGEQLPATAQVHPCEALLLPELLRRDPSGAPGPGEEDLPAVD

SEQ ID NO: 23733 - protein, 18 aa, Artificial Sequence
  Synthetic polypeptide
MGAVTHASNPSTLGGRAP

SEQ ID NO: 23734 - protein, 60 aa, Artificial Sequence
  Synthetic polypeptide
LTPVIPALWEAERREEPGGQQRLLPQRGGSAQTGHQHPGPYECQCPGPQPGGTTPALLSL

SEQ ID NO: 23735 - protein, 55 aa, Artificial Sequence
  Synthetic polypeptide
SQHFGRPSAVKNLVDSSVYFRSVEGLLKQAISIRDHMNASAQGHSPEEPPPPSSA

SEQ ID NO: 23736 - protein, 50 aa, Artificial Sequence
  Synthetic polypeptide
LTPVIPALWEAERREEPGGQQRLLPQRGGSAQTGHQHPGPYECQCPGPQV

SEQ ID NO: 23737 - protein, 45 aa, Artificial Sequence
  Synthetic polypeptide
SQHFGRPSAVKNLVDSSVYFRSVEGLLKQAISIRDHMNASAQGHR

SEQ ID NO: 23738 - protein, 18 aa, Artificial Sequence
  Synthetic polypeptide
AHPGQHGRCSSSARGCCC

SEQ ID NO: 23739 - protein, 103 aa, Artificial Sequence
  Synthetic polypeptide
EANVGGSRGQEIEPTLANMGAVPPQQGDAAADGAKAAGGAPAADPLRADRGELAGEPHPEGVAACLLPGAPGHPLSGCRAGEEREAVSEAAAAVHPDHLHTAR

SEQ ID NO: 23740 - protein, 453 aa, Artificial Sequence
  Synthetic polypeptide
SQHFERLTWEDHEVKRLSPPWPTWALFLLSKGMLLLMERKLQEVHPLLTLCGQIVENWQGNPIQKESLRVFFLVLQVTHYLDAGQVKSVKPCLKQLQQCIQTISTLHDDEILPSNPADLFHWLPKEHMCVLVYLVTVMHSMQAGYLEKAQKYTDKALMQLEKLKMLDCSPILSSFQVILLEHIIMCRLVTGHKATALQEISQVCQLCQQSPRLFSNHAAQLHTLLGLYCVSVNCMDNAEAQFTTALRLTNHQELWAFIVTNLASVYIREGNRHQEVLYSLLERINPDHSFPVSSHCLRAAAFYVRGLFSFFQGRYNEAKRFLRETLKMSNAEDLNRLTACSLVLLGHIFYVLGNHRESNNMVVPAMQLASKIPDMSVQLWSSALLRDLNKACGNAMDAHEAAQMHQNFSQQLLQDHIEACSLPEHNLITWTDGPPPVQFQAQNGPNTSLASLL

SEQ ID NO: 23741 - protein, 89 aa, Artificial Sequence
  Synthetic polypeptide
EANVGGSRGQEIEPTLANMGAVPPQQGDAAADGAKAAGGAPAADPLRADRGELAGEPHPEGVAACLLPGAPGHPLSGCRAGEEREAVSE

SEQ ID NO: 23742 - protein, 93 aa, Artificial Sequence
  Synthetic polypeptide
SQHFERLTWEDHEVKRLSPPWPTWALFLLSKGMLLLMERKLQEVHPLLTLCGQIVENWQGNPIQKESLRVFFLVLQVTHYLDAGQVKSVKPCL

SEQ ID NO: 23743 - protein, 207 aa, Artificial Sequence
  Synthetic polypeptide
SQHFERLTWEDHEVKRLSPPWPTWALFLLSKGMLLLMERKLQEVHPLLTLCGQIVENWQGNPIQKESLRVFFLVLQVTHYLDAGQVKSVKPCLKQLQQCIQTISTLHDDEILPSNPADLFHWLPKEHMCVLVYLVTVMHSMQAGYLEKAQKYTDKALMQLEKLKSKSVLDCSPILSSFQVILLEHIIMCRLVTGHKATALQEISQVC

SEQ ID NO: 23744 - protein, 17 aa, Artificial Sequence
  Synthetic polypeptide
NMLSFLEKTQSPLRMWP

SEQ ID NO: 23745 - protein, 27 aa, Artificial Sequence
  Synthetic polypeptide
LCSCKVTKQIISSRKTCCRSLKRLSLL

SEQ ID NO: 23746 - protein, 642 aa, Artificial Sequence
  Synthetic polypeptide
KDSVSFEDVAVNFTLEEWALLDSSQKKLYEDVMQETFKNLVCLGKKWEDQDIEDDHRNQGKNRRCHMVERLCESRRGSKCGETTSQMPNVNINKETFTGAKPHECSFCGRDFIHHSSLNRHMRSHTGQKPNEYQEYEKQPCKCKAVGKTFSYHHCFRKHERTHTGVKPYECKQCGKAFIYYQPFQRHERTHAGQKPYECKQCGKTFIYYQSFQKHAHTGKKPYECKQCGKAFICYQSFQRHKRTHTGEKPYECKQCGKAFSCPTYFRTHERTHTGEKPYKCKECGKAFSFLSSFRRHKRTHSGEKPYECKECGKAFFYSASFRAHVIIHTGARPYKCKECGKAFNSSNSCRVHERTHIGEKPYECKRCGKSFSWSISLRLHERTHTGEKPYECKQCHKTFSFSSSLREHETTHTGEKPYECKQCGKTFSFSSSLQRHERTHNAEKPYECKQCGKAFRCSSYFRIHERSHTGEKPYECKQCGKVFIRSSSFRLHERTHTGEKPYECKLCGKTFSFSSSLREHEKIHTGNKPFECKQCGKAFLRSSQIRLHERTHTGEKPYQCKQCGKAFISSSKFRMHERTHTGEKPYRCKQCGKAFRFSSSVRIHERSHTGEKPYECKQCGKAFISSSHFRLHERTHMGEKV

SEQ ID NO: 23747 - protein, 14 aa, Artificial Sequence
  Synthetic polypeptide
LLIITKARHGGSCL

SEQ ID NO: 23748 - protein, 23 aa, Artificial Sequence
  Synthetic polypeptide
LRPGTVAHAYNSSTLEGQGRRII

SEQ ID NO: 23749 - protein, 57 aa, Artificial Sequence
  Synthetic polypeptide
QQQQKKGNISERNLKRHNKWKHIPCPWIEENIVKMSTQPTAICSFSTRTRCRLARRR

SEQ ID NO: 23750 - protein, 86 aa, Artificial Sequence
  Synthetic polypeptide
KDTINGNTSHVHGLKRILLRCPHNPLRSAVSLLGRGADWPGDGDDHAIHRQEVRGASARGPLRGVPEEEPASRQRLHAAHAGATLR

SEQ ID NO: 23751 - protein, 359 aa, Artificial Sequence
  Synthetic polypeptide
DVHTTHCDLQFLYSDEVQIGPETVMTTLYTAKKYAVPALEAHCVEFLKKNLRADNAFMLLTQARLFDEPQLASLCLENIDKNTADAITAEGFTDIDLDTLVAVLERDTLGIREVRLFNAVVRWSEAECQRQQLQVTPENRRKVLGKALGLIRFPLMTIEEFAAGPAQSGILVDREVVSLFLHFTVNPKPRVEFIDRPRCCLRGKECSINRFQQVESRWGYSGTSDRIRFSVNKRIFVVGFGLYGSIHGPTDYQVNIQIIHTDSNTVLGQNDTGFSCDGSASTFRVMFKEPVEVLPNVNYTACATLKGPDSHYGTKGLRKVTHESPTTGAKTCFTFCYAAGNNNGTSVEDGQIPEVIFYT

SEQ ID NO: 23752 - protein, 109 aa, Artificial Sequence
  Synthetic polypeptide
KDTINGNTSHVHGLKRILLRCPHNPLRSAVSLLGRGADWPGDGDDHAIHRQEVRGASARGPLRGVPEEEPASRQRLHAAHAGWSAMARSQLTATSASSVQAILLPQPPQ

SEQ ID NO: 23753 - protein, 303 aa, Artificial Sequence
  Synthetic polypeptide
DVHTTHCDLQFLYSDEVQIGPETVMTTLYTAKKYAVPALEAHCVEFLKKNLRADNAFMLLTQAGVQWHDLSSLQPPPPAFKRFSCLSLHSSWDYRPPPPRLAKKKEKKKPERTFSLSLRKCQARLFDEPQLASLCLENIDKNTADAITAEGFTDIDLDTLVAVLERDTLGIREVRLFNAVVRWSEAECQRQQLQVTPENRRKVLGKALGLIRFPLMTIEEFAAGPAQSGILVDREVVSLFLHFTVNPKPRVEFIDRPRCCLRGKECSINRFQQVESRWGYSGTSDRIRFSVNKRIFVVGFGLY

SEQ ID NO: 23754 - protein, 131 aa, Artificial Sequence
  Synthetic polypeptide
QNILLGPKTLTFLGPLQFRDVAIEFSLEEWHCLDTAQRNLYRNVMLENYSNLVFLGIVVSKPDLIAHLEQGKKPLTMKRHEMVANPSGPGVVVVLMCNPRILGGQAKRIPGAQKFENSLGNIWRPLSMKKI

SEQ ID NO: 23755 - protein, 12 aa, Artificial Sequence
  Synthetic polypeptide
HFWDHCNLEMWP

SEQ ID NO: 23756 - protein, 17 aa, Artificial Sequence
  Synthetic polypeptide
KYPSRAKNIDIFGTIAI

SEQ ID NO: 23757 - protein, 96 aa, Artificial Sequence
  Synthetic polypeptide
QNILLGPKTLTFLGPLQFRDVAIEFSLEEWHCLDTAQRNLYRNVMLENYSNLVFLGIVVSKPDLIAHLEQGKKPLTMKRHEMVANPSDGVNLCHPG

SEQ ID NO: 23758 - protein, 135 aa, Artificial Sequence
  Synthetic polypeptide
QNILLGPKTLTFLGPLQFRDVAIEFSLEEWHCLDTAQRNLYRNVMLENYSNLVFLGIVVSKPDLIAHLEQGKKPLTMKRHEMVANPSGARLLSQHFGRPRWVDPEVRRSRPSGQHGEIPSLLKYKKLARHGGPCL

SEQ ID NO: 23759 - protein, 632 aa, Artificial Sequence
  Synthetic polypeptide
QNILLGPKTLTFLGPLQFRDVAIEFSLEEWHCLDTAQRNLYRNVMLENYSNLVFLGIVVSKPDLIAHLEQGKKPLTMKRHEMVANPSVICSHFAQDLWPEQNIKDSFQKVILRRYEKRGHGNLQLIKRCESVDECKVHTGGYNGLNQCSTTTQSKVFQCDKYGKVFHKFSNSNRHNIRHTEKKPFKCIECGKAFNQFSTLITHKKIHTGEKPYICEECGKAFKYSSALNTHKRIHTGEKPYKCDKCDKAFIASSTLSKHEIIHTGKKPYKCEECGKAFNQSSTLTKHKKIHTGEKPYKCEECGKAFNQSSTLTKHKKIHTGEKPYVCEECGKAFKYSRILTTHKRIHTGEKPYKCNKCGKAFIASSTLSRHEFIHMGKKHYKCEECGKAFIWSSVLTRHKRVHTGEKPYKCEECGKAFKYSSTLSSHKRSHTGEKPYKCEECGKAFVASSTLSKHEIIHTGKKPYKCEECGKAFNQSSSLTKHKKIHTGEKPYKCEECGKAFNQSSSLTKHKKIHTGEKPYKCEECGKAFNQSSTLIKHKKIHTREKPYKCEECGKAFHLSTHLTTHKILHTGEKPYRCRECGKAFNHSATLSSHKKIHSGEKPYECDKCGKAFISPSSLSRHEIIHTGEKP

SEQ ID NO: 23760 - protein, 42 aa, Artificial Sequence
  Synthetic polypeptide
NPTFSKYLNLAPSCKTTSCHEDVGSLSFIEYNQLTSPIPRNC

SEQ ID NO: 23761 - protein, 33 aa, Artificial Sequence
  Synthetic polypeptide
PPQFPGTVDIQGCDHRILSGGVGVSEPCSAEFV

SEQ ID NO: 23762 - protein, 89 aa, Artificial Sequence
  Synthetic polypeptide
STDLPNSQELLTFRDVTIEFSLEEWEFLNPAQQSLYRKVMLENYRNLVSLGLTVSKPELISRLEQRQEPWNVKRHETIAKPPGTYRVGQ

SEQ ID NO: 23763 - protein, 505 aa, Artificial Sequence
  Synthetic polypeptide
STDLPNSQELLTFRDVTIEFSLEEWEFLNPAQQSLYRKVMLENYRNLVSLGLTVSKPELISRLEQRQEPWNVKRHETIAKPPAMSSHYTEDLLPEQCMQDSFQKVILRRYGSCGLEDLHLRKDGENVGECKDQKEIYNGLNQCLSTLPSKIFPYNKCVKVFSKSSNLNRENIRHTTEKLFKCMQCGKVFKSHSGLSYHKIIHTEEKLCICEECGKTFKWFSYLTKHKRIHTGEKPYKCEECGKAFNWCSSLTKHKRIHTGEKPYKCEECGKAFHWCSPFVRHKKIHTGEKPYTCEDCGRAFNRHSHLTKHKTIHTGKKPYKCKECGKAFNHCSLLTIHERTHTGEKPYKCEECGKAFNSSSILTEHKVIHSGEKPYKCEKCDKVFKRFSYLTKHKRIHTGEKPYKCEECGKAFNWSSILTEHKRIHTGEKPYNCEECGKAFNRCSHLTRHKKIHTAVKRYKCEECGKAFKRCSHLNEHKRVQRGEKSCKYKKCGEAFNHCSNLTT

SEQ ID NO: 23764 - protein, 110 aa, Artificial Sequence
  Synthetic polypeptide
STDLPNSQELLTFRDVTIEFSLEEWEFLNPAQQSLYRKVMLENYRNLVSLGLTVSKPELISRLEQRQEPWNVKRHETIAKPPDYSLTILCKKKSNILISFPSIIYVFSLH

SEQ ID NO: 23765 - protein, 83 aa, Artificial Sequence
  Synthetic polypeptide
STDLPNSQELLTFRDVTIEFSLEEWEFLNPAQQSLYRKVMLENYRNLVSLGLTVSKPELISRLEQRQEPWNVKRHETIAKPPG

SEQ ID NO: 23766 - protein, 30 aa, Artificial Sequence
  Synthetic polypeptide
TACCVFSFCPRPLARAEHKRFLPKSDTEKI

SEQ ID NO: 23767 - protein, 403 aa, Artificial Sequence
  Synthetic polypeptide
IFNVGCGTWWDMFVSWRQISHERHVVCSHFAQDLWPEQSIKDSYQKVILRKFEKCGHGNLHFKKGCESVDECKLHKRGYNGLNQCLTTTQSKIFQCGKYVKVFHQFSNSKRHKRRHTEKKPLKYIEGDKAFNQSSTHTTHKKIDTGEKPYKCEECGKAFNRSSHLTTHKITHTREKPYKCEECGKVFKYFSSFTTHKKIHSGEKPYICEECGKAFMYPYTLTTHKIIHTGEQPYKCKECDKAFNHPATLSSHKKIHTGEKPYTCDKCGKAFISSSILSKHEKIHTGEKPYKCEECGKAFTRSSHLTMHKIIHTGEKPYKCEECGKAFTWSAGLHKHRRTHTGEKPYKCEECGKAYTTSSNLTEHKTTHTGEKPYKCKECGKAFNWSSDLNKHKRIHIGQKPRT

SEQ ID NO: 23768 - protein, 55 aa, Artificial Sequence
  Synthetic polypeptide
IWFPCSCSPDLMLQNKSSMLDVGPGGTCLCHGGKFLMNGMLCVLILPKTFGQSRA

SEQ ID NO: 23769 - protein, 91 aa, Artificial Sequence
  Synthetic polypeptide
LWWHPPVAQLLRRLRQKNCLNPGGEDCGQVWCLTPVIPALWEARAGGLLEPRSLRPAWSTWKIPVSTKKKKKSQLGMGMVVHACNPSYSRG

SEQ ID NO: 23770 - protein, 15 aa, Artificial Sequence
  Synthetic polypeptide
TQEAKIVARCGVLHL

SEQ ID NO: 23771 - protein, 50 aa, Artificial Sequence
  Synthetic polypeptide
LIVVASTCSPATQEAEAEELLEPRRRRLWPGVVSYTCNPSTVGSQGRWIA

SEQ ID NO: 23772 - protein, 51 aa, Artificial Sequence
  Synthetic polypeptide
QNILFGSKTLALLVSLLEIQQLRLYSRFSEKIICINKIFSSLNTLKCERDH

SEQ ID NO: 23773 - protein, 31 aa, Artificial Sequence
  Synthetic polypeptide
NVRGTIDIYRCGHRILSGGVAVPGHSTTELI

SEQ ID NO: 23774 - protein, 674 aa, Artificial Sequence
  Synthetic polypeptide
EGPLTFTDVAIEFSLEEWQCLDTAQQNLYRNVMLENYRNLVFLGIAVSKPDLITCLEKEKEPCKMKRHEMVDEPPVVCSHFAEDFWPEQDIKDSFQKVTLRRYDKRGHENLQLRKGYKTVGDCKLYKGGYNGLNQCLTLTQSKMYHCDIYVKVFYAFSNADRYKTRHTGKKPFQCKKCGKSFCMLSQLTQHKKIHIRENTYRCKEFGNAFNQSSALTNHKRIYVGEKHYRCEECGKAFNHYSTLTNHKRIHTGEKPYKCKECGKAFSRYSTLTTHKRIHSGEKPYKCDECGKTFSISSTFTKHKIIHTEEKPYKCKECGKAFNRSSTLTSHKRIHTGEKPYKCEECGKAFNWSSTLTKHKVIHTGEKPYKCEECGKAFNQSSRLTRHKKIHTGEEPYKFEKCGRVFTCSSTLTQDKKIHTGEKPYNCEECGKVFTYSSTLTRHKRIHTEEKPYKCNECGKAFNRSSHLTSHRRIHTGEKPYKCEECGKAFKQSSNLNSHKKIHSGEKPYKCEECGKAFILSSRLTQHKKIHTGEKPYKCEECGKAFNRSSRLTQHKKIHTGEKPYKCKQCDKAFTHSSNLSSHKKIHSGEKPYKCEECGKAFNRSSRLTQHKKIHTREKPYKCEECAKAFTRSSRLTQHKKIHRMGVVAHACNPSTLGGRGGRITRSGDRDRPG

SEQ ID NO: 23775 - protein, 122 aa, Artificial Sequence
  Synthetic polypeptide
EGPLTFTDVAIEFSLEEWQCLDTAQQNLYRNVMLENYRNLVFLGIAVSKPDLITCLEKEKEPCKMKRHEMVDEPPDGVSLLLPRLECSGTISAHYNFPLPGSSDSPASASSVVGITGWGTSG

SEQ ID NO: 23776 - protein, 796 aa, Artificial Sequence
  Synthetic polypeptide
ESLHSVNSKESWFIKRTWLLHLTLSLLPCDISSYSLPSTITVSFLRPSPETDADTHFLYSLPNFMCSHFTQDFWPEQHIKDPFQKATLRRYKNCEHKNVHLKKDHKSVDECKVHRGGYNGFNQCLPATQSKIFLFDKCVKAFHKFSNSNRHKISHTEKKLFKCKECGKSFCMLPHLAQHKIIHTRVNFCKCEKCGKAFNCPSIITKHKRINTGEKPYTCEECGKVFNWSSRLTTHKKNYTRYKLYKCEECGKAFNKSSILTTHKIIRTGEKFYKCKECAKAFNQSSNLTEHKKIHPGEKPYKCEECGKAFNWPSTLTKHKRIHTGEKPYTCEECGKAFNQFSNLTTHKRIHTAEKFYKCTECGEAFSRSSNLTKHKKIHTEKKPYKCEECGKAFKWSSKLTEHKLTHTGEKPYKCEECGKAFNWPSTLTKHNRIHTGEKPYKCEVCGKAFNQFSNLTTHKRIHTAEKPYKCEECGKAFSRSSNLTKHKKIHIEKKPYKCEECGKAFKWSSKLTEHKITHTGEKPYKCEECGKAFNHFSILTKHKRIHTGEKPYKCEECGKAFTQSSNLTTHKKIHTGEKFYKCEECGKAFTQSSNLTTHKKIHTGGKPYKCEECGKAFNQFSTLTKHKIIHTEEKPYKCEECGKAFKWSSTLTKHKIIHTGEKPYKCEECGKAFKLSSTLSTHKIIHTGEKPYKCEKCGKAFNRSSNLIEHKKIHTGEQPYKCEECGKAFNYSSHLNTHKRIHTKEQPYKCKECGKAFNQYSNLTTHNKIHTGEKLYKPEDVTVILTTPQTFSNIK

SEQ ID NO: 23777 - protein, 33 aa, Artificial Sequence
  Synthetic polypeptide
DPHQKQMLTHTSCTVCQILCVLILPKTFGQSSI

SEQ ID NO: 23778 - protein, 37 aa, Artificial Sequence
  Synthetic polypeptide
HTLLVQSAKFYVFSFYPRLLARAAYKRSFPKSDTEKI

SEQ ID NO: 23779 - protein, 173 aa, Artificial Sequence
  Synthetic polypeptide
ESLHSVNSKESWFIKRTWLLHLTLSLLPCDISSYSLPSTITVSFLRPSPETDADTHFLYSLPNFMCSHFTQDFWPEQHIKDPFQKATLRRYKNCEHKNVHLKKDHKSVDECKVHRGGYNGFNQCLPATQSKIFLFDKCVKAFHKFSNSNRHKISHTEKKLFKCKECGKSFCML

SEQ ID NO: 23780 - protein, 105 aa, Artificial Sequence
  Synthetic polypeptide
ESLHSVNSKESWFIKRTWLLHLTLSLLPCDISSYSLPSTITVSFLRPSPETDADTHFLYSLPNFMCSHFTQDFWPEQHIKDPFQKATLRRYKNCEHKNVHLKKDH

SEQ ID NO: 23781 - protein, 57 aa, Artificial Sequence
  Synthetic polypeptide
ARLNCIQLNAYQGLKNPDFYLLFTYDLEALTSSCPALLDQTKKEREEGGGGEGKRDH

SEQ ID NO: 23782 - protein, 74 aa, Artificial Sequence
  Synthetic polypeptide
MLIKDSRIQTFISYLLMTWKPSPQVVLHYWIKPRKRERKEEVEKEKGTIDIYGCGHRILSGGVAMPGHCTAEFI

SEQ ID NO: 23783 - protein, 837 aa, Artificial Sequence
  Synthetic polypeptide
PGSPHLKLSCITGSNQERERGRRRWRRKKGPLTFMDVAIEFCLEEWQCLDIAQQNLYRNVMLENYRNLVFLGIAVSKPDLITCLEQEKEPWEPMRRHEMVAKPPVMCSHFTQDFWPEQHIKDPFQKATLRRYKNCEHKNVHLKKDHKSVDECKVHRGGYNGFNQCLPATQSKIFLFDKCVKAFHKFSNSNRHKISHTEKKLFKCKECGKSFCMLPHLAQHKIIHTRVNFCKCEKCGKAFNCPSIITKHKRINTGEKPYTCEECGKVFNWSSRLTTHKKNYTRYKLYKCEECGKAFNKSSILTTHKIIRTGEKFYKCKECAKAFNQSSNLTEHKKIHPGEKPYKCEECGKAFNWPSTLTKHKRIHTGEKPYTCEECGKAFNQFSNLTTHKRIHTAEKFYKCTECGEAFSRSSNLTKHKKIHTEKKPYKCEECGKAFKWSSKLTEHKLTHTGEKPYKCEECGKAFNWPSTLTKHNRIHTGEKPYKCEVCGKAFNQFSNLTTHKRIHTAEKPYKCEECGKAFSRSSNLTKHKKIHIEKKPYKCEECGKAFKWSSKLTEHKITHTGEKPYKCEECGKAFNHFSILTKHKRIHTGEKPYKCEECGKAFTQSSNLTTHKKIHTGEKFYKCEECGKAFTQSSNLTTHKKIHTGGKPYKCEECGKAFNQFSTLTKHKIIHTEEKPYKCEECGKAFKWSSTLTKHKIIHTGEKPYKCEECGKAFKLSSTLSTHKIIHTGEKPYKCEKCGKAFNRSSNLIEHKKIHTGEQPYKCEECGKAFNYSSHLNTHKRIHTKEQPYKCKECGKAFNQYSNLTTHNKIHTGEKLYKPEDVTVILTTPQTFSNIK

SEQ ID NO: 23784 - protein, 440 aa, Artificial Sequence
  Synthetic polypeptide
DRARWLTPVIPAFWEAEAGGSQDQDIKTILANTVSNINQPLEITAISSPETSLKSSPVPYQDHDQPPVLKKERPLSQTNGAHYSPLTSDEEPGSEDEPSSARIERKIATISLESKSPPKTLENGGGLAGRKPAPAGEPVNSSKWKSTFSPISDIGLAKSADSPLQASSALSQNSLFTFRPALEEPSADAKLAAHPRKGFPGSLSGADGLSPGTNPANGCTFGGGLAADLSLHSFSDGASLPHKGPEAAGLSSPLSFPSQRGKEGSDANPFLSKRQLDGLAGLKGEGSRGKEAGEGGLPLCGPTDKTPLLSGKAAKARDREVDLKNGHNLFISAAAVPPGSLLSGPGLAPAASSAGGAASSAQTHRSFLGPFPPGPQFALGPMSLQANLGSVAGSSVLQSLFSSVPAAAGLVHVSSAATRLTNSHAMGSFSGVAGGTVGGN

SEQ ID NO: 23785 - protein, 43 aa, Artificial Sequence
  Synthetic polypeptide
SQHFGRPRRVDHKIRTSRPSWLTRSVTSTSPWRLQPSRPRRPP

SEQ ID NO: 23786 - protein, 3 aa, Artificial Sequence
  Synthetic polypeptide
HGQ

SEQ ID NO: 23787 - protein, 676 aa, Artificial Sequence
  Synthetic polypeptide
DRARWLTPVIPAFWEAEAGGSQDQDIKTILANTVSNINQPLEITAISSPETSLKSSPVPYQDHDQPPVLKKERPLSQTNGAHYSPLTSDEEPGSEDEPSSARIERKIATISLESKSPPKTLENGGGLAGRKPAPAGEPVNSSKWKSTFSPISDIGLAKSADSPLQASSALSQNSLFTFRPALEEPSADAKLAAHPRKGFPGSLSGADGLSPGTNPANGCTFGGGLAADLSLHSFSDGASLPHKGPEAAGLSSPLSFPSQRGKEGSDANPFLSKRQLDGLAGLKGEGSRGKEAGEGGLPLCGPTDKTPLLSGKAAKARDREVDLKNGHNLFISAAAVPPGSLLSGPGLAPAASSAGGAASSAQTHRSFLGPFPPGPQFALGPMSLQANLGSVAGSSVLQSLFSSVPAAAGLVHVSSAATRLTNSHAMGSFSGVAGGTVGEGHRAQGHQSITFSRGGHLLGVAARALARLWELVLGVFNHAVPSASAHPFGARVGRGAACGSATLGPSPLQAAASASASSFQAPASVETRPPPPPPPPPPPLPPPAHLGRSPAGPPVLHAPPPPNAALPPPPTLLASNPEPALLQSLASLPPNQAFLPPTSAASLPPANASLSIKLTSLPHKGARPSFTVHHQPLPRLALAQAAPGIPQASATGPSAVWVSLGMPPPYAAHLSGVKPR

SEQ ID NO: 23788 - protein, 7 aa, Artificial Sequence
  Synthetic polypeptide
ELEQRER

SEQ ID NO: 23789 - protein, 70 aa, Artificial Sequence
  Synthetic polypeptide
LWNWATGRGWSSLEVSEDRKMWESVELPRNLLNGCDQDADNDIENKIQAEMVSDGHEELAENWSKGSVDI

SEQ ID NO: 23790 - protein, 524 aa, Artificial Sequence
  Synthetic polypeptide
KIKSRLKWSQMDMRNLLRTGAKGALTFRDVAIEFSLEEWQCLDTEQQNLYRNVMLDNYRNLVFLGIAVSKPDLITCLEQEKEPWNLKTHDMVAKPPVICSHIAQDLWPEQGIKDYFQEVILRQYKKCRHENLLLRKGCKNVDEFKMHKKGYNRHNQCLTTSHSKIFQCDKYVKVFHKFSNSNRHKIRHTSKKPFKCKECGKLFCILSHLAQHKKIHTGEKSYKCEEYGKAFNESSNCTTHKRITEKKPYKCKECGKAFNWFSHFTTHKRIHTGEKPYQCEKCGKFFNQSTNLTTHKRIHTGEKPYKCEECGKAFNQSSNLTEHKKIHTKEQPYKCEKCGKAFKWSSTLTKHKRIHNGEKPYKCEECGKAFNRSSTLNRHKITHTGGKPYKYKECGKAFNQSSTLTIHKIIHTVEKFYKCEECGKAFSRISHLTTHKRIHTGEKPYKCEECGRAFNQSSTLTTHKRIHTGEKPYECEECGKAFNRSSTLTTHKIIHSGEKIYKCKECGKAFRRFSHLTRHKTIHT

SEQ ID NO: 23791 - protein, 120 aa, Artificial Sequence
  Synthetic polypeptide
KKNTFSLLGLLTFRDVAIEFSPEEWQCLDTAQQNLYRNVMLENYRNLAFLGIALSKPDLITYLEQGKEPWNMKQHEMVDEPTDGVLLHRQAGVQWRDLVPLLTATSASPIEVILLSQPPE

SEQ ID NO: 23792 - protein, 32 aa, Artificial Sequence
  Synthetic polypeptide
IPAKPAMIKTSKNNTCWRGCGEKRILFHCWDC

SEQ ID NO: 23793 - protein, 27 aa, Artificial Sequence
  Synthetic polypeptide
LKHQKIIHVGVAVVKKEYFFTAGTVDI

SEQ ID NO: 23794 - protein, 1189 aa, Artificial Sequence
  Synthetic polypeptide
KKNTFSLLGLLTFRDVAIEFSPEEWQCLDTAQQNLYRNVMLENYRNLAFLGIALSKPDLITYLEQGKEPWNMKQHEMVDEPTGICPHFPQDFWPEQSMEDSFQKVLLRKYEKCGHENLQLRKGCKSVDECKVHKEGYNKLNQCLTTAQSKVFQCGKYLKVFYKFLNSNRHTIRHTGKKCFKCKKCVKSFCIRLHKTQHKCVYITEKSCKCKECEKTFHWSSTLTNHKEIHTEDKPYKCEECGKAFKQLSTLTTHKIICAKEKIYKCEECGKAFLWSSTLTRHKRIHTGEKPYKCEECGKAFSHSSTLAKHKRIHTGEKPYKCEECGKAFSRSSTLAKHKRIHTGEKPYKCKECGKAFSNSSTLANHKITHTEEKPYKCKECDKAFKRLSTLTKHKIIHAGEKLYKCEECGKAFNRSSNLTIHKFIHTGEKPYKCEECGKAFNWSSSLTKHKRFHTREKPFKCKECGKAFIWSSTLTRHKRIHTGEKPYKCEECGKAFRQSSTLTKHKIIHTGEKPYKFEECGKAFRQSLTLNKHKIIHSREKPYKCKECGKAFKQFSTLTTHKIIHAGKKLYKCEECGKAFNHSSSLSTHKIIHTGEKSYKCEECGKAFLWSSTLRRHKRIHTGEKPYKCEECGKAFSHSSALAKHKRIHTGEKPYKCKECGKAFSNSSTLANHKITHTEEKPYKCKECDKTFKRLSTLTKHKIIHAGEKLYKCEECGKAFNRSSNLTIHKFIHTGEKPYKCEECGKAFNWSSSLTKHKRIHTREKPFKCKECGKAFIWSSTLTRHKRIHTGEKPYKCEECGKAFSRSSTLTKHKTIHTGEKPYKCKECGKAFKHSSALAKHKIIHAGEKLYKCEECGKAFNQSSNLTTHKIIHTKEKPSKSEECDKAFIWSSTLTEHKRIHTREKTYKCEECGKAFSQPSHLTTHKRMHTGEKPYKCEECGKAFSQSSTLTTHKIIHTGEKPYKCEECGKAFRKSSTLTEHKIIHTGEKPYKCEECGKAFSQSSTLTRHTRMHTGEKPYKCEECGKAFNRSSKLTTHKIIHTGEKPYKCEECGKAFISSSTLNGHKRIHTREKPYKCEECGKAFSQSSTLTRHKRLHTGEKPYKCGECGKAFKESSALTKHKIIHTGEKPYKCEKCGKAFNQSSILTNHKKIHTITPVIPLLWEAEAGGSRGQEMETILANTVKPLLY

SEQ ID NO: 23795 - protein, 1157 aa, Artificial Sequence
  Synthetic polypeptide
KKNTFSLLGLLTFRDVAIEFSPEEWQCLDTAQQNLYRNVMLENYRNLAFLGICPHFPQDFWPEQSMEDSFQKVLLRKYEKCGHENLQLRKGCKSVDECKVHKEGYNKLNQCLTTAQSKVFQCGKYLKVFYKFLNSNRHTIRHTGKKCFKCKKCVKSFCIRLHKTQHKCVYITEKSCKCKECEKTFHWSSTLTNHKEIHTEDKPYKCEECGKAFKQLSTLTTHKIICAKEKIYKCEECGKAFLWSSTLTRHKRIHTGEKPYKCEECGKAFSHSSTLAKHKRIHTGEKPYKCEECGKAFSRSSTLAKHKRIHTGEKPYKCKECGKAFSNSSTLANHKITHTEEKPYKCKECDKAFKRLSTLTKHKIIHAGEKLYKCEECGKAFNRSSNLTIHKFIHTGEKPYKCEECGKAFNWSSSLTKHKRFHTREKPFKCKECGKAFIWSSTLTRHKRIHTGEKPYKCEECGKAFRQSSTLTKHKIIHTGEKPYKFEECGKAFRQSLTLNKHKIIHSREKPYKCKECGKAFKQFSTLTTHKIIHAGKKLYKCEECGKAFNHSSSLSTHKIIHTGEKSYKCEECGKAFLWSSTLRRHKRIHTGEKPYKCEECGKAFSHSSALAKHKRIHTGEKPYKCKECGKAFSNSSTLANHKITHTEEKPYKCKECDKTFKRLSTLTKHKIIHAGEKLYKCEECGKAFNRSSNLTIHKFIHTGEKPYKCEECGKAFNWSSSLTKHKRIHTREKPFKCKECGKAFIWSSTLTRHKRIHTGEKPYKCEECGKAFSRSSTLTKHKTIHTGEKPYKCKECGKAFKHSSALAKHKIIHAGEKLYKCEECGKAFNQSSNLTTHKIIHTKEKPSKSEECDKAFIWSSTLTEHKRIHTREKTYKCEECGKAFSQPSHLTTHKRMHTGEKPYKCEECGKAFSQSSTLTTHKIIHTGEKPYKCEECGKAFRKSSTLTEHKIIHTGEKPYKCEECGKAFSQSSTLTRHTRMHTGEKPYKCEECGKAFNRSSKLTTHKIIHTGEKPYKCEECGKAFISSSTLNGHKRIHTREKPYKCEECGKAFSQSSTLTRHKRLHTGEKPYKCGECGKAFKESSALTKHKIIHTGEKPYKCEKCGKAFNQSSILTNHKKIHTITPVIPLLWEAEAGGSRGQEMETILANTVKPLLY

SEQ ID NO: 23796 - protein, 52 aa, Artificial Sequence
  Synthetic polypeptide
GQVQWLTPVTPALWEAEARSGVLAAGTSPPGPGRPPAAGKMPEQSNDYRVVV

SEQ ID NO: 23797 - protein, 43 aa, Artificial Sequence
  Synthetic polypeptide
PQHFGRPRLGLGFLQLAPALPAPAAHPPRGRCRNRVTITAWWC

SEQ ID NO: 23798 - protein, 44 aa, Artificial Sequence
  Synthetic polypeptide
PGAVAHACNPSTLGGRGSVWGSCSWHQPSRPRPPTRRGEDAGTE

SEQ ID NO: 23799 - protein, 58 aa, Artificial Sequence
  Synthetic polypeptide
AGCGVSHLESQHFGSPRREEHLRLGLGFLQLAPALPAPAAHPPRGRCRNRVTITAWWC

SEQ ID NO: 23800 - protein, 57 aa, Artificial Sequence
  Synthetic polypeptide
WMRCLTPGIPALWEPEARGAPEARSGVLAAGTSPPGPGRPPAAGKMPEQSNDYRVVV

SEQ ID NO: 23801 - protein, 15 aa, Artificial Sequence
  Synthetic polypeptide
AYIFKAKRADESGKL

SEQ ID NO: 23802 - protein, 221 aa, Artificial Sequence
  Synthetic polypeptide
LIFLKRNEQMKVENFEAAVHFYGKAIELNPANAVYFCNRAAAYSKLGNYAGAVQDCERAICIDPAYSKAYGRMGLALSSLNKHVEAVAYYKKALELDPDNETYKSNLKIAELKLREAPSPTGGVGSFDIAGLLNNPGFMSMASNLMNNPQIQQLMSGMISGGNNPLGTPGTSPSQNDLASLIQAGQQFAQQMQQQNPELIEQLRSQIRSRTPSASNDDQQE

SEQ ID NO: 23803 - protein, 5 aa, Artificial Sequence
  Synthetic polypeptide
SETSR

SEQ ID NO: 23804 - protein, 70 aa, Artificial Sequence
  Synthetic polypeptide
LIFLKRNEQMKVENFEAAVHFYGKAIELNPANAVYFCNRAAAYSKLGNYAGAVQDCERAICIDPAYSKAY

SEQ ID NO: 23805 - protein, 83 aa, Artificial Sequence
  Synthetic polypeptide
FSAGVIVLPLGTLDGVWGHLWLSQLGGAPGMEWMEAGDAAQHPAVPRTAPPQKTIRPQWPQCRQRDTLPVQETWRTQHLRALW

SEQ ID NO: 23806 - protein, 105 aa, Artificial Sequence
  Synthetic polypeptide
LCYLWGHWTVSGDICGCHSWGALLVWNGWRPGTLLSTLQCPGQLHPRKRSGPNGHSADRETPCLCRRHGGRSISVLCGKRPAVGPECPADRGAHQGAHRADQARV

SEQ ID NO: 23807 - protein, 753 aa, Artificial Sequence
  Synthetic polypeptide
MILSWGDCATSGDTGRCLGTFVVVTVGGRSWYGMDGGRGRCSAPCSAQDSSTPENDPAPMATVQTERHPACAGDMADAASPCSVVNDLRWDLSAQQIEERTRELIEQTKRVYDQVGTQEFEDVSYESTLKALADVEVTYTVQRNILDFPQHVSPSKDIRTASTEADKKLSEFDVEMSMREDVYQRIVWLQEKVQKDSLRPEAARYLERLIKLGRRNGLHLPRETQENIKRIKKKLSLLCIDFNKNLNEDTTFLPFTLQELGGLPEDFLNSLEKMEDGKLKVTLKYPHYFPLLKKCHVPETRRKVEEAFNCRCKEENCAILKELVTLRAQKSRLLGFHTHADYVLEMNMAKTSQTVATFLDELAQKLKPLGEQERAVILELKRAECERRGLPFDGRIRAWDMRYYMNQVEETRYCVDQNLLKEYFPVQVVTHGLLGIYQELLGLAFHHEEGASAWHEDVRLYTARDAASGEVVGKFYLDLYPREGKYGHAACFGLQPGCLRQDGSRQIAIAAMVANFTKPTADAPSLLQHDEVETYFHEFGHVMHQLCSQAEFAMFSGTHVERDFVEAPSQMLENWVWEQEPLLRMSRHYRTGSAVPRELLEKLIESRQANTGLFNLRQIVLAKVDQALHTQTDADPAEEYARLCQEILGVPATPGTNMPATFGHLAGGYDAQYYGYLWSEVYSMDMFHTRFKQEGVLNSKVGMDYRSCILRPGGSEDASAMLRRFLGRDPKQDAFLLSKGLQVGGCEPEPQVC

SEQ ID NO: 23808 - protein, 221 aa, Artificial Sequence
  Synthetic polypeptide
GQAWWSTPVIPALWEAEAEFAMFSGTHVERDFVEAPSQMLENWVWEQEPLLRMSRHYRTGSAVPRELLEKLIESRQANTGLFNLRQIVLAKVDQALHTQTDADPAEEYARLCQEILGVPATPGTNMPATFGHLAGGYDAQYYGYLWSEVYSMDMFHTRFKQEGVLNSKVGMDYRSCILRPGGSEDASAMLRRFLGRDPKQDAFLLSKGLQVGGCEPEPQVC

SEQ ID NO: 23809 - protein, 155 aa, Artificial Sequence
  Synthetic polypeptide
SQHFGRPRRSSPCSAGPTWSGTLWRRRRRCWRTGCGSRSRCCGCRGTTAQAAPCPGSSWRSSLSPGRPTQASSTCARSSSPRWTRPCTRRRTQTPPRSMRGSARRSSGSRPRQEPTCLQPSAIWQVATTPSTTGTCGARCIPWTCSTRASSRRVS

SEQ ID NO: 23810 - protein, 71 aa, Artificial Sequence
  Synthetic polypeptide
PGVVVHACNPSTLGGRGGVRHVQRDPRGAGLCGGAVADAGELGVGAGAAAADVAALPHRQRRAPGAPGEAH

SEQ ID NO: 23811 - protein, 112 aa, Artificial Sequence
  Synthetic polypeptide
GQAWWSTPVIPALWEAEAEFAMFSGTHVERDFVEAPSQMLENWVWEQEPLLRMSRHYRTGSAVPRELLEKLIESRQANTGLFNLRQIGLVFVALTRLLSGKRPLSGDGSSLK

SEQ ID NO: 23812 - protein, 84 aa, Artificial Sequence
  Synthetic polypeptide
SQHFGRPRRSSPCSAGPTWSGTLWRRRRRCWRTGCGSRSRCCGCRGTTAQAAPCPGSSWRSSLSPGRPTQASSTCARSAWSLLH

SEQ ID NO: 23813 - protein, 209 aa, Artificial Sequence
  Synthetic polypeptide
GQAWWSTPVIPALWEAEAEFAMFSGTHVERDFVEAPSQMLENWVWEQEPLLRMSRHYRTGSAVPRELLEKLIESRQANTGLFNLRQIVLAKVDQALHTQTDADPAEEYARLCQEILGVPATPGGYDAQYYGYLWSEVYSMDMFHTRFKQEGVLNSKVGMDYRSCILRPGGSEDASAMLRRFLGRDPKQDAFLLSKGLQVGGCEPEPQVC

SEQ ID NO: 23814 - protein, 143 aa, Artificial Sequence
  Synthetic polypeptide
SQHFGRPRRSSPCSAGPTWSGTLWRRRRRCWRTGCGSRSRCCGCRGTTAQAAPCPGSSWRSSLSPGRPTQASSTCARSSSPRWTRPCTRRRTQTPPRSMRGSARRSSGSRPRQVATTPSTTGTCGARCIPWTCSTRASSRRVS

SEQ ID NO: 23815 - protein, 204 aa, Artificial Sequence
  Synthetic polypeptide
GQAWWSTPVIPALWEAEAEFAMFSGTHVERDFVEAPSQMLENWVWEQEPLLRMSRHYRTGSAVPRELLEKLIESRQANTGLFNLRQIVLAKVDQALHTQTDADPAEEYARLCQEILGVPATPGTNMPATFGHLAGGYDAQYYGYLWSEVYSMDMFHTRFKQEGVLNSKEAPHWPLRPRAVSAGSSVSSHTSPSGICVIGLRAMG

SEQ ID NO: 23816 - protein, 102 aa, Artificial Sequence
  Synthetic polypeptide
GQAWWSTPVIPALWEAEASSTCARSSSPRWTRPCTRRRTQTPPRSMRGSARRSSGSRPRQEPTCLQPSAIWQVATTPSTTGTCGARCIPWTCSTRASSRRVS

SEQ ID NO: 23817 - protein, 124 aa, Artificial Sequence
  Synthetic polypeptide
SQHFGRPRPLQPAPDRPRQGGPGPAHADGRRPRRGVCAALPGDPRGPGHARNQHACNLRPSGRWLRRPVLRVPVERGVFHGHVPHALQAGGCPEQQGWHGLQKLHPETRRFRGCQRHAEALPGP

SEQ ID NO: 23818 - protein, 158 aa, Artificial Sequence
  Synthetic polypeptide
PGVVVHACNPSTLGGRGLFNLRQIVLAKVDQALHTQTDADPAEEYARLCQEILGVPATPGTNMPATFGHLAGGYDAQYYGYLWSEVYSMDMFHTRFKQEGVLNSKVGMDYRSCILRPGGSEDASAMLRRFLGRDPKQDAFLLSKGLQVGGCEPEPQVC

SEQ ID NO: 23819 - protein, 31 aa, Artificial Sequence
  Synthetic polypeptide
GQAWWSTPVIPALWEAEASSTCARSAWSLLH

SEQ ID NO: 23820 - protein, 41 aa, Artificial Sequence
  Synthetic polypeptide
SQHFGRPRPLQPAPDRPGLCCTNTSPLWETSLVRRRLFFEM

SEQ ID NO: 23821 - protein, 49 aa, Artificial Sequence
  Synthetic polypeptide
PGVVVHACNPSTLGGRGLFNLRQIGLVFVALTRLLSGKRPLSGDGSSLK

SEQ ID NO: 23822 - protein, 90 aa, Artificial Sequence
  Synthetic polypeptide
GQAWWSTPVIPALWEAEASSTCARSSSPRWTRPCTRRRTQTPPRSMRGSARRSSGSRPRQVATTPSTTGTCGARCIPWTCSTRASSRRVS

SEQ ID NO: 23823 - protein, 112 aa, Artificial Sequence
  Synthetic polypeptide
SQHFGRPRPLQPAPDRPRQGGPGPAHADGRRPRRGVCAALPGDPRGPGHARWLRRPVLRVPVERGVFHGHVPHALQAGGCPEQQGWHGLQKLHPETRRFRGCQRHAEALPGP

SEQ ID NO: 23824 - protein, 146 aa, Artificial Sequence
  Synthetic polypeptide
PGVVVHACNPSTLGGRGLFNLRQIVLAKVDQALHTQTDADPAEEYARLCQEILGVPATPGGYDAQYYGYLWSEVYSMDMFHTRFKQEGVLNSKVGMDYRSCILRPGGSEDASAMLRRFLGRDPKQDAFLLSKGLQVGGCEPEPQVC

SEQ ID NO: 23825 - protein, 133 aa, Artificial Sequence
  Synthetic polypeptide
SQHFGRPRPLQPAPDRPRQGGPGPAHADGRRPRRGVCAALPGDPRGPGHARNQHACNLRPSGRWLRRPVLRVPVERGVFHGHVPHALQAGGCPEQQGSSTLAPQASGCECWELRVFPYESFRDLRDRPQSHGL

SEQ ID NO: 23826 - protein, 141 aa, Artificial Sequence
  Synthetic polypeptide
PGVVVHACNPSTLGGRGLFNLRQIVLAKVDQALHTQTDADPAEEYARLCQEILGVPATPGTNMPATFGHLAGGYDAQYYGYLWSEVYSMDMFHTRFKQEGVLNSKEAPHWPLRPRAVSAGSSVSSHTSPSGICVIGLRAMG

SEQ ID NO: 23827 - protein, 100 aa, Artificial Sequence
  Synthetic polypeptide
SQHFGRPRPLQPAPDRPRQGGPGPAHADGRRPRRGVCAALPGDPRGPGHARNQHACNLRPSGRWLRRPVLRVPVERGVFHGHVPHALQAGGCPEQQVSSL

SEQ ID NO: 23828 - protein, 216 aa, Artificial Sequence
  Synthetic polypeptide
PGVVVHACNPSTLGGRGLFNLRQIVLAKVDQALHTQTDADPAEEYARLCQEILGVPATPGTNMPATFGHLAGGYDAQYYGYLWSEVYSMDMFHTRFKQEGVLNSKFPHYEVRPLRHVSLCLPLTWCDPGSGQPPESLTRNRWLPALRAGPALPGCNIALGSLQVGMDYRSCILRPGGSEDASAMLRRFLGRDPKQDAFLLSKGLQVGGCEPEPQVC

SEQ ID NO: 23829 - protein, 118 aa, Artificial Sequence
  Synthetic polypeptide
SQHFGRPRPLQPAPDRPRQGGPGPAHADGRRPRRGVCAALPGDPRGPGHARNQHACNLRPSGRWLRRPVLRVPVERGVFHGHVPHALQAGGCPEQQGWHGLQKLHPETRRFRGCQRHA

SEQ ID NO: 23830 - protein, 127 aa, Artificial Sequence
  Synthetic polypeptide
PGVVVHACNPSTLGGRGLFNLRQIVLAKVDQALHTQTDADPAEEYARLCQEILGVPATPGTNMPATFGHLAGGYDAQYYGYLWSEVYSMDMFHTRFKQEGVLNSKVGMDYRSCILRPGGSEDASAML

SEQ ID NO: 23831 - protein, 42 aa, Artificial Sequence
  Synthetic polypeptide
TEITLYCSPAAQDPAGCGRTSQADRKRLTDCGELQPTPGFPV

SEQ ID NO: 23832 - protein, 575 aa, Artificial Sequence
  Synthetic polypeptide
GQELETSLANIVETLSLLKIQKLAGHGGRCLYSQLLGRLRQENRLSPGGRGCGELRSHCTAAQLHKIQQDVAEHHKQIGNVLQIVESCSQLQGFQSEEVSPAEPASPGTPQQVKDKTLQESSFEDIMATRSSDWLRRPLGEDNQPETQLFWDKEPWFWHDTLTEQLWRIFAGVHDEKAKPRDRQQAPGLGQESKAPGSCDPGTDPCPEDASTPRPPEASSSPPEGSQDRNTSWGVVQEPPGRASRFLQSISWDPEDFEDAWKRPDALPGQSKRLAVPCKLEKMRILAHGELVLATAISSFTRHVFTCGRRGIKVWSLTGQVAEDRFPESHLPIQTPGAFLRTCLLSSNSRSLLTGGYNLASVSVWDLAAPSLHVKEQLPCAGLNCQALDANLDANLAFASFTSGVVRIWDLRDQSVVRDLKGYPDGVKSIVVKGYNIWTGGPDACLRCWDQRTIMKPLEYQFKSQIMSLSHSPQEDWVLLGMANGQQWLQSTSGSQRHMVGQKDSVILSVKFSPFGQWWASVGMDDFLGVYSMPAGTKVFEVPEMSPVTCCDVSSNNRLVVTGSGEHASVYQITY

SEQ ID NO: 23833 - protein, 22 aa, Artificial Sequence
  Synthetic polypeptide
DHTVLQPSCTRSSRMWQNITSR

SEQ ID NO: 23834 - protein, 157 aa, Artificial Sequence
  Synthetic polypeptide
GQELETSLANIVETLSLLKIQKLAGHGGRCLYSQLLGRLRQENRLSPGGRGCGELRSHCTAAQLHKIQQDVAEHHKQIGNVLQIVESCSQLQGFQSEEVSPAEPASPGTPQQVKDKTLQESSFEDIMATRSSDWLRRPLGEDNQPETQLFWDKEPWF

SEQ ID NO: 23835 - protein, 687 aa, Artificial Sequence
  Synthetic polypeptide
VTVDSGYYEMSYGLNIEMHKQAEIVKRLSGICAQIIPFLTQEHQQQVLQAVERAKQVTVGELNSLIGQQLQPLSHHAPPVPLTPRPAGLVGGSATGLLALSGALAAQAQLAAAVKEDRAGVEAEGSRVERAPSRSASPSPPESLVEEERPSGPGGGGKQRADEKEPSGPYESDEDKSDYNLVVDEDQPSEPPSPATTPCGKVPICIPARRDLVDSPASLASSLGSPLPRAKELILNDLPASTPASKSCDSSPPQDASTPGPSSASHLCQLAAKPAPSTDSVALRSPLTLSSPFTTSFSLGSHSTLNGDLSVPSSYVSLHLSPQVSSSVVYGRSPVMAFESHPHLRGSSVSSSLPSIPGGKPAYSFHVSADGQMQPVPFPSDALVGAGIPRHARQLHTLAHGEVVCAVTISGSTQHVYTGGKGCVKVWDVGQPGAKTPVAQLDCLNRDNYIRSCKLLPDGRSLIVGGEASTLSIWDLAAPTPRIKAELTSSAPACYALAVSPDAKVCFSCCSDGNIVVWDLQNQTMVRQFQGHTDGASCIDISDYGTRLWTGGLDNTVRCWDLREGRQLQQHDFSSQIFSLGHCPNQDWLAVGMESSNVEILHVRKPEKYQLHLHESCVLSLKFASCGRWFVSTGKDNLLNAWRTPYGASIFQSKESSSVLSCDISRNNKYIVTGSGDKKATVYEVVY

SEQ ID NO: 23836 - protein, 25 aa, Artificial Sequence
  Synthetic polypeptide
ESRWTLGIMRCRTGSTLKCISRRRL

SEQ ID NO: 23837 - protein, 8 aa, Artificial Sequence
  Synthetic polypeptide
SHGGLWVL

SEQ ID NO: 23838 - protein, 620 aa, Artificial Sequence
  Synthetic polypeptide
VTVDSGYYEMSYGLNIEMHKQAEIVKRLSGICAQIIPFLTQEHQQQVLQAVERAKQVTVGELNSLIGSASPSPPESLVEEERPSGPGGGGKQRADEKEPSGPYESDEDKSDYNLVVDEDQPSEPPSPATTPCGKVPICIPARRDLVDSPASLASSLGSPLPRAKELILNDLPASTPASKSCDSSPPQDASTPGPSSASHLCQLAAKPAPSTDSVALRSPLTLSSPFTTSFSLGSHSTLNGDLSVPSSYVSLHLSPQVSSSVVYGRSPVMAFESHPHLRGSSVSSSLPSIPGGKPAYSFHVSADGQMQPVPFPSDALVGAGIPRHARQLHTLAHGEVVCAVTISGSTQHVYTGGKGCVKVWDVGQPGAKTPVAQLDCLNRDNYIRSCKLLPDGRSLIVGGEASTLSIWDLAAPTPRIKAELTSSAPACYALAVSPDAKVCFSCCSDGNIVVWDLQNQTMVRQFQGHTDGASCIDISDYGTRLWTGGLDNTVRCWDLREGRQLQQHDFSSQIFSLGHCPNQDWLAVGMESSNVEILHVRKPEKYQLHLHESCVLSLKFASCGRWFVSTGKDNLLNAWRTPYGASIFQSKESSSVLSCDISRNNKYIVTGSGDKKATVYEVVY

SEQ ID NO: 23839 - protein, 637 aa, Artificial Sequence
  Synthetic polypeptide
VTVDSGYYEMSYGLNIEMHKQAEIVKRLSGICAQIIPFLTQEHQQQVLQAVERAKQVTVGELNSLIGQQQLQPLSHHAPPVPLTPRPAGLVGGSATGLLALSGALAAQAQLAAAVKEDRAGVEAEGSRVERAPSRSASPSPPESLVEEERPSGPGGGGKQRADEKEPSGPYESDEDKSDYNLVVDEDQPSEPPSPATTPCGKVPICIPARRDLVDSPASLASSLGSPLPRAKELILNDLPASTPASKSCDSSPPQDASTPGPSSASHLCQLAAKPAPSTDSVALRSPLTLSSPFTTSFSLGSHSTLNGDLSVPSSYVSLHLSPQVSSSVVYGRSPVMAFESHPHLRGSSVSSSLPSIPGGKPAYSFHVSADGQMQPVPFPSDALVGAGIPRHARQLHTLAHGEVVCAVTISGSTQHVYTGGKGCVKVWDVGQPGAKTPVAQLDCLNRDNYIRSCKLLPDGRSLIVGGEASTLSIWDLAAPTPRIKAELTSSAPACYALAVSPDAKVCFSCCSDGNIVVWDLQNQTMVRQFQGHTDGASCIDISDYGTRLWTGGLDNTVRCWDLREGRQLQQHDFSSQIFSLGHCPNQDWLAVGMESSNVEILHVRKPEKYQLHLHESCVLSLKFASCVQGVVLSPEL

SEQ ID NO: 23840 - protein, 118 aa, Artificial Sequence
  Synthetic polypeptide
VTVDSGYYEMSYGLNIEMHKQAEIVKRLSGICAQIIPFLTQEHQQQVLQAVERAKQVTVGELNSLIGQQLQPLSHHAPPVPLTPPLPRNRTSHLLSGQRLHTFPCCMWGPMGRGPRWK

SEQ ID NO: 23841 - protein, 688 aa, Artificial Sequence
  Synthetic polypeptide
VTVDSGYYEMSYGLNIEMHKQAEIVKRLSGICAQIIPFLTQEHQQQVLQAVERAKQVTVGELNSLIGQQQLQPLSHHAPPVPLTPRPAGLVGGSATGLLALSGALAAQAQLAAAVKEDRAGVEAEGSRVERAPSRSASPSPPESLVEEERPSGPGGGGKQRADEKEPSGPYESDEDKSDYNLVVDEDQPSEPPSPATTPCGKVPICIPARRDLVDSPASLASSLGSPLPRAKELILNDLPASTPASKSCDSSPPQDASTPGPSSASHLCQLAAKPAPSTDSVALRSPLTLSSPFTTSFSLGSHSTLNGDLSVPSSYVSLHLSPQVSSSVVYGRSPVMAFESHPHLRGSSVSSSLPSIPGGKPAYSFHVSADGQMQPVPFPSDALVGAGIPRHARQLHTLAHGEVVCAVTISGSTQHVYTGGKGCVKVWDVGQPGAKTPVAQLDCLNRDNYIRSCKLLPDGRSLIVGGEASTLSIWDLAAPTPRIKAELTSSAPACYALAVSPDAKVCFSCCSDGNIVVWDLQNQTMVRQFQGHTDGASCIDISDYGTRLWTGGLDNTVRCWDLREGRQLQQHDFSSQIFSLGHCPNQDWLAVGMESSNVEILHVRKPEKYQLHLHESCVLSLKFASCGRWFVSTGKDNLLNAWRTPYGASIFQSKESSSVLSCDISRNNKYIVTGSGDKKATVYEVVY

SEQ ID NO: 23842 - protein, 81 aa, Artificial Sequence
  Synthetic polypeptide
VTVDSGYYEMSYGLNIEMHKQSASPSPPESLVEEERPSGPGGGGKQRADEKEPSGPYESDEDKSDYNLVVDEDQPSEPPSP

SEQ ID NO: 23843 - protein, 82 aa, Artificial Sequence
  Synthetic polypeptide
ESRWTLGIMRCRTGSTLKCISRVHLPRPLRVSWRRSDRVALVVAGSREQMRRSHQDLMKATKTRVITIWWWTRTNPQSPPAR

SEQ ID NO: 23844 - protein, 84 aa, Artificial Sequence
  Synthetic polypeptide
VTVDSGYYEMSYGLNIEMHKQAEIVKRLSGICAQIIPFLTQESASPSPPESLVEEERPSGPGGGGKQRADEKEPSGPYESDEDK

SEQ ID NO: 23845 - protein, 122 aa, Artificial Sequence
  Synthetic polypeptide
VTVDSGYYEMSYGLNIEMHKQAEIVKRLSGICAQIIPFLTQEHQQQVLQAVERAKQVTVGELNSLIGQQQLQPLSHHAPPVPLTPRPAGLVGGSATGLLALSGALAAQAQLAAAVKEDRAGV

SEQ ID NO: 23846 - protein, 188 aa, Artificial Sequence
  Synthetic polypeptide
MFLSPIIHNCKKLEATKILFSRCSLCGYVCSHPPSLKSHMWKHASDQNYNYEQVNKAINDAISQSGRVLGKSPGKTQLKSSEESADPVTGSSENAVSSSELMSQTPSEVLGTNENEKLSPTSNTSYSLEKISSLAPPSMEYCVLLFCCCICGFESTSKENLLDHMKEHEGEIVNIILNKDHNTALNTN

SEQ ID NO: 23847 - protein, 38 aa, Artificial Sequence
  Synthetic polypeptide
AHECSYHQLFIIAKNWKQPRYCSADALCVGMCVAILLL

SEQ ID NO: 23848 - protein, 21 aa, Artificial Sequence
  Synthetic polypeptide
LQKTGSNQDIVQQMLSVWVCV

SEQ ID NO: 23849 - protein, 13 aa, Artificial Sequence
  Synthetic polypeptide
ARGWRRFLPVGLV

SEQ ID NO: 23850 - protein, 80 aa, Artificial Sequence
  Synthetic polypeptide
PEAGEGSCQWAWCERDQPGRLLPAACRRPARPGGPHPPPAEARGQRRCQERRPSRPAPPGLPAGPLSGGEVSVRFECKTQ

SEQ ID NO: 23851 - protein, 326 aa, Artificial Sequence
  Synthetic polypeptide
QRLAKVPASGLGVNVTSQDGSSPLHVAALHGRADLIPLLLKHGANAGARNADQAVPLHLACQQGHFQVVKCLLDSNAKPNKKDLSGNTPLIYACSGGHHELVALLLQHGASINASNNKGNTALHEAVIEKHVFVVELLLLHGASVQVLNKRQRTAVDCAEQNSKIMELLQVVPSCVASLDDVAETDRKEYVTVKIRKKWNSKLYDLPDEPFTRQFYFVHSAGQFKGKTSREIMARDRSVPNLTEGSLHEPGRQSVTLRQNNLPAQSGSHAAEKGNSDWPERPGLTQTGPGHRRMLRRHTVEDAVVSQGPEAAGPLSTPQEVSASRS

SEQ ID NO: 23852 - protein, 31 aa, Artificial Sequence
  Synthetic polypeptide
SQHFGRLRRADHEVRRSRPSWLAREPGDHVC

SEQ ID NO: 23853 - protein, 750 aa, Artificial Sequence
  Synthetic polypeptide
HVNLETMCADDLLSVLLYLLVKTEIPNWMANLSYIKNFRFSSLAKDELGYCLTSFEAAIEYIRQGSLSAKPPESEGFGDRLFLKQRMSLLSQMTSSPTDCLFKHIASGNQKEVERLLSQEDHDKDTVQKMCHPLCFCDDCEKLVSGRLNDPSVVTPFSRDDRGHTPLHVAAVCGQASLIDLLVSKGAMVNATDYHGATPLHLACQKGYQSVTLLLLHYKASAEVQDNNGNTPLHLACTYGHEDCVKALVYYDVESCRLDIGNEKGDTPLHIAARWGYQGVIETLLQNGASTEIQNRLKETPLKCALNSKILSVMEAYHLSFERRQKSSEAPVQSPQRSVDSISQESSTSSFSSMSASSRQEETKKDYREVEKLLRAVADGDLEMVRYLLEWTEEDLEDAEDTVSAADPEFCHPLCQCPKCAPAQKRLAKVPASGLGVNVTSQDGSSPLHVAALHGRADLIPLLLKHGANAGARNADQAVPLHLACQQGHFQVVKCLLDSNAKPNKKDLSGNTPLIYACSGGHHELVALLLQHGASINASNNKGNTALHEAVIEKHVFVVELLLLHGASVQVLNKRQRTAVDCAEQNSKIMELLQVVPSCVASLDDVAETDRKEYVTVKIRKKWNSKLYDLPDEPFTRQFYFVHSAGQFKGKTSREIMARDRSVPNLTEGSLHEPGRQSVTLRQNNLPAQSGSHAAEKGNSDWPERPGLTQTGPGHRRMLRRHTVEDAVVSQGPEAAGPLSTPQEVSASRS

SEQ ID NO: 23854 - protein, 89 aa, Artificial Sequence
  Synthetic polypeptide
HVNLETMCADDLLSVLLYLLVKTEIPNWMANLSYIKNFRFSSLAKDELGYCLTSFEAAIEYIRQGSLSAKPPVRSHPCPGLPLWASWFP

SEQ ID NO: 23855 - protein, 89 aa, Artificial Sequence
  Synthetic polypeptide
SPEHNKSATYSVGMQKTYSMICLAIDDDDKTDKTKKISKKLSFLSWGTNKNRQKSASTLCLPSVGAARPQVKKKLPSPFSLLNSDSSWY

SEQ ID NO: 23856 - protein, 19 aa, Artificial Sequence
  Synthetic polypeptide
HLSIIRVPHTPWECRKRTP

SEQ ID NO: 23857 - protein, 30 aa, Artificial Sequence
  Synthetic polypeptide
RPAWLKWILSWNITVKMAIYMKMKLQILWI

SEQ ID NO: 23858 - protein, 9 aa, Artificial Sequence
  Synthetic polypeptide
NGFYPGTLQ

SEQ ID NO: 23859 - protein, 567 aa, Artificial Sequence
  Synthetic polypeptide
AQELKTSLAKMDFILEHYSEDGYLYEDEIADLMDLRQACRTPSRDEAGVELLMTYFIQLGFVESRFFPPTRQMGLLFTWYDSLTGVPVSQQNLLLEKASVLFNTGALYTQIGTRCDRQTQAGLESAIDAFQRAAGVLNYLKDTFTHTPSYDMSPAMLSVLVKMMLAQAQESVFEKISLPGIRNEFFMLVKVAQEAAKVGEVYQQLHAAMSQAPVKENIPYSWASLACVKAHHYAALAHYFTAILLIDHQVKPGTDLDHQEKCLSQLYDHMPEGLTPLATLKNDQQRRQLGKSHLRRAMAHHEESVREASLCKKLRSIEVLQKVLCAAQERSRLTYAQHQEEDDLLNLIDAPSVVAKTEQEVDIILPQFSKLTVTDFFQKLGPLSVFSANKRWTPPRSIRFTAEEGDLGFTLRGNAPVQVHFLDPYCSASVAGAREGDYIVSIQLVDCKWLTLSEVMKLLKSFGEDEIEMKVVSLLDSTSSMHNKSATYSVGMQKTYSMICLAIDDDDKTDKTKKISKKLSFLSWGTNKNRQKSASTLCLPSVGAARPQVKKKLPSPFSLLNSDSSWY

SEQ ID NO: 23860 - protein, 35 aa, Artificial Sequence
  Synthetic polypeptide
AQELKTSLAKMDFILEHYSEDGYLYEDEIADLMDL

SEQ ID NO: 23861 - protein, 4 aa, Artificial Sequence
  Synthetic polypeptide
YHGL

SEQ ID NO: 23862 - protein, 674 aa, Artificial Sequence
  Synthetic polypeptide
GREFEASLDIMGCNPLAQTGRSKLQNQRAALNQQILKAVRMRTGAENLLKVATNSKVREQVRLELSFVNSDLQMLKEELEGLNISVGVYQNTEEAFTIPLIPLGLKETKDVDFAVVLKDFILEHYSEDGYLYEDEIADLMDLRQACRTPSRDEAGVELLMTYFIQLGFVESRFFPPTRQMGLLFTWYDSLTGVPVSQQNLLLEKASVLFNTGALYTQIGTRCDRQTQAGLESAIDAFQRAAGVLNYLKDTFTHTPSYDMSPAMLSVLVKMMLAQAQESVFEKISLPGIRNEFFMLVKVAQEAAKVGEVYQQLHAAMSQAPVKENIPYSWASLACVKAHHYAALAHYFTAILLIDHQVKPGTDLDHQEKCLSQLYDHMPEGLTPLATLKNDQQRRQLGKSHLRRAMAHHEESVREASLCKKLRSIEVLQKVLCAAQERSRLTYAQHQEEDDLLNLIDAPSVVAKTEQEVDIILPQFSKLTVTDFFQKLGPLSVFSANKRWTPPRSIRFTAEEGDLGFTLRGNAPVQVHFLDPYCSASVAGAREGDYIVSIQLVDCKWLTLSEVMKLLKSFGEDEIEMKVVSLLDSTSSMHNKSATYSVGMQKTYSMICLAIDDDDKTDKTKKISKKLSFLSWGTNKNRQKSASTLCLPSVGAARPQVKKKLPSPFSLLNSDSSWY

SEQ ID NO: 23863 - protein, 34 aa, Artificial Sequence
  Synthetic polypeptide
GSLKVGSSRPALISWAVIPLHKPAGVNCRIKELL

SEQ ID NO: 23864 - protein, 116 aa, Artificial Sequence
  Synthetic polypeptide
GREFEASLDIMGCNPLAQTGRSKLQNQRAALNQQILKAVRMRTGAENLLKVATNSKVREQVRLELSFVNSDLQMLKEELEGLNISVGVYQNTEILSWNITVKMAIYMKMKLQILWI

SEQ ID NO: 23865 - protein, 65 aa, Artificial Sequence
  Synthetic polypeptide
QLALEPHGFELHGSLIHGFPSISATPRQEDQPLLFLLSLLNVKMMRTKTFRMIHFHLMNKQRHAL

SEQ ID NO: 23866 - protein, 465 aa, Artificial Sequence
  Synthetic polypeptide
ISNDMPFDELLALYGYEASDPISDRESEGGDVAPNLPDMTLDKEQIAKDLLSGEEEEETQSSADDLTPSVTSHEASDLFPNRSGSRFLADEDREPGSSASSDTEEDSLPANKCKKEIMVGPQFQADLSNLHLNRHCEKIYENEDQLLWDPSVLPEREVEEFLYRAVKRRWHEMAGPQLPEGEAVKDSEQALYELVKCNFNVEEALRRLRFNVKVIRDGLCAWSEEECRNFEHGFRVHGKNFHLIQANKVRTRSVGECVEYYYLWKKSERYDYFAQQTRLGRRKYVPSGTTDADQDLDGSDPDGPGRPRPEQDTLTGMRTDPLSVDGTAGGLDEPGVASDGLPSSEPGPCSFQQLDESPAVPLSHRPPALADPASYQPAVTAPEPDASPRLAVDFALPKELPLISSHVDLSGDPEETVAPAQVALSVTEFGLIGIGDVNPFLAAHPTCPAPGLHSEPLSHCNVMTC

SEQ ID NO: 23867 - protein, 571 aa, Artificial Sequence
  Synthetic polypeptide
QLALEPHGFELHGSLIHGFPSISATPRQEDQPLLFLLSLLNVKMMRTKTFRMIHFHLMNMVSMGSGDHQFNLAEILSQNYSVRGECEEASRCPDKPKEELEKDFISQSNDMPFDELLALYGYEASDPISDRESEGGDVAPNLPDMTLDKEQIAKDLLSGEEEEETQSSADDLTPSVTSHEASDLFPNRSGSRFLADEDREPGSSASSDTEEDSLPANKCKKEIMVGPQFQADLSNLHLNRHCEKIYENEDQLLWDPSVLPEREVEEFLYRAVKRRWHEMAGPQLPEGEAVKDSEQALYELVKCNFNVEEALRRLRFNVKVIRDGLCAWSEEECRNFEHGFRVHGKNFHLIQANKVRTRSVGECVEYYYLWKKSERYDYFAQQTRLGRRKYVPSGTTDADQDLDGSDPDGPGRPRPEQDTLTGMRTDPLSVDGTAGGLDEPGVASDGLPSSEPGPCSFQQLDESPAVPLSHRPPALADPASYQPAVTAPEPDASPRLAVDFALPKELPLISSHVDLSGDPEETVAPAQVALSVTEFGLIGIGDVNPFLAAHPTCPAPGLHSEPLSHCNVMTC

SEQ ID NO: 23868 - protein, 86 aa, Artificial Sequence
  Synthetic polypeptide
IWCPWALETISSTSQRSCHRTTVLGGSARRPRGAQTSPRRSWRRTSSPRATTCPLMSCLRSMATRRQTPFQTGRVRVVTWPRTSQT

SEQ ID NO: 23869 - protein, 31 aa, Artificial Sequence
  Synthetic polypeptide
DDPLPLNEYGVHGLWRPSVQPRRDPVTELQC

SEQ ID NO: 23870 - protein, 171 aa, Artificial Sequence
  Synthetic polypeptide
GWVQWFMPVIPALWEAKDFSLLYEEARYYQLQPMVRELERWQQEQEQRRRSRACDCLVVRVTPDLGERIALSGEKALIEEVFPETGDVMCNSVNAGWNQDPTHVIRFPLNGYCRLNSVQVLERLFQRGFSVAASCGGGVDSSQFSEYVLCREERRPQPTPTAVRIKQEPLD

SEQ ID NO: 23871 - protein, 162 aa, Artificial Sequence
  Synthetic polypeptide
SQHFGRPRTSVCCTRRRATISSSPWCASWSAGSRSRSSGAAAGPVTAWWCASRPTWASGSHSAARRPSSRRSSPRPETSCATPSTPAGTRTPRTSSASRSMATAGSTRYRSWSGCSRGVSAWLRPVGAVWTPPSSASMCFAGRSGGRSPPPLLFESSRNPWT

SEQ ID NO: 23872 - protein, 53 aa, Artificial Sequence
  Synthetic polypeptide
MGAVVHACNPSTLGGQGLQSAVRGGALLSAPAHGARAGALAAGAGAAAPQPGL

SEQ ID NO: 23873 - protein, 122 aa, Artificial Sequence
  Synthetic polypeptide
GWVQWFMPVIPALWEAKDFSLLYEEARYYQLQPMVRELERWQQEQEQRRRSRACDCLVVRVTPDLGERIALSGEKALIEEVFPETGDVMCNSVNAGWNQDPTHVIRFPLNGYCRLNSVQDVL

SEQ ID NO: 23874 - protein, 113 aa, Artificial Sequence
  Synthetic polypeptide
SQHFGRPRTSVCCTRRRATISSSPWCASWSAGSRSRSSGAAAGPVTAWWCASRPTWASGSHSAARRPSSRRSSPRPETSCATPSTPAGTRTPRTSSASRSMATAGSTRYRMFY

SEQ ID NO: 23875 - protein, 152 aa, Artificial Sequence
  Synthetic polypeptide
GWVQWFMPVIPALWEAKDFSLLYEEARYYQLQPMVRELERWQQEQEQRRRSRACDCLVVRVTPDLGERIALSGEKALIEEVFPETGDVMCNSVNAGWNQDPTHVIRFPLNGYCRLNSVQVRAARCPLPAAPPASAEPSRGRVSWREARSLKR

SEQ ID NO: 23876 - protein, 110 aa, Artificial Sequence
  Synthetic polypeptide
SQHFGRPRTSVCCTRRRATISSSPWCASWSAGSRSRSSGAAAGPVTAWWCASRPTWASGSHSAARRPSSRRSSPRPETSCATPSTPAGTRTPRTSSASRSMATAGSTRYR

SEQ ID NO: 23877 - protein, 100 aa, Artificial Sequence
  Synthetic polypeptide
MLSPWRALVKMERDNWCPWALETISSTSQRSCHRTTVLGGSARRPRGAQTSPRRSWRRTSSPRATTCPLMSCLRSMATRRQTPFQTGRVRVVTWPRTSQT

SEQ ID NO: 23878 - protein, 28 aa, Artificial Sequence
  Synthetic polypeptide
RWKEIIGVHGLWRPSVQPRRDPVTELQC

SEQ ID NO: 23879 - protein, 557 aa, Artificial Sequence
  Synthetic polypeptide
MLSPWRALVKMERDNASSLGRQSPRVVSCLEHSLCPGEPGLQTTAVVSMGSGDHQFNLAEILSQNYSVRGECEEASRCPDKPKEELEKDFISQSNDMPFDELLALYGYEASDPISDRESEGGDVAPNLPDMTLDKEQIAKDLLSGEEEEETQSSADDLTPSVTSHEASDLFPNRSGSRFLADEDREPGSSASSDTEEDSLPANKCKKEIMVGPQFQADLSNLHLNRHCEKIYENEDQLLWDPSVLPEREVEEFLYRAVKRRWHEMAGPQLPEGEAVKDSEQALYELVKCNFNVEEALRRLRFNVKVIRDGLCAWSEEECRNFEHGFRVHGKNFHLIQANKVRTRSVGECVEYYYLWKKSERYDYFAQQTRLGRRKYVPSGTTDADQDLDGSDPDGPGRPRPEQDTLTGMRTDPLSVDGTAGGLDEPGVASDGLPSSEPGPCSFQQLDESPAVPLSHRPPALADPASYQPAVTAPEPDASPRLAVDFALPKELPLISSHVDLSGDPEETVAPAQVALSVTEFGLIGIGDVNPFLAAHPTCPAPGLHSEPLSHCNVMTC

SEQ ID NO: 23880 - protein, 121 aa, Artificial Sequence
  Synthetic polypeptide
RWKEIMPPRWGGRVLAWSPASSTACAQGSRACRQQQWCPWALETISSTSQRSCHRTTVLGGSARRPRGAQTSPRRSWRRTSSPRATTCPLMSCLRSMATRRQTPFQTGRVRVVTWPRTSQT

SEQ ID NO: 23881 - protein, 30 aa, Artificial Sequence
  Synthetic polypeptide
PLLCSEPSFTPLCNGLTASPPQDSGASRPR

SEQ ID NO: 23882 - protein, 240 aa, Artificial Sequence
  Synthetic polypeptide
ARARSEAQGHVLIPSSPSPGCAALASPFSALSLRLLLCVMGSQPLPLRILGHLVPGEEDRDGQVTIQQPVPPGLSPPLQLHPAPPARHRRAQRDRPEPTPVLRSAFPYDVHPTPDGLHLLPPHGHPLPTSSQPPGPAQRSCLAGLRPSQPATWTVKWKWSAQNAQPLPFCSDAGTSAPGAATAGAPPCHQTRHHLRGRSHVADLAFLLSARHVPCKPFLCGIRTKGSCGHLSGTVLVSGI

SEQ ID NO: 23883 - protein, 200 aa, Artificial Sequence
  Synthetic polypeptide
WAHSLSPSGFWGISSPVKKTEMDKSPFNSPSPQDSPRLSSFTQHHRPVIAVHSGIARSPHPSSALHFPTTSILPQTASTYFPHTAIRYPPHLNPQDPLKDLVSLACDPASQQPGPLNGSGQLKMPSHCLSAQMLAPPPPGLPRLALPPATKPATTSEGGATSPTSPSYSPPDTSPANRSFVGLGPRDPAGIYQAQSWYLG

SEQ ID NO: 23884 - protein, 171 aa, Artificial Sequence
  Synthetic polypeptide
ARARSEAQGHVLIPSSPSPGCAALASPFSALSLRLLLCVMGSQPLPLRILGHLVPGEEDRDGQVTIQQPVPPGLSPPLQLHPAPPARHRRAQRDRPEPTPVLRSAFPYDVHPTPDGLHLLPPHGHPLPTSSQPPGPAQRSCLAGLRPSQPATWTAYSPPDTSPANRSFVGL

SEQ ID NO: 23885 - protein, 131 aa, Artificial Sequence
  Synthetic polypeptide
WAHSLSPSGFWGISSPVKKTEMDKSPFNSPSPQDSPRLSSFTQHHRPVIAVHSGIARSPHPSSALHFPTTSILPQTASTYFPHTAIRYPPHLNPQDPLKDLVSLACDPASQQPGPPTLRPTRPLQTVPLWD

SEQ ID NO: 23886 - protein, 160 aa, Artificial Sequence
  Synthetic polypeptide
ARARSEAQGHVLIPSSPSPGCAALASPFSALSLRLLLCVMGSQPLPLRILGHLVPGEEDRDGQVTIQQPVPPGLSPPLQLHPAPPARHRRAQRDRPEPTPVLRSAFPYDVHPTPDGLHLLPPHGHPLPTSSQPPGPAQRSCLAGLRPSQPATWTVLVSGI

SEQ ID NO: 23887 - protein, 120 aa, Artificial Sequence
  Synthetic polypeptide
WAHSLSPSGFWGISSPVKKTEMDKSPFNSPSPQDSPRLSSFTQHHRPVIAVHSGIARSPHPSSALHFPTTSILPQTASTYFPHTAIRYPPHLNPQDPLKDLVSLACDPASQQPGPSWYLG

SEQ ID NO: 23888 - protein, 79 aa, Artificial Sequence
  Synthetic polypeptide
GRAQWLMPAIPALWEAEGSPGAHTRPPLCISLRRPSYPRRPPPTSPTRPSATHLISTPRTRSKILSRWPATQPASNLDR

SEQ ID NO: 23889 - protein, 164 aa, Artificial Sequence
  Synthetic polypeptide
AGHSGSCLQSQHFGRLRDRPEPTPVLRSAFPYDVHPTPDGLHLLPPHGHPLPTSSQPPGPAQRSCLAGLRPSQPATWTVKWKWSAQNAQPLPFCSDAGTSAPGAATAGAPPCHQTRHHLRGRSHVADLAFLLSARHVPCKPFLCGIRTKGSCGHLSGTVLVSGI

SEQ ID NO: 23890 - protein, 95 aa, Artificial Sequence
  Synthetic polypeptide
GRAQWLMPAIPALWEAEGSPGAHTRPPLCISLRRPSYPRRPPPTSPTRPSATHLISTPRTRSKILSRWPATQPASNLDRLLSARHVPCKPFLCGI

SEQ ID NO: 23891 - protein, 95 aa, Artificial Sequence
  Synthetic polypeptide
AGHSGSCLQSQHFGRLRDRPEPTPVLRSAFPYDVHPTPDGLHLLPPHGHPLPTSSQPPGPAQRSCLAGLRPSQPATWTAYSPPDTSPANRSFVGL

SEQ ID NO: 23892 - protein, 84 aa, Artificial Sequence
  Synthetic polypeptide
GRAQWLMPAIPALWEAEGSPGAHTRPPLCISLRRPSYPRRPPPTSPTRPSATHLISTPRTRSKILSRWPATQPASNLDRPGIWD

SEQ ID NO: 23893 - protein, 84 aa, Artificial Sequence
  Synthetic polypeptide
AGHSGSCLQSQHFGRLRDRPEPTPVLRSAFPYDVHPTPDGLHLLPPHGHPLPTSSQPPGPAQRSCLAGLRPSQPATWTVLVSGI

SEQ ID NO: 23894 - protein, 848 aa, Artificial Sequence
  Synthetic polypeptide
AEIAPLHSSQGDRATSRLRERGCDGCLAGIEVQQLFCSQSAAIPEHQLKELNIKIDSALQAYKIALESLGHCEYAMKAGFHLNPKAIEASLQGCCSEAEAQQTGRRQTPPQPMQCELPTVPVQIGSHFLKGVSFNESAADNLKLKTHTMLQLMKEAGCYNGITSRDDFPVTEVLNQVCPSTWRGACKTAVQLLFGQAGLVVVDTAQIENKEAYAPQISLEGSRIVVQVPSTWCLKEDPATMSLLQRSLDPEKTLGLVDVLYTAVLDLNRWRAGREQALPCIQIQLQREICDFGNQADLPSGNGNKSSGGLQKTFSKLTSRFTKKASCTSSSSSTNYSIQNTPSKNIFIAGCSEEKAKMPGNIDTRLQSILNIGNFPRTTDPSQSAQNSSNTVANGFLMERRENFLHGDDGKDEKGMNLPTDQEMQEVIDFLSGFNMGQSHQGSPLVTRHNSAATAMVTEQKAGAMQPQQPSLPVPPPPRAPQAGAHTPLTPQPGLAPQQQSPKQQQPQVQYYQHLLQPIGPQQPPPQPRAPGKWVHGSSQQPAQAVGAGLSPLGQWPGISDLSSDLYSLGLVSSYMDNVMSEVLGQKPQGPRNNTWPNRDQSDGVFGMLGEILPFDPAVGSDPEFARYVAGVSQAMQQKRQAQHGRRPGNPRGNWPPMDDAHRTWPFPEFFTEGDGLHGGWSGAQGDSASSSDETSSANGDSLFSMFSGPDLVAAVKQRRKHSSGEQDTSTLPSPPLLTTVEDVNQDNKTKTWPPKAPWQHPSPLPSTLPSPSAPLYAVTSPGSQWNDTMQMLQSPVWAATNDCSAAAFSYVQTPPQPPPPPAHKAAPKGFKAFPGKGERRPAYLPQY

SEQ ID NO: 23895 - protein, 14 aa, Artificial Sequence
  Synthetic polypeptide
RHYTPARVTERHLD

SEQ ID NO: 23896 - protein, 4 aa, Artificial Sequence
  Synthetic polypeptide
QSDI

SEQ ID NO: 23897 - protein, 90 aa, Artificial Sequence
  Synthetic polypeptide
KVNKLARHDGHATVVPATQEAEKQGNSLAAEDWCEGADDWGSDTEEGPSPQFTLDFGNDASSAKDVDWTARLQDLRLQDAVLGAAHPVPP

SEQ ID NO: 23898 - protein, 51 aa, Artificial Sequence
  Synthetic polypeptide
CQLLRRLRNRETALQLRTGVKVLMTGEVILRRGLHHSLPWILGMMPAVPKT

SEQ ID NO: 23899 - protein, 47 aa, Artificial Sequence
  Synthetic polypeptide
KVNKLARHDGHATVVPATQEAEKQGNSLAAEDWCEGADDWGSDTEEG

SEQ ID NO: 23900 - protein, 33 aa, Artificial Sequence
  Synthetic polypeptide
CQLLRRLRNRETALQLRTGVKVLMTGEVILRRG

SEQ ID NO: 23901 - protein, 268 aa, Artificial Sequence
  Synthetic polypeptide
KVNKLARHDGHATVVPATQEAEKQGNSLAAEDWCEGADDWGSDTEEGPSPQFTLDFGNDASSAKDVDWTARLQDLRLQDAVLGAAHPVPPGLPLFLPYYICVADEDDYRDFVNLDHAHSLLRDYQQREGIAMDQLLSQSLPNDGDEKYEKTIIKSGDQTFYKFMKRIAACQEQILRYSWSGEPLFLTCPTSEVTELPACSQCGGQRIFEFQLMPALVSMLKSANLGLSVEFGTILVYTCEKSCWPPNHQTPMEEFCIIQEDPDELLFK

SEQ ID NO: 23902 - protein, 37 aa, Artificial Sequence
  Synthetic polypeptide
NKSSKVFLEWRATLFDLPYIRSHRAPSLQPVWRPKDI

SEQ ID NO: 23903 - protein, 106 aa, Artificial Sequence
  Synthetic polypeptide
ELHKNGFHKTRAQRYSWSGEPLFLTCPTSEVTELPACSQCGGQRIFEFQLMPALVSMLKSANLGLSVEFGTILVYTCEKSCWPPNHQTPMEEFCIIQEDPDELLFK

SEQ ID NO: 23904 - protein, 37 aa, Artificial Sequence
  Synthetic polypeptide
KEHISPSRCFKMYKNFIRMDSIKQELKGIPGVESHSF

SEQ ID NO: 23905 - protein, 186 aa, Artificial Sequence
  Synthetic polypeptide
WVAETCQLAVRRLEWLQQHGGEPAAGPYLSVDPAPPAEERDVGRLREALLDESRPLFERYRAMFALRNAGGEEAALALAEGLHCGSALFRHEVGYVLGQLQHEAAVPQLAAALARCTENPMVRHECAEALGAIARPACLAALQAHADDPERVVRESCEVALDMYEHETGRAFQYADGLEQLRGAPS

SEQ ID NO: 23906 - protein, 212 aa, Artificial Sequence
  Synthetic polypeptide
GPPQPSSPPVTHKSATPAGLLPAWNDGWPRPASWPCAGWSGCSSTAGSRRRDPTSPWTLPRRLRSVTWGACGRRCWMSPGRSSSDTAPCSPCATREARRPPWRWPRVCTVGAPSSATRSATSWDSCSTRRRCPSWRPPWPDAPRTPWCGTSARRPWAPLPGPPAWPRCRLTRTTQSAWCVRAARWLWTCMSTRPGGPSSTRTAWSSCAGPPP

SEQ ID NO: 23907 - protein, 170 aa, Artificial Sequence
  Synthetic polypeptide
SCPHPTPTLSLSSSGAAGGTCDTQFCCSVPCLKLSRYLITFRTKSQALTVARRPYLVRWGRTCSFGPHPSRRVLPQGLSTAASPSPGLHLIPSLSWLRSLPPHHLLPEALPSPPVPRSLTSQPPLLAYFLPGMMGGRDLPAGRAQAGVAAAARRGAGGGTLPLRGPCPAG

SEQ ID NO: 23908 - protein, 107 aa, Artificial Sequence
  Synthetic polypeptide
WVAETCQLAVRRLEWLQQHGGEPAAGPYLSVDPAPPAEERDVGRLREALLDESRPLFERYRAMFALRNAGGEEAALALAEGLHCGSALFRHEVGYVLGQLQHEAAVP

SEQ ID NO: 23909 - protein, 133 aa, Artificial Sequence
  Synthetic polypeptide
GPPQPSSPPVTHKSATPAGLLPAWNDGWPRPASWPCAGWSGCSSTAGSRRRDPTSPWTLPRRLRSVTWGACGRRCWMSPGRSSSDTAPCSPCATREARRPPWRWPRVCTVGAPSSATRSATSWDSCSTRRRCP

SEQ ID NO: 23910 - protein, 127 aa, Artificial Sequence
  Synthetic polypeptide
WVAETCQLAVRRLEWLQQHGGEPAAGPYLSVDPAPPAEERDVGRLREALLDESRPLFERYRAMFALRNAGGEEAALALAEGEEGLLGWGPGQCLAVRFSDGICAVGPRPAPGNGIPGLAPSISHGAS

SEQ ID NO: 23911 - protein, 121 aa, Artificial Sequence
  Synthetic polypeptide
GPPQPSSPPVTHKSATPAGLLPAWNDGWPRPASWPCAGWSGCSSTAGSRRRDPTSPWTLPRRLRSVTWGACGRRCWMSPGRSSSDTAPCSPCATREARRPPWRWPRVRRGFWGGVLGSASL

SEQ ID NO: 23912 - protein, 18 aa, Artificial Sequence
  Synthetic polypeptide
VVICTVLRTVPGTFSRAR

SEQ ID NO: 23913 - protein, 76 aa, Artificial Sequence
  Synthetic polypeptide
LNELSYAQCSEQFLAHSQEQDDVLIVDSDEEDSSNNADVSEEERSRKRKLDEKENLSAKRSRIEQKEELDDVIALD

SEQ ID NO: 23914 - protein, 23 aa, Artificial Sequence
  Synthetic polypeptide
MSCHMHSAQNSSWHILKSKMTFS

SEQ ID NO: 23915 - protein, 184 aa, Artificial Sequence
  Synthetic polypeptide
ATYDDYLSLEGSRWPPAIRQATRWKYTPMGRDAAGQLWYTGLTNSDAWEAWYNLPRAPASPFREAYNRWHSCYQHRECSMPSAYTQHLRETAWHDPIVPAQYQAPSTRWGSALWKDRPIRGKEYVLNRNRYGVEPLWRASDYVPSLSAPQRPPGTTQNYREWVLEPYCPSTCQRSPPSLTPTPR

SEQ ID NO: 23916 - protein, 63 aa, Artificial Sequence
  Synthetic polypeptide
SQHFGRLRQEDHLSPGVQDQPEQHTMTTCPWRVPAGHQPSGRPHAGSTRPWDGTQPASCGTQA

SEQ ID NO: 23917 - protein, 12 aa, Artificial Sequence
  Synthetic polypeptide
AQEFKTSLSNIR

SEQ ID NO: 23918 - protein, 25 aa, Artificial Sequence
  Synthetic polypeptide
TQHFGRLRQVDHLRSGVRDQPGQHG

SEQ ID NO: 23919 - protein, 33 aa, Artificial Sequence
  Synthetic polypeptide
PGVWLTLVNPALWEAEAGGSLEVRSSRPAWPAW

SEQ ID NO: 23920 - protein, 38 aa, Artificial Sequence
  Synthetic polypeptide
GCRPAPLGSHLSTATSWLDPSMSPCTSQHHCLKRMMRR

SEQ ID NO: 23921 - protein, 522 aa, Artificial Sequence
  Synthetic polypeptide
KDDETLSPRELWHLVHQCYGSELGLTSEDEDYVSPLQLNGLGTPKEVGDVIALSDITSSGAADRSQEPSPVGSRRGHVTPNLSRASSDADHGAEEDKEEQVDSQPDASSSQTVTPVAEPPSTEPTQPDGPTTLGPLDLLPSEELLTDTSNSSSSTGEEADLAALLPDLSGRLLINSVFHVGAERLQQMLFSDSPFLQGFLQQCKFTDVTLSPWSGDSKCHQRRVLTYTIPISNPLGPKSASVVETQTLFRRGPQAGGCVVDSEVLTQGIPYQDYFYTAHRYCILGLARNKARLRVSSEIRYRKQPWSLVKSLIEKNSWSGIEDYFHHLERELAKAEKLSLEEGGKDARGLLSGLRRRKRPLSWRAHGDGPQHPDPDPCARAGIHTSGSLSSRFSEPSVDQGPGAGIPSALVLISIVLIILIALNVLLFYRLWSLERTAHTFESWHSLALAKGKFPQTATEWAEILALQKQFHSVEVHKWRQILRASVELLDEMKFSLEKLHQGITVSDPPFDTQPRPDDSFS

SEQ ID NO: 23922 - protein, 526 aa, Artificial Sequence
  Synthetic polypeptide
KDDETLSPRELWHLVHQCYGSELGLTSEDEDYVSPLQLNGLGTPKEVGDVIALSDITSSGAADRSQEPSPVGSRRGHVTPNLSRASSDADHGAEEDKEEQVDSQPDASSSQTVTPVAEPPSTEPTQPDGPTTLGPLDLLPSEELLTDTSNSSSSTGEEADLAALLPDLSGRLLINSVFHVGAERLQQMLFSDSPFLQGFLQQCKFTDVTLSPWSGDSKCHQRRVLTYTIPISNPLGPKSASVVETQTLFRRGPQAGGCVVDSEVLTQGIPYQDYFYTAHRYCILGLARNKARLRVSSEIRYRKQPWSLVKSLIEKNSWSGIEDYFHHLERELAKAEKLSLEEGGKDARGLLSGLRRRKRPLSWRAHGDGPQHPDPDPCARAGIHTSGSLSSRFSEPSVDQGPGAGIPSALVLISIVICVSLIILIALNVLLFYRLWSLERTAHTFESWHSLALAKGKFPQTATEWAEILALQKQFHSVEVHKWRQILRASVELLDEMKFSLEKLHQGITVSDPPFDTQPRPDDSFS

SEQ ID NO: 23923 - protein, 23 aa, Artificial Sequence
  Synthetic polypeptide
MQQCPQPAGAAWRWTRRPRPCMG

SEQ ID NO: 23924 - protein, 44 aa, Artificial Sequence
  Synthetic polypeptide
QWCKCSSVLSLRGLRGGGLGDRGRVWDDLQNSLHLLQAPQRDQR

SEQ ID NO: 23925 - protein, 231 aa, Artificial Sequence
  Synthetic polypeptide
STQELRGQTVVAGVQILLPSSGVNAAVSSACGGCVEVDSETEAVYGMTFKILCISCKRRSETNAETFTEWTFRQKGTEEFVKILRYENEVLQLEEDERFEGRVVWNGSRGTKDLQDLSIFITNVTYNHSGDYECHVYRLLFFENYEHNTSVVKKIHIEVVDKANRDMASIVSEIMMYVLIVVLTIWLVAEMIYCYKKIAAATETAAQENASEYLAITSESKENCTGVQVAE

SEQ ID NO: 23926 - protein, 160 aa, Artificial Sequence
  Synthetic polypeptide
STQELRGQTVVAGVQILLPSSGVNAAVSSACGGCVEVDSETEAVYGMTFKILCISCKRRSETNAETFTEWTFRQKGTEEFVKKIHIEVVDKANRDMASIVSEIMMYVLIVVLTIWLVAEMIYCYKKIAAATETAAQENASEYLAITSESKENCTGVQVAE

SEQ ID NO: 23927 - protein, 281 aa, Artificial Sequence
  Synthetic polypeptide
STQELRGQTVVAGVQILLPSSGVNAAVSSACGGCVEVDSETEAVYGMTFKILCISCKRRSETNAETFTEWTFRQKGTEEFVKILRYENEVLQLEEDERFEGRVVWNGSRGTKDLQDLSIFITNVTYNHSGDYECHVYRLLFFENYEHNTSVVKKIHIEVVDKGESGAACPFTVTHRRARWRDRWQAVDRTGWLCAWPANRPQQRAEGEGSSPSCPLQLWPLFLSSPRRGQSMPVPHRRSGYRTQLCHLCCMTSGRCLLSLSQRVVLGLPGIIIRCVSRGVV

SEQ ID NO: 23928 - protein, 48 aa, Artificial Sequence
  Synthetic polypeptide
NPVSTKNTKISWAPSASCCPSPSSSAPAWAVGRPRPSGLPSSTTARSS

SEQ ID NO: 23929 - protein, 99 aa, Artificial Sequence
  Synthetic polypeptide
SQHFERPRRVDHLRSGIGDQPGQRGETLSLLKIQKLAGHRLRPAVLPLHLQPLPGLWGGHARVGCPPLLRPVHRDLPVWLGLHTDLPPQPHPGARHQRP

SEQ ID NO: 23930 - protein, 375 aa, Artificial Sequence
  Synthetic polypeptide
LGTVCVLLSFPFIFSPCLGCGAATPEWAALLYYGPFIVIFQFGWASTQISHLSLIPELVTNDHEKVELTALRYAFTVVANITVYGAAWLLLHLQGSSRVEPTQDISISDQLGGQDVPVFRNLSLLVVGVGAVFSLLFHLGTRERRRPHAEEPGEHTPLLAPATAQPLLLWKHWLREPAFYQVGILYMTTRLIVNLSQTYMAMYLTYSLHLPKKFIATIPLVMYLSGFLSSFLMKPINKCIGRNMTYFSGLLVILAFAAWVALAEGLGVAVYAAAVLLGAGCATILVTSLAMTADLIGPHTNSGAFVYGSMSFLDKVANGLAVMAIQSLHPCPSELCCRACVSFYHWAMVAVTGGVGVAAALCLCSLLLWPTRLRR

SEQ ID NO: 23931 - protein, 440 aa, Artificial Sequence
  Synthetic polypeptide
LGTVCVLLSFPFIFSPCLGCGAATPEWAALLYYGPFIVIFQFGWASTQISHLSLIPELVTNDHEKVELTALRYAFTVVANITVYGAAWLLLHLQGSSRVEPTQDISISDQLGGQDVPVFRNLSLLVVGVGAVFSLLFHLGTRERRRPHAEEPGEHTPLLAPATAQPLLLWKHWLREPAFYQVGILYMTTRLIVNLSQTYMAMYLTYSLHLPKKFIATIPLVMYLSGFLSSFLMKPINKCIGRNMTYFSGLLVILAFAAWVALAEGLGVAVYAAAVLLGAGCATILVTSLAMTADLIGPHTNSGAFVYGSMSFLDKVANGLAVMAIQSLHPCPSELCCRACVSFYHWAMVAVTGGVGVAAALCLCSLLLWPTRLRRSFLAWRRGRGEDKGPGYSWIPTVLVQPPRPTSPFLWEAPLAWRCTRKKWSGAGTKPWPREDWGTH

SEQ ID NO: 23932 - protein, 382 aa, Artificial Sequence
  Synthetic polypeptide
LGTVCVLLSFPFIFSPCLGCGAATPEWAALLYYGPFIVIFQFGWASTQISHLSLIPELVTNDHEKVELTALRYAFTVVANITVYGAAWLLLHLQGSSRVEPTQDISISDQLGGQDVPVFRNLSLLVVGVGAVFSLLFHLGTRERRRPHAEEPGEHTPLLAPATAQPLLLWKHWLREPAFYQVGILYMTTRLIVNLSQTYMAMYLTYSLHLPKKFIATIPLVMYLSGFLSSFLMKPINKCIGRNMTYFSGLLVILAFAAWVALAEGLGVAVYAAAVLLGAGCATILVTSLAMTADLIGPHTNSGAFVYGSMSFLDKVANGLAVMAIQSLHPCPSELCCRACVSFYHWAMVAVTGGVGVAAALCLCSLLLWPTRLRRWDRDARP

SEQ ID NO: 23933 - protein, 63 aa, Artificial Sequence
  Synthetic polypeptide
LGTVCVLLSFPFIFSPCLGCGAATPEWAALLYYGPFIVIFQFGWASTQISHLSLIPELVTNDH

SEQ ID NO: 23934 - protein, 50 aa, Artificial Sequence
  Synthetic polypeptide
GRPQWFTYVIPGLWEAEAGGSLEARSSRPAWPTWWQVQAAVPVMPESLQV

SEQ ID NO: 23935 - protein, 40 aa, Artificial Sequence
  Synthetic polypeptide
SQDFGRLRQVDPLRPGVQDQLGQHGGKCRQLSRLCRNRCR

SEQ ID NO: 23936 - protein, 27 aa, Artificial Sequence
  Synthetic polypeptide
GQEFKTSLANMVASAGSCPGYAGIVAG

SEQ ID NO: 23937 - protein, 197 aa, Artificial Sequence
  Synthetic polypeptide
DQAQWLTPVIPALWEAKVGGHKHFGRPQDSPETIGRRVAVGLGSCLAILILAICGLKLQRRWKRTQSQQGLQENSSGQSFFVRNKKVRRAPLSEGPHSLGCYNPMMEDGISYTTLRFPEMNIPRTGDAESSEMQRPPPDCDDTVTYSALHKRQVGDYENVIPDFPEDEGIHYSELIQFGVGERPQAQENVDYVILKH

SEQ ID NO: 23938 - protein, 72 aa, Artificial Sequence
  Synthetic polypeptide
SQHFGRPKWVATSTLGGHKIARRPSAGEWLWDSGPASPSSSWQSVGSSSSDVGRGHRASRGFRRIPAARASL

SEQ ID NO: 23939 - protein, 28 aa, Artificial Sequence
  Synthetic polypeptide
PGTVAHACNPSTLGGQSGWPQALWEATR

SEQ ID NO: 23940 - protein, 132 aa, Artificial Sequence
  Synthetic polypeptide
DQAQWLTPVIPALWEAKVGGHKHFGRPQDSPETIGRRVAVGLGSCLAILILAICGLKLQRRDAESSEMQRPPPDCDDTVTYSALHKRQVGDYENVIPDFPEDEGIHYSELIQFGVGERPQAQENVDYVILKH

SEQ ID NO: 23941 - protein, 100 aa, Artificial Sequence
  Synthetic polypeptide
SQHFGRPKWVATSTLGGHKIARRPSAGEWLWDSGPASPSSSWQSVGSSSSDEMQSPQRCRDLPRTAMTRSLIQHCTSAKWATMRTSFQIFQKMRGFITQS

SEQ ID NO: 23942 - protein, 101 aa, Artificial Sequence
  Synthetic polypeptide
DQAQWLTPVIPALWEAKVGGHKHFGRPQDSPETIGRRVAVGLGSCLAILILAICGLKLQRRWKRTQSQQGLQENSSGQSFFVRNKKRCRVLRDAETSPGLR

SEQ ID NO: 23943 - protein, 80 aa, Artificial Sequence
  Synthetic polypeptide
DQAQWLTPVIPALWEAKVGGHKHFGRPQARRPSAGEWLWDSGPASPSSSWQSVGSSSSDVGRGHRASRGFRRIPAARASL

SEQ ID NO: 23944 - protein, 73 aa, Artificial Sequence
  Synthetic polypeptide
SQHFGRPKWVATSTLGGHKPGDHRQASGCGTRVLPRHPHPGNLWAQAPATLEEDTEPAGASGEFQRPELLCEE

SEQ ID NO: 23945 - protein, 195 aa, Artificial Sequence
  Synthetic polypeptide
PGTVAHACNPSTLGGQSGWPQALWEATSPETIGRRVAVGLGSCLAILILAICGLKLQRRWKRTQSQQGLQENSSGQSFFVRNKKVRRAPLSEGPHSLGCYNPMMEDGISYTTLRFPEMNIPRTGDAESSEMQRPPPDCDDTVTYSALHKRQVGDYENVIPDFPEDEGIHYSELIQFGVGERPQAQENVDYVILKH

SEQ ID NO: 23946 - protein, 108 aa, Artificial Sequence
  Synthetic polypeptide
DQAQWLTPVIPALWEAKVGGHKHFGRPQARRPSAGEWLWDSGPASPSSSWQSVGSSSSDEMQSPQRCRDLPRTAMTRSLIQHCTSAKWATMRTSFQIFQKMRGFITQS

SEQ ID NO: 23947 - protein, 65 aa, Artificial Sequence
  Synthetic polypeptide
SQHFGRPKWVATSTLGGHKPGDHRQASGCGTRVLPRHPHPGNLWAQAPATRCRVLRDAETSPGLR

SEQ ID NO: 23948 - protein, 130 aa, Artificial Sequence
  Synthetic polypeptide
PGTVAHACNPSTLGGQSGWPQALWEATSPETIGRRVAVGLGSCLAILILAICGLKLQRRDAESSEMQRPPPDCDDTVTYSALHKRQVGDYENVIPDFPEDEGIHYSELIQFGVGERPQAQENVDYVILKH

SEQ ID NO: 23949 - protein, 99 aa, Artificial Sequence
  Synthetic polypeptide
PGTVAHACNPSTLGGQSGWPQALWEATSPETIGRRVAVGLGSCLAILILAICGLKLQRRWKRTQSQQGLQENSSGQSFFVRNKKRCRVLRDAETSPGLR

SEQ ID NO: 23950 - protein, 314 aa, Artificial Sequence
  Synthetic polypeptide
QEQWLTPVIPALWEAKNLHTWNSSLLDLETLSLQSRAARLLKRSKASISSSSSLSPSDASTSSFPTSSDGLSPFSETFIPDSSKGLGPRAPASPAPAQAQTPTPAPAPASSQAPLRPEDDILYQWRQRRKLEQAQGSKGDRAWVPPLTPALRTLAESLKAKALPPAAGSVIRKSEATPSPGACLQPEVPLSPAEQATTVKASPPAFQVGSPEALAPPPPAADHAPSEALLAQALLLQAAEDSDGSEFQDDPVLQVLRAHRAELSRQKREADARLSFLLDQAEDLGSWSPPAGSPPRSPRRLLRREGDSLEARRL

SEQ ID NO: 23951 - protein, 22 aa, Artificial Sequence
  Synthetic polypeptide
SQHFGRPRTSTHGTHPCWTWRR

SEQ ID NO: 23952 - protein, 67 aa, Artificial Sequence
  Synthetic polypeptide
GAVAHTCNPSTLGGQEPPHMELIPAGPGDAEPTEQSCQAAQTQQSLHLLLLLPQPQRCQHFLIPHQL

SEQ ID NO: 23953 - protein, 260 aa, Artificial Sequence
  Synthetic polypeptide
QEQWLTPVIPALWEAKNLHTWNSSLLDLETLSLQSRAARLLKRSKASISSSSSLSPSDASTSSFPTSSDGLSPFSETFIPDSSKGLGPRAPASPAPAQAQTPTPAPAPASSQAPLRPEDDILYQWRQRRKLEQAQGSKGDRAWVPPLTPALRTLAESLKAKALPPAAGSVIRKSEATPSPGACLQPEVPLSPAEQATTVKASPPAFQVGSPEALAPPPPAADHAPSEALLAQGRPAAAGCRRLRRQRVPGRSRAAGAKSP

SEQ ID NO: 23954 - protein, 91 aa, Artificial Sequence
  Synthetic polypeptide
QEQWLTPVIPALWEAKNLHTWNSSLLDLETLSLQSRAARLLKRSKASISSSSSLSPSDASTSSFPTSSDGLSPFSETFIPDSSKGLGPRAP

SEQ ID NO: 23955 - protein, 160 aa, Artificial Sequence
  Synthetic polypeptide
QEQWLTPVIPALWEAKNLHTWNSSLLDLETLSLQSRAARLLKRSPSDASTSSFPTSSDGLSPFSETFIPDSSKGLGPRAPASPAPAQAQTPTPAPAPASSQAPLRPEDDILYQWRQRRKLEQAQGSKGDRAWVPPLTPALRTLVSRGREEPGGSWRRGWV

SEQ ID NO: 23956 - protein, 56 aa, Artificial Sequence
  Synthetic polypeptide
GAVAHTCNPSTLGGQEPPHMELIPAGPGDAEPTEQSCQAAQTQPQRCQHFLIPHQL

SEQ ID NO: 23957 - protein, 53 aa, Artificial Sequence
  Synthetic polypeptide
HEPPHMELIPAGPGDAEPTEQSCQAAQTQQSLHLLLLLPQPQRCQHFLIPHQL

SEQ ID NO: 23958 - protein, 309 aa, Artificial Sequence
  Synthetic polypeptide
GQEFKTSLGDMNLHTWNSSLLDLETLSLQSRAARLLKRSKASISSSSSLSPSDASTSSFPTSSDGLSPFSETFIPDSSKGLGPRAPASPAPAQAQTPTPAPAPASSQAPLRPEDDILYQWRQRRKLEQAQGSKGDRAWVPPLTPALRTLAESLKAKALPPAAGSVIRKSEATPSPGACLQPEVPLSPAEQATTVKASPPAFQVGSPEALAPPPPAADHAPSEALLAQALLLQAAEDSDGSEFQDDPVLQVLRAHRAELSRQKREADARLSFLLDQAEDLGSWSPPAGSPPRSPRRLLRREGDSLEARRL

SEQ ID NO: 23959 - protein, 255 aa, Artificial Sequence
  Synthetic polypeptide
GQEFKTSLGDMNLHTWNSSLLDLETLSLQSRAARLLKRSKASISSSSSLSPSDASTSSFPTSSDGLSPFSETFIPDSSKGLGPRAPASPAPAQAQTPTPAPAPASSQAPLRPEDDILYQWRQRRKLEQAQGSKGDRAWVPPLTPALRTLAESLKAKALPPAAGSVIRKSEATPSPGACLQPEVPLSPAEQATTVKASPPAFQVGSPEALAPPPPAADHAPSEALLAQGRPAAAGCRRLRRQRVPGRSRAAGAKSP

SEQ ID NO: 23960 - protein, 86 aa, Artificial Sequence
  Synthetic polypeptide
GQEFKTSLGDMNLHTWNSSLLDLETLSLQSRAARLLKRSKASISSSSSLSPSDASTSSFPTSSDGLSPFSETFIPDSSKGLGPRAP

SEQ ID NO: 23961 - protein, 42 aa, Artificial Sequence
  Synthetic polypeptide
HEPPHMELIPAGPGDAEPTEQSCQAAQTQPQRCQHFLIPHQL

SEQ ID NO: 23962 - protein, 155 aa, Artificial Sequence
  Synthetic polypeptide
GQEFKTSLGDMNLHTWNSSLLDLETLSLQSRAARLLKRSPSDASTSSFPTSSDGLSPFSETFIPDSSKGLGPRAPASPAPAQAQTPTPAPAPASSQAPLRPEDDILYQWRQRRKLEQAQGSKGDRAWVPPLTPALRTLVSRGREEPGGSWRRGWV

SEQ ID NO: 23963 - protein, 67 aa, Artificial Sequence
  Synthetic polypeptide
KYKISRAWWRMPVIPEPPHMELIPAGPGDAEPTEQSCQAAQTQQSLHLLLLLPQPQRCQHFLIPHQL

SEQ ID NO: 23964 - protein, 300 aa, Artificial Sequence
  Synthetic polypeptide
SQNLHTWNSSLLDLETLSLQSRAARLLKRSKASISSSSSLSPSDASTSSFPTSSDGLSPFSETFIPDSSKGLGPRAPASPAPAQAQTPTPAPAPASSQAPLRPEDDILYQWRQRRKLEQAQGSKGDRAWVPPLTPALRTLAESLKAKALPPAAGSVIRKSEATPSPGACLQPEVPLSPAEQATTVKASPPAFQVGSPEALAPPPPAADHAPSEALLAQALLLQAAEDSDGSEFQDDPVLQVLRAHRAELSRQKREADARLSFLLDQAEDLGSWSPPAGSPPRSPRRLLRREGDSLEARRL

SEQ ID NO: 23965 - protein, 25 aa, Artificial Sequence
  Synthetic polypeptide
PSVVAHACNPRTSTHGTHPCWTWRR

SEQ ID NO: 23966 - protein, 246 aa, Artificial Sequence
  Synthetic polypeptide
SQNLHTWNSSLLDLETLSLQSRAARLLKRSKASISSSSSLSPSDASTSSFPTSSDGLSPFSETFIPDSSKGLGPRAPASPAPAQAQTPTPAPAPASSQAPLRPEDDILYQWRQRRKLEQAQGSKGDRAWVPPLTPALRTLAESLKAKALPPAAGSVIRKSEATPSPGACLQPEVPLSPAEQATTVKASPPAFQVGSPEALAPPPPAADHAPSEALLAQGRPAAAGCRRLRRQRVPGRSRAAGAKSP

SEQ ID NO: 23967 - protein, 77 aa, Artificial Sequence
  Synthetic polypeptide
SQNLHTWNSSLLDLETLSLQSRAARLLKRSKASISSSSSLSPSDASTSSFPTSSDGLSPFSETFIPDSSKGLGPRAP

SEQ ID NO: 23968 - protein, 56 aa, Artificial Sequence
  Synthetic polypeptide
KYKISRAWWRMPVIPEPPHMELIPAGPGDAEPTEQSCQAAQTQPQRCQHFLIPHQL

SEQ ID NO: 23969 - protein, 146 aa, Artificial Sequence
  Synthetic polypeptide
SQNLHTWNSSLLDLETLSLQSRAARLLKRSPSDASTSSFPTSSDGLSPFSETFIPDSSKGLGPRAPASPAPAQAQTPTPAPAPASSQAPLRPEDDILYQWRQRRKLEQAQGSKGDRAWVPPLTPALRTLVSRGREEPGGSWRRGWV

SEQ ID NO: 23970 - protein, 576 aa, Artificial Sequence
  Synthetic polypeptide
GRARWLTPVIAALGEAEAGGSPEMYPELQIARVEQATQAIPMERWCGGSRSGSCAHPHHQVVPFRCLPGEFVSEALLVPEGCRFLHQERMDQCESSTRRHQEAQEACSSQGLILHGSGMLLPCGSDRFRGVEYVCCPPPGTPDPSGTAVGDPSTRSWPPGSRVEGAEDEEEEESFPQPVDDYFVEPPQAEEEEETVPPPSSHTLAVVGKVTPTPRPTDGVDIYFGMPGEISEHEGFLRAKMDLEERRMRQINEVMREWAMADNQSKNLPKADRQALNEHFQSILQTLEEQVSGERQRLVETHATRVIALINDQRRAALEGFLAALQADPPQAERVLLALRRYLRAEQKEQRHTLRHYQHVAAVDPEKAQQMRFQVHTHLQVIEERVNQSLGLLDQNPHLAQELRPQIQELLHSEHLGPSELEAPAPGGSSEDKGGLQPPDSKDDTPMTLPKGSTEQDAASPEKEKMNPLEQYERKVNASVPRGFPFHSSEIQRDELAPAGTGVSREAVSGLLIMGAGGGSLIVLSMLLLRRKKPYGAISHGVVEVDPMLTLEEQQLRELQRHGYENPTYRFLEERP

SEQ ID NO: 23971 - protein, 62 aa, Artificial Sequence
  Synthetic polypeptide
SQHLGRPRQADHLRCTRSCRLHVWSRLRRPSPWSAGAGVPGAAAAPTPTTRLCPSAACLVNL

SEQ ID NO: 23972 - protein, 577 aa, Artificial Sequence
  Synthetic polypeptide
GRARWLTPVIAALGEAEAGGSPEMYPELQIARVEQATQAIPMERWCGGSRSGSCAHPHHQVVPFRCLPGEFVSEALLVPEGCRFLHQERMDQCESSTRRHQEAQEACSSQGLILHGSGMLLPCGSDRFRGVEYVCCPPPGTPDPSGTAVGDPSTRSWPPGSRVEGAEDEEEEESFPQPVDDYFVEPPQAEEEEETVPPPSSHTLAVVGKVTPTPRPTDGVDIYFGMPGEISEHEGFLRAKMDLEERRMRQINEVMREWAMADNQSKNLPKADRQALNEHFQSILQTLEEQVSGERQRLVETHATRVIALINDQRRAALEGFLAALQADPPQAERVLLALRRYLRAEQKEQRHTLRHYQHVAAVDPEKAQQMRFQVHTHLQVIEERVNQSLGLLDQNPHLAQELRPQIQELLHSEHLGPSELEAPAPGGSSEDKGGLQPPDSKDADTPMTLPKGSTEQDAASPEKEKMNPLEQYERKVNASVPRGFPFHSSEIQRDELAPAGTGVSREAVSGLLIMGAGGGSLIVLSMLLLRRKKPYGAISHGVVEVDPMLTLEEQQLRELQRHGYENPTYRFLEERP

SEQ ID NO: 23973 - protein, 72 aa, Artificial Sequence
  Synthetic polypeptide
GRARWLTPVIAALGEAEAGGSPEMYPELQIARVEQATQAIPMERWCGGSRSGSCAHPHHQVVPFRCLPGEFV

SEQ ID NO: 23974 - protein, 196 aa, Artificial Sequence
  Synthetic polypeptide
GRARWLTPVIAALGEAEAGGSPEMYPELQIARVEQATQAIPMERWCGGSRSGSCAHPHHQVVPFRCLPGEFVSEALLVPEGCRFLHQERMDQCESSTRRHQEAQEACSSQGLILHGSGMLLPCGSDRFRGVEYVCCPPPGTPDPSGTAVGDPSTRSWPPGSRVEGAEDEEEEESFPQPVDDYFVEPPQAEEEEETV

SEQ ID NO: 23975 - protein, 317 aa, Artificial Sequence
  Synthetic polypeptide
GRARWLTPVIAALGEAEAGGSPEMYPELQIARVEQATQAIPMERWCGGSRSGSCAHPHHQVVPFRCLPGEFVSEALLVPEGCRFLHQERMDQCESSTRRHQEAQEACSSQGLILHGSGMLLPCGSDRFRGVEYVCCPPPGTPDPSGTAVGDPSTRSWPPGSRVEGAEDEEEEESFPQPVDDYFVEPPQAEEEEETVPPPSSHTLAVVGKVTPTPRPTDGVDIYFGMPGEISEHEGFLRAKMDLEERRMRQINEVMREWAMADNQSKNLPKADRQALNEHFQSILQTLEEQVSGERQRLVETHATRVIALINDQRRAA

SEQ ID NO: 23976 - protein, 171 aa, Artificial Sequence
  Synthetic polypeptide
AEITPLHSSLDDRVIDHSGARLGEYEDVSRVEKYTISQEAYDQRQDTVRSFLKRSKLGRYNEEERAQQEAEAAQRLAEEKAQASSIPVGSRCEVRAAGQSPRRGTVMYVGLTDFKPGYWIGVRYDEPLGKNDGSVNGKRYFECQAKYGAFVKPAVVTVGDFPEEDYGLDEI

SEQ ID NO: 23977 - protein, 71 aa, Artificial Sequence
  Synthetic polypeptide
LLRRLRQEDHLNPGAGSCSELRSHHCTPVWMIESLTTVAPALVSMRTCPGWRSTRSHKKPTTRGKTRSALS

SEQ ID NO: 23978 - protein, 118 aa, Artificial Sequence
  Synthetic polypeptide
AEITPLHSSLDDRVIDHSGARLGEYEDVSRVEKYTISQEAYDQRQDTVRSFLKRSKLGRYNEEERAQQEAEAAQRLAEEKAQASSIPVGSRCEVSQISSLATGLVSAMMSHWGKMMAV

SEQ ID NO: 23979 - protein, 31 aa, Artificial Sequence
  Synthetic polypeptide
AEITPLHSSLDDRVIDHSGARLGEYEDVSRV

SEQ ID NO: 23980 - protein, 50 aa, Artificial Sequence
  Synthetic polypeptide
LLRRLRQEDHLNPGAGSCSELRSHHCTPVWMIESLTTVAPALVSMRTCPG

SEQ ID NO: 23981 - protein, 147 aa, Artificial Sequence
  Synthetic polypeptide
AEITPLHSSLDDRVIDHSGARLGEYEDVSRVEKYTISQEAYDQRQDTVRSFLKRSKLGRYNEEERAQQEAEAAQRLAEEKAQASSIPVGSRCEVRAAGQSPRRGTVMYVGLTDFKPGYWIGVRYDEPLGKNDGSVNGKRYFECQAKY

SEQ ID NO: 23982 - protein, 79 aa, Artificial Sequence
  Synthetic polypeptide
LSQWRVSQALIRSFSSTARNRFQNRVREKQKLFQEDNDIPLYLKGGIVDNILYRVTMTLCLGGTVYSLYSLGWASFPRN

SEQ ID NO: 23983 - protein, 31 aa, Artificial Sequence
  Synthetic polypeptide
RLTLPDCLGSPVDHHRCRALGNSHSGGCPRR

SEQ ID NO: 23984 - protein, 38 aa, Artificial Sequence
  Synthetic polypeptide
VTLTVEGVPGADPLLQLHRPEPLSEPSARETEALPGGQ

SEQ ID NO: 23985 - protein, 60 aa, Artificial Sequence
  Synthetic polypeptide
LSQWRVSQALIRSFSSTARNRFQNREDNDIPLYLKGGIVDNILYRVTMTLCLGGTVYSLY

SEQ ID NO: 23986 - protein, 29 aa, Artificial Sequence
  Synthetic polypeptide
VTLTVEGVPGADPLLQLHRPEPLSEPRGQ

SEQ ID NO: 23987 - protein, 27 aa, Artificial Sequence
  Synthetic polypeptide
RLKTDAARLPRKPRRPSQMPSFRCPRR

SEQ ID NO: 23988 - protein, 52 aa, Artificial Sequence
  Synthetic polypeptide
RLTLPDCLGSPVDHHRCRALGVPGADPLLQLHRPEPLSEPSARETEALPGGQ

SEQ ID NO: 23989 - protein, 43 aa, Artificial Sequence
  Synthetic polypeptide
RLTLPDCLGSPVDHHRCRALGVPGADPLLQLHRPEPLSEPRGQ

SEQ ID NO: 23990 - protein, 524 aa, Artificial Sequence
  Synthetic polypeptide
WSEGLCTCPREESREIRAGQIVLKAMAQGLVTFRDVAIEFSLEEWKCLEPAQRDLYREVTLENFGHLASLGLSISKPDVVSLLEQGKEPWMIANDVTGPWCPDLESRCEKFLQKDIFEIGAFNWEIMESLKCSDLEGSDFRADWECEGQFERQVNEECYFKQVNVTYGHMPVFQHHTSHTVRQSRETGEKLMECHECGKAFSRGSHLIQHQKIHTGEKPFGCKECGKAFSRASHLVQHQRIHTGEKPYDCKDCGKAFGRTSELILHQRLHTGVKPYECKECGKTFRQHSQLILHQRTHTGEKPYVCKDCGKAFIRGSQLTVHRRIHTGARPYECKECGKAFRQHSQLTVHQRIHTGEKPYECKECGKGFIHSSEVTRHQRIHSGEKPYECKECGKAFRQHAQLTRHQRVHTGDRPYECKDCGKAFSRSSYLIQHQRIHTGDKPYECKECGKAFIRVSQLTHHQRIHTCEKPYECRECGMAFIRSSQLTEHQRIHPGIKPYECRECGQAFILGSQLIEHYRIHTG

SEQ ID NO: 23991 - protein, 20 aa, Artificial Sequence
  Synthetic polypeptide
GRKDSALVQEKNPEKSEQVK

SEQ ID NO: 23992 - protein, 74 aa, Artificial Sequence
  Synthetic polypeptide
VGRTLHLSKRRIQRNQSRSNSSKSHGPGTGDIQGRGHRVLSGRMEVPGTCSEGLVQGGDSGELWSLGLTRTLHF

SEQ ID NO: 23993 - protein, 34 aa, Artificial Sequence
  Synthetic polypeptide
YFPPCFCMSQPPDNLTAAAAIVEAVGACSPGIKM

SEQ ID NO: 23994 - protein, 348 aa, Artificial Sequence
  Synthetic polypeptide
WKQWGPAVLESRCETKKLFLKKEIYEIESTQWEIMEKLTRRDFQCSSFRDDWECNRQFKKELGSQGGHFNQLVFTHEDLPTLSHHPSFTLQQIINSKKKFCASKEYRKTFRHGSQFATHEIIHTIEKPYECKECGKSFRHPSRLTHHQKIHTGKKPFECKECGKTFICGSDLTRHHRIHTGEKPYECKECGKAFSSGSNFTRHQRIHTGEKPYECKECGKAFSSGSNFTQHQRIHTGEKPYECKECGNAFSQSSQLIKHQRIHTGEKPYECKECEKAFRSGSDLTRHQRIHTGEKPYECKICGKAYSQSSQLISHHRIHTSEKPYEYRECGKNFNYDPQLIQHQNLYW

SEQ ID NO: 23995 - protein, 40 aa, Artificial Sequence
  Synthetic polypeptide
FSPLFLHVPASRQSHSSSSNSGSSGGLQSWNQDVRPRNYF

SEQ ID NO: 23996 - protein, 163 aa, Artificial Sequence
  Synthetic polypeptide
WKQWGPAVLESRCETKKLFLKKEIYEIESTQWEIMEKLTRRDFQCSSFRDDWECNRQFKKELGSQGGHFNQLVFTHEDLPTLSHHPSFTLQQIINSKKKFCASKEYRKTFRHGSQFATHEIIHTIEKPYECKECGKSFRHPSRLTHHQKIHTGKKPFECKECG

SEQ ID NO: 23997 - protein, 86 aa, Artificial Sequence
  Synthetic polypeptide
WKQWGPAVLESRCETKKLFLKKEIYEIESTQWEIMEKLTRRDFQCSSFRDDWECNRQFKKELGSQGGHFNQLVFTHEDLPTLSHHP

SEQ ID NO: 23998 - protein, 154 aa, Artificial Sequence
  Synthetic polypeptide
ARAPRGPRPSVPLLRHPLRPEELSTVQILVNIRFGSEEGGPNRGSVHDGTAGPWPWEEVGPSRCGRIRRNHLQEDHLLHPEGCHPAGHRLHRGPPELQARTRRAHAGLLRGGEHLLPQRRQQPHPRPPLPGLPLQDLCTCRLPLLPGALWDPAR

SEQ ID NO: 23999 - protein, 639 aa, Artificial Sequence
  Synthetic polypeptide
TSGLAQKKAAPTEVLSMTAQPGPGHGKKLGHRGVDASGETTYKKTTSSTLKGAIQLGIGYTVGHLSSKPERDVLMQDFYVVESIFFPSEGSNLTPAHHFQDFRFKTYAPVAFRYFRELFGIRPDDYLYSLCNEPLIELSNPGASGSLFYVTSDDEFIIKTVMHKEAEFLQKLLPGYYMNLNQNPRTLLPKFYGLYCVQSGGKNIRVVVMNNILPRVVKMHLKFDLKGSTYKRRASKKEKEKSFPTYKDLDFMQDMPEGLLLDADTFSALVKTLQRDCLVLESFKIMDYSLLLGVHNIDQHERERQAQGAQSTSDEKRPVGQKALYSTAMESIQGGAARGEAIESDDTMGGIPAVNGRGERLLLHIGIIDILQSYRFIKKLEHTWKALVHDGDTVSVHRPSFYAERFFKFMSNTVFRKNSSLKSSPSKKGRGGALLAVKPLGPTAAFSASQIPSEREEAQYDLRGARSYPTLEDEGRPDLLPCTPPSFEEATTASIATTLSSTSLSIPERSPSETSEQPRYRRRTQSSGQDGRPQEEPPAEEDLQQITVQVEPACSVEIVVPKEEDAGVEASPAGASAAVEVETASQASDEEGAPASQASDEEDAPATDIYFPTDERSWVYSPLHYSAQAPPASDGESDT

SEQ ID NO: 24000 - protein, 67 aa, Artificial Sequence
  Synthetic polypeptide
RLSPPETYGSADVFSDHLLLSESSTRAKTVCATPAASPAPGRAQHSADPGEHQVWLRRRRPQQRFCP

SEQ ID NO: 24001 - protein, 611 aa, Artificial Sequence
  Synthetic polypeptide
TSGLAQKKAAPTEVLSMTAQPGPGHGKKLGHRGVDASGETTYKKTTSSTLKGAIQLGIGYTVGHLSSKPERDVLMQDFYVVESIFFPSEGSNLTPAHHFQDFRFKTYAPVAFRYFRELFGIRPDDYLYSLCNEPLIELSNPGASGSLFYVTSDDEFIIKTVMHKEAEFLQKLLPGYYMNLNQNPRTLLPKFYGLYCVQSGGKNIRVVVMNNILPRVVKMHLKFDLKGSTYKRRASKKEKEKSFPTYKDLDFMQDMPEGLLLDADTFSALVKTLQRDCLVLESFKIMDYSLLLGVHNIDQHERERQAQGAQSTSDEKRPVGQKALYSTAMESIQGGAARGEAIESDDTMGGIPAVNGRGERLLLHIGIIDILQSYRFIKKLEHTWKALVHDGDTVSVHRPSFYAERFFKFMSNTVFRKNSSLKSSPSKKGRGGALLAVKPLGPTAAFSASQIPSEREEAQYDLRGARSYPTLEDEGRPDLLPCTPPSFEEATTASIATTLSSTSLSIPERSPSETSEQPRYRRRTQSSGQDGRPQEEPPAEEDLQQITVQVEPACSVEIVVPKEEDAGVEASPAGASAAVEVETASQASDEEGAPASQASDEEDAPATDIYF

SEQ ID NO: 24002 - protein, 671 aa, Artificial Sequence
  Synthetic polypeptide
TSGLAQKKAAPTEVLSMTAQPGPGHGKKLGHRGVDASGETTYKKTTSSTLKGAIQLGIGYTVGHLSSKPERDVLMQDFYVVESIFFPSEGSNLTPAHHFQDFRFKTYAPVAFRYFRELFGIRPDDYLYSLCNEPLIELSNPGASGSLFYVTSDDEFIIKTVMHKEAEFLQKLLPGYYMNLNQNPRTLLPKFYGLYCVQSGGKNIRVVVMNNILPRVVKMHLKFDLKGSTYKRRASKKEKEKSFPTYKDLDFMQDMPEGLLLDADTFSALVKTLQRDCLVLESFKIMDYSLLLGVHNIDQHERERQAQGAQSTSDEKRPVGQKALYSTAMESIQGGAARGEAIESDDTMGGIPAVNGRGERLLLHIGIIDILQSYRFIKKLEHTWKALVHDGDTVSVHRPSFYAERFFKFMSNTVFRKNSSLKSSPSKKGRGGALLAVKPLGPTAAFSASQIPSEREEAQYDLRGARSYPTLEDEGRPDLLPCTPPSFEEATTASIATTLSSTSLSIPERSPSETSEQPRYRRRTQSSGQDGRPQEEPPAEEDLQQITVQVEPACSVEIVVPKEEDAGVEASPAGASAAVEVETASQASDEEGAPASQASDEEDAPATDIYFWRLWGPHAPTWPWRREGRAACLCPYPPHVVTPFPGTGLCASWSPDGTGGLGAMSCCVSVS

SEQ ID NO: 24003 - protein, 678 aa, Artificial Sequence
  Synthetic polypeptide
TSGLAQKKAAPTEVLSMTAQPGPGHGKKLGHRGVDASGETTYKKTTSSTLKGAIQLGIGYTVGHLSSKPERDVLMQDFYVVESIFFPSEGSNLTPAHHFQDFRFKTYAPVAFRYFRELFGIRPDDYLYSLCNEPLIELSNPGASGSLFYVTSDDEFIIKTVMHKEAEFLQKLLPGYYMNLNQNPRTLLPKFYGLYCVQSGGKNIRVVVMNNILPRVVKMHLKFDLKGSTYKRRASKKEKEKSFPTYKDLDFMQDMPEGLLLDADTFSALVKTLQRDCLVLESFKIMDYSLLLGVHNIDQHERERQAQGAQSTSDEKRPVGQKALYSTAMESIQGGAARGEAIESDDTMGGIPAVNGRGERLLLHIGIIDILQSYRFIKKLEHTWKALVHDGDTVSVHRPSFYAERFFKFMSNTVFRKNSSLKSSPSKKGRGGALLAVKPLGPTAAFSASQIPSEREEAQYDLRGARSYPTLEDEGRPDLLPCTPPSFEEATTASIATTLSSTSLSIPERSPSETSEQPRYRRRTQSSGQDGRPQEEPPAEEDLQQITVQVEPACSVEIVVPKEEDAGVEASPAGASAAVEVETASQASDEEGAPASQASDEEDAPATDIYFFTDGRYWIYSPRHRRLRAVTLSASGTVSDRSRPPWGEGAVPLGQQGAAGPRPEAQCLTSVVFQKGFG

SEQ ID NO: 24004 - protein, 15 aa, Artificial Sequence
  Synthetic polypeptide
EGRISPTFGGLGIQR

SEQ ID NO: 24005 - protein, 474 aa, Artificial Sequence
  Synthetic polypeptide
CKKAGYRLPLVDLASRDEPQKLSPKRDIYETELSQWVNMEEFKSHSPERSIFSAIWEGNCHFEQHQGQEEGYFRQLMINHENMPIFSQHTLLTQEFYDREKISECKKCRKIFSYHLFFSHHKRTHSKELSECKECTEIVNTPCLFKQQTIQNGDKCNECKECWKAFVHCSQLKHLRIHNGEKRYECNECGKAFNYGSELTLHQRIHTGEKPYECKECGKAFRQRSQLTQHQRLHTGEKPYECKQCGKAFIRGFQLTEHLRLHTGEKPYECKECGKTFRHRSHLTIHQRIHTGEKPYECRECGKAFSYHSSFSHHQKIHSGKKPYECHECGKAFCDGLQLTLHQRIHTGEKPYECKECGKTFRQCSHLKRHQRIHTGEKPHECMICGKAFRLHSHLIQHQRIHTGEKPYECKECGKAFSYHSSFSHHQRIHSGKKPYQCGKAFNHRLQLNLHQTLHTGEKPVRFPLLPPHPSLAS

SEQ ID NO: 24006 - protein, 110 aa, Artificial Sequence
  Synthetic polypeptide
TSHVVLDRRCWRKKYLLYHSIYWKFRNRQKPLHSVRRQDIAYLWWTWHPEMSPRSYLQKGIFMKQNYPSGLTWKNLKAIVLRDQFSALSGKATVILSNIRDKRRVILDNL

SEQ ID NO: 24007 - protein, 141 aa, Artificial Sequence
  Synthetic polypeptide
CKKAGYRLPLVDLASRDEPQKLSPKRDIYETELSQWVNMEEFKSHSPERSIFSAIWEGNCHFEQHQGQEEGYFRQLMINHENMPIFSQHTLLTQEFYDREKISECKKCRKIFSYHLFFSHHKRTHSKELSECKECTEIVNT

SEQ ID NO: 24008 - protein, 42 aa, Artificial Sequence
  Synthetic polypeptide
QESDHLQAKIPHRRCLRPSSVSPRRTACGAPTARPSACPGRG

SEQ ID NO: 24009 - protein, 18 aa, Artificial Sequence
  Synthetic polypeptide
VHSKKVTICKPRSPTGAA

SEQ ID NO: 24010 - protein, 43 aa, Artificial Sequence
  Synthetic polypeptide
PSASQDPPQALPETQLCVSSSYSLWSSDCKAISMPRQGLSWRA

SEQ ID NO: 24011 - protein, 65 aa, Artificial Sequence
  Synthetic polypeptide
PSASQDPPQALPETQLCVSSSYSLWSSDCKAISMPRQGLSWRAMEEDRPAGCRFCSRACTMREIF

SEQ ID NO: 24012 - protein, 23 aa, Artificial Sequence
  Synthetic polypeptide
GPAWWLTPIIPTLWEAEPVSSAR

SEQ ID NO: 24013 - protein, 30 aa, Artificial Sequence
  Synthetic polypeptide
SQHFGRPSQFQAPGSDPGTRGRHCYAEVDC

SEQ ID NO: 24014 - protein, 321 aa, Artificial Sequence
  Synthetic polypeptide
PGVVAHAYNPNTLGGRASFKRPVVILGPVADIAMQKLTAEMPDQFEIAETVSRTDSPSKIIKLDTVRVIAEKDKHALLDVTPSAIERLNYVQYYPIVVFFIPESRPALKALRQWLAPASRRSTRRLYAQAQKLRKHSSHLFTATIPLNGTSDTWYQELKAIIREQQTRPIWTAEDQLDGSLEDNLDLPHHGLADSSADLSCDSRVNSDYETDGEGGAYTDGEGYTDGEGGPYTDVDDEPPAPALARSSEPVQADESQSPRDRGRISAHQGAQVDSRHPQGQWRQDSMRTYEREALKKKFMRVHDAESSDEDGYDWGPATDL

SEQ ID NO: 24015 - protein, 5 aa, Artificial Sequence
  Synthetic polypeptide
TVCGV

SEQ ID NO: 24016 - protein, 30 aa, Artificial Sequence
  Synthetic polypeptide
ASWRAEETSRGAPEIHHGIPASGPPRQCAG

SEQ ID NO: 24017 - protein, 59 aa, Artificial Sequence
  Synthetic polypeptide
SRSPLWQFIGLGLWFVFSRGSTGWSWDPRHHGGLKKHQGEPQKFTTGSQPQARLDSVRG

SEQ ID NO: 24018 - protein, 14 aa, Artificial Sequence
  Synthetic polypeptide
GLSCRVSTWGKRWP

SEQ ID NO: 24019 - protein, 21 aa, Artificial Sequence
  Synthetic polypeptide
ASVSPSGTGGNGSCHEDCPAG

SEQ ID NO: 24020 - protein, 303 aa, Artificial Sequence
  Synthetic polypeptide
LWSHRAEFKPILNHLLVVQLKTCKSSEPQFPPLEQGVMAAVMRTVLQGEYLGQKVAVKNIKCDVTAQAFLDETAVMTKMQHENLVRLLGVILHQGLYIVMEHVSKGNLVNFLRTRGRALVNTAQLLQFSLHVAEGMEYLESKKLVHRDLAARNILVSEDLVAKVSDFGLAKAERKGLDSSRLPVKWTAPEALKHGKFTSKSDVWSFGVLLWEVFSYGRAPYPKMSLKEVSEAVEKGYRMEPPEGCPGPVHVLMSSCWEAEPARRPPFRKLAEKLARELRSAGAPASVSGQDADGSTSPRSQEP

SEQ ID NO: 24021 - protein, 302 aa, Artificial Sequence
  Synthetic polypeptide
LWSHRAEFKPILNHLLVVQLKTCKSSEPQFPPLEQGVMAAVMRTVLQGEYLGQKVAVKNIKCDVTAQAFLDETAVMTKMQHENLVRLLGVILHQGLYIVMEHVSKGNLVNFLRTRGRALVNTAQLLQFSLHVAEGMEYLESKKLVHRDLAARNILVSEDLVAKVSDFGLAKAERKGLDSSRLPVKWTAPEALKHGFTSKSDVWSFGVLLWEVFSYGRAPYPKMSLKEVSEAVEKGYRMEPPEGCPGPVHVLMSSCWEAEPARRPPFRKLAEKLARELRSAGAPASVSGQDADGSTSPRSQEP

SEQ ID NO: 24022 - protein, 148 aa, Artificial Sequence
  Synthetic polypeptide
LWSHRAEFKPILNHLLVVQLKTCKSSEPQFPPLEQGVMAAVMRTVLQGEYLGQKVAVKNIKCDVTAQAFLDETAVMTKMQHENLVRLLGVILHQGLYIVMEHVSKGNLVNFLRTRGRALVNTAQLLQFSLHVAEGMEYLESKKLVHRD

SEQ ID NO: 24023 - protein, 126 aa, Artificial Sequence
  Synthetic polypeptide
LWSHRAEFKPILNHLLVVQLKTCKSSEPQFPPLEQGVMAAVMRTVLQGEYLGQKVAVKNIKCDVTAQAFLDETAVMTKMQHENLVRLLGVILHQGLYIVMEHVSKGNLVNFLRTRGRALVNTAQLL

SEQ ID NO: 24024 - protein, 4 aa, Artificial Sequence
  Synthetic polypeptide
GLSC

SEQ ID NO: 24025 - protein, 19 aa, Artificial Sequence
  Synthetic polypeptide
ASVSPSGTGGNGSCHEDCP

SEQ ID NO: 24026 - protein, 46 aa, Artificial Sequence
  Synthetic polypeptide
LWSHRAEFKPILNHLLVVQLKTCKSSEPQFPPLEQGVMAAVMRTVL

SEQ ID NO: 24027 - protein, 305 aa, Artificial Sequence
  Synthetic polypeptide
MHGLSHLSSLICKALPPHIHPLPAGWLLNLQHLTLGAQIGEGEFGAVLQGEYLGQKVAVKNIKCDVTAQAFLDETAVMTKMQHENLVRLLGVILHQGLYIVMEHVSKGNLVNFLRTRGRALVNTAQLLQFSLHVAEGMEYLESKKLVHRDLAARNILVSEDLVAKVSDFGLAKAERKGLDSSRLPVKWTAPEALKHGKFTSKSDVWSFGVLLWEVFSYGRAPYPKMSLKEVSEAVEKGYRMEPPEGCPGPVHVLMSSCWEAEPARRPPFRKLAEKLARELRSAGAPASVSGQDADGSTSPRSQEP

SEQ ID NO: 24028 - protein, 23 aa, Artificial Sequence
  Synthetic polypeptide
ATFPASSAKPFLHTSTPSQRAGY

SEQ ID NO: 24029 - protein, 49 aa, Artificial Sequence
  Synthetic polypeptide
AWPEPPFQPHLQSPSSTHPPPPSGLVTEPAAFDIGSTDRRGRVWSCPAG

SEQ ID NO: 24030 - protein, 304 aa, Artificial Sequence
  Synthetic polypeptide
MHGLSHLSSLICKALPPHIHPLPAGWLLNLQHLTLGAQIGEGEFGAVLQGEYLGQKVAVKNIKCDVTAQAFLDETAVMTKMQHENLVRLLGVILHQGLYIVMEHVSKGNLVNFLRTRGRALVNTAQLLQFSLHVAEGMEYLESKKLVHRDLAARNILVSEDLVAKVSDFGLAKAERKGLDSSRLPVKWTAPEALKHGFTSKSDVWSFGVLLWEVFSYGRAPYPKMSLKEVSEAVEKGYRMEPPEGCPGPVHVLMSSCWEAEPARRPPFRKLAEKLARELRSAGAPASVSGQDADGSTSPRSQEP

SEQ ID NO: 24031 - protein, 150 aa, Artificial Sequence
  Synthetic polypeptide
MHGLSHLSSLICKALPPHIHPLPAGWLLNLQHLTLGAQIGEGEFGAVLQGEYLGQKVAVKNIKCDVTAQAFLDETAVMTKMQHENLVRLLGVILHQGLYIVMEHVSKGNLVNFLRTRGRALVNTAQLLQFSLHVAEGMEYLESKKLVHRD

SEQ ID NO: 24032 - protein, 128 aa, Artificial Sequence
  Synthetic polypeptide
MHGLSHLSSLICKALPPHIHPLPAGWLLNLQHLTLGAQIGEGEFGAVLQGEYLGQKVAVKNIKCDVTAQAFLDETAVMTKMQHENLVRLLGVILHQGLYIVMEHVSKGNLVNFLRTRGRALVNTAQLL

SEQ ID NO: 24033 - protein, 48 aa, Artificial Sequence
  Synthetic polypeptide
MHGLSHLSSLICKALPPHIHPLPAGWLLNLQHLTLGAQIGEGEFGAVL

SEQ ID NO: 24034 - protein, 47 aa, Artificial Sequence
  Synthetic polypeptide
AWPEPPFQPHLQSPSSTHPPPPSGLVTEPAAFDIGSTDRRGRVWSCP

SEQ ID NO: 24035 - protein, 17 aa, Artificial Sequence
  Synthetic polypeptide
TDLALLAVSSQTRSGVG

SEQ ID NO: 24036 - protein, 35 aa, Artificial Sequence
  Synthetic polypeptide
LCHLRLGREWAEEWRVGLRKLVAGHLCDSGASGVI

SEQ ID NO: 24037 - protein, 82 aa, Artificial Sequence
  Synthetic polypeptide
TWEAEVAVSRDHTIALQPGQQERNSISKKKNLDSRCEIISDGKMQLYRKHSCVTLHQRIHNGQKPYEWNTTDLRSLGLRNNL

SEQ ID NO: 24038 - protein, 29 aa, Artificial Sequence
  Synthetic polypeptide
AEITPLHSNLGNKSETPSQKKKIWIQDVK

SEQ ID NO: 24039 - protein, 49 aa, Artificial Sequence
  Synthetic polypeptide
FQLLGRLRQENCLNLGGGGCSEPRSHHCTPTWATRAKLHLKKKKFGFKM

SEQ ID NO: 24040 - protein, 648 aa, Artificial Sequence
  Synthetic polypeptide
TWEAEVAVSRDHTIALQPGQQERNSISKKKNLDSRCEIISDGKMQLYRKHSCVTLHQRIHNGQKPYECKQCQKSFSHLTELMVHQTIHTSEEPDQCEKFRKAFSHLTDLRKHQKINAREKPYECEECGKVFSYPANLAQHGKVHVEKPYECKECGEAFRTSRQLTVHHRFHYGEKPYECKECGKAFSVYGRLSRHQSIHTGEKPFECNKCGKSFRLKAGLKVHQSIHTGEKPHECKECGKAFRQFSHLVGHKRIHTGEKPYECKECGKGFTCRYQLTMHQRIYSGEKHYECKENGEAFSSGHQLTAPHTFESVEKPYKCEECGKAFSVHGRLTRHQGIHSGKKPYECNKCGKSFRLNSSLKIHQNIHTGEKPYKCKECGKAFSQRAHLAHHNRIHTGYKPFECKECGKSFRCASYLVIHERIHTGEKPYVCQECGKGFSYSHKLTIHRRVHTGEKPYECKECGKAFSVSGQLTQHLSIHSGKKPFECNKCGKSFRFISVLKAHQNIHSAEKPYECKECGKAFRHATSLIYHDRTHAGEKSYECKECGETFSHASHLIIHERIHTSDKPYECKRCGKAFHCASYLVRHESVHADGNPYMCEECGKAFNSSHELSIHHRVHTGEKPFKCNKCRRSFRLRSILEVHQRIHI

SEQ ID NO: 24041 - protein, 55 aa, Artificial Sequence
  Synthetic polypeptide
TWEAEVAVSRDHTIALQPGQQERNSISKKKNLDSRCEIISDGKMQLYRKHSCVTL

SEQ ID NO: 24042 - protein, 19 aa, Artificial Sequence
  Synthetic polypeptide
LLRRRTSNFALKIWIQDVK

SEQ ID NO: 24043 - protein, 79 aa, Artificial Sequence
  Synthetic polypeptide
SCNTNTATAHNEHGLTPTQTNLKLCTEDLDSRCEIISDGKMQLYRKHSCVTLHQRIHNGQKPYEWNTTDLRSLGLRNNL

SEQ ID NO: 24044 - protein, 645 aa, Artificial Sequence
  Synthetic polypeptide
SCNTNTATAHNEHGLTPTQTNLKLCTEDLDSRCEIISDGKMQLYRKHSCVTLHQRIHNGQKPYECKQCQKSFSHLTELMVHQTIHTSEEPDQCEKFRKAFSHLTDLRKHQKINAREKPYECEECGKVFSYPANLAQHGKVHVEKPYECKECGEAFRTSRQLTVHHRFHYGEKPYECKECGKAFSVYGRLSRHQSIHTGEKPFECNKCGKSFRLKAGLKVHQSIHTGEKPHECKECGKAFRQFSHLVGHKRIHTGEKPYECKECGKGFTCRYQLTMHQRIYSGEKHYECKENGEAFSSGHQLTAPHTFESVEKPYKCEECGKAFSVHGRLTRHQGIHSGKKPYECNKCGKSFRLNSSLKIHQNIHTGEKPYKCKECGKAFSQRAHLAHHNRIHTGYKPFECKECGKSFRCASYLVIHERIHTGEKPYVCQECGKGFSYSHKLTIHRRVHTGEKPYECKECGKAFSVSGQLTQHLSIHSGKKPFECNKCGKSFRFISVLKAHQNIHSAEKPYECKECGKAFRHATSLIYHDRTHAGEKSYECKECGETFSHASHLIIHERIHTSDKPYECKRCGKAFHCASYLVRHESVHADGNPYMCEECGKAFNSSHELSIHHRVHTGEKPFKCNKCRRSFRLRSILEVHQRIHI

SEQ ID NO: 24045 - protein, 52 aa, Artificial Sequence
  Synthetic polypeptide
SCNTNTATAHNEHGLTPTQTNLKLCTEDLDSRCEIISDGKMQLYRKHSCVTL

SEQ ID NO: 24046 - protein, 23 aa, Artificial Sequence
  Synthetic polypeptide
GQVRWLTPVIPALWEAEAGGSRV

SEQ ID NO: 24047 - protein, 575 aa, Artificial Sequence
  Synthetic polypeptide
SQHFGRPRRADHECEIISYIEVPTYETDISSTQLQSIYKREKLYECKKCQKKFSSGYQLILHHRFHVIERPYECKECGKNFRSGYQLTLHQRFHTGEKPYECTECGKNFRSGYQLTVHQRFHTGEKTYECRQCGKAFIYASHIVQHERIHTGGKPYECQECGRAFSQGGHLRIHQRVHTGEKPYKCKECGKTFSRRSNLVEHGQFHTDEKPYICEKCGKAFRRGHQLTVHQRVHTGKKPYECKECGKGYTTASYFLLHQRIHKGGKPYECKECKKTFTLYRNLTRHQNIHTGEKLFECKQCGKTYTTGSKLFQHQKTHTGEKPYECKECGKAFSLYGYLKQHQKIHTGMKHFECKECKKTFTLYRNLTRHQNIHTGKKLFECQECGKAYSTGSNLIQHRKTHTGEKPYKCKECGKTFSLHGYLNQHQKIHTGMKPYECKVCRKTFTFYRNLTLHQSIHTDEKPFECKECGKTFRRSSHLTAHQSIHADKKPYECKECGKAFKMYGYLTQHQKIHTGGKPYECKECGKAFSRASNLVQHERIHTGEKPYVCKQCGKTFRYGSALKAHQRIHRSIKV

SEQ ID NO: 24048 - protein, 24 aa, Artificial Sequence
  Synthetic polypeptide
PGAVAHACNPSTLGGRGGRITSVR

SEQ ID NO: 24049 - protein, 53 aa, Artificial Sequence
  Synthetic polypeptide
SQHFGRPRRADHECEIISYIEVPTYETDISSTQLQSIYKREKLYECKKCQKKF

SEQ ID NO: 24050 - protein, 589 aa, Artificial Sequence
  Synthetic polypeptide
GQVRWLTPVIPALWEAEAGGSRDLDLQCEIISYIEVPTYETDISSTQLQSIYKREKLYECKKCQKKFSSGYQLILHHRFHVIERPYECKECGKNFRSGYQLTLHQRFHTGEKPYECTECGKNFRSGYQLTVHQRFHTGEKTYECRQCGKAFIYASHIVQHERIHTGGKPYECQECGRAFSQGGHLRIHQRVHTGEKPYKCKECGKTFSRRSNLVEHGQFHTDEKPYICEKCGKAFRRGHQLTVHQRVHTGKKPYECKECGKGYTTASYFLLHQRIHKGGKPYECKECKKTFTLYRNLTRHQNIHTGEKLFECKQCGKTYTTGSKLFQHQKTHTGEKPYECKECGKAFSLYGYLKQHQKIHTGMKHFECKECKKTFTLYRNLTRHQNIHTGKKLFECQECGKAYSTGSNLIQHRKTHTGEKPYKCKECGKTFSLHGYLNQHQKIHTGMKPYECKVCRKTFTFYRNLTLHQSIHTDEKPFECKECGKTFRRSSHLTAHQSIHADKKPYECKECGKAFKMYGYLTQHQKIHTGGKPYECKECGKAFSRASNLVQHERIHTGEKPYVCKQCGKTFRYGSALKAHQRIHRSIKV

SEQ ID NO: 24051 - protein, 20 aa, Artificial Sequence
  Synthetic polypeptide
SQHFGRPRRADHEIWIYSVR

SEQ ID NO: 24052 - protein, 27 aa, Artificial Sequence
  Synthetic polypeptide
PGAVAHACNPSTLGGRGGRITRFGFTV

SEQ ID NO: 24053 - protein, 67 aa, Artificial Sequence
  Synthetic polypeptide
GQVRWLTPVIPALWEAEAGGSRDLDLQCEIISYIEVPTYETDISSTQLQSIYKREKLYECKKCQKKF

SEQ ID NO: 24054 - protein, 33 aa, Artificial Sequence
  Synthetic polypeptide
GRARWLTLVIPALWEAKNMPITSAWMRSWGQWL

SEQ ID NO: 24055 - protein, 16 aa, Artificial Sequence
  Synthetic polypeptide
SQHFGRPRTCQLLRRG

SEQ ID NO: 24056 - protein, 1286 aa, Artificial Sequence
  Synthetic polypeptide
PGTVAHACNPSTLGGQEHANYFGVDEKLGPVAVSIKREKLEDHKEHGPQYQYRIIFRTRELITLRGSILEDATPTATKHGTGRGLPLKDALEYVIPELNIHCLRLALNTPKVTEQLLKLDEQGLCRKHKVGILYCKAGQSSEEEMYNNEEAGPAFEEFLSLIGEKVCLKGFTKYAAQLDVKTDSTGTHSLYTMYQDYEIMFHVSTLLPYTPNNRQQLLRKRHIGNDIVTIIFQEPGALPFTPKNIRSHFQHVFIIVRVHNPCTDNVCYSMAVTRSKDAPPFGPPIPSGTTFRKSDVFRDFLLAKVINAENAAHKSDKFHTMATRTRQEYLKDLAENCVSNTPIDSTGKFNLISLTSKKKEKTKARAGAEQHSAGAIAWRVVAQDYAQGVEIDCILGISNEFVVLLDLRTKEVVFNCYCGDVIGWTPDSSTLKIFYGRGDHIFLQATEGSVEDIREIVQRLKVMTSGWETVDMTLRRNGLGQLGFHVKYDGTVAEVEDYGFAWQAGLRQGSRLVEICKVAVVTLTHDQMIDLLRTSVTVKVVIIPPFEDGTPRRGWPETYDMNTSEPKTEQESITPGGRPPYRSNAPWQWSGPASHNSLPASKWATPTTPGHAQSLSRPLKQTPIVPFRESQPLHSKRPVSFPETPYTVSPAGADRVPPYRQPSGSFSTPGSATYVRYKPSPERYTAAPHPLLSLDPHFSHDGTSSGDSSSGGLTSQESTMERQKPEPLWHVPAQARLSAIAGSSGNKHPSRQDAAGKDSPNRHSKGEPQYSSHSSSNTLSSNASSSHSDDRWFDPLDPLEPEQDPLSKGGSSDSGIDTTLYTSSPSCMSLAKAPRPAKPHKPPGSMGLCGGGREAAGRSHHADRRREVSPAPAVAGQSKGYRPKLYSSGSSTPTGLAGGSRDPPRQPSDMGSRVGYPAQVYKTASAETPRPSQLAQPSPFQLSASVPKSFFSKQPVRNKHPTGWKRTEEPPPRPLPFSDPKKQVDTNTKNVFGQPRLRASLRDLRSPRKNYKSTIEDDLKKLIIMDNLGPEQERDTGQSPQKGLQRTLSDESLCSGRREPSFASPAGLEPGLPSDVLFTSTCAFPSSTLPARRQHQHPHPPVGPGATPAAGSGFPEKKSTISASELSLADGRDRPLRRLDPGLMPLPDTAAGLEWSSLVNAAKAYEVQRAVSLFSLNDPALSPDIPPAHSPVHSHLSLERGPPTPRTTPTMSEEPPLDLTGKVYQLEVMLKQLHTDLQKEKQDKVVLQSEVASLRQNNQRLQEESQAASEQLRKFAEIFCREKKEL

SEQ ID NO: 24057 - protein, 60 aa, Artificial Sequence
  Synthetic polypeptide
PGTVAHACNPSTLGGQEHANYFGVDEKLGPVAVSIKREKLEDHKEHGPQYQYRIIFRTRE

SEQ ID NO: 24058 - protein, 50 aa, Artificial Sequence
  Synthetic polypeptide
LSSCTPSRLHGNPLPLHDVPGLRDHVPCLHPAPLHPQQQAAAATEEAHRK

SEQ ID NO: 24059 - protein, 1133 aa, Artificial Sequence
  Synthetic polypeptide
VQPLWKTVQHIQVQFEETLLCDSAPALLADSTGTHSLYTMYQDYEIMFHVSTLLPYTPNNRQQLLRKRHIGNDIVTIIFQEPGALPFTPKNIRSHFQHVFIIVRVHNPCTDNVCYSMAVTRSKDAPPFGPPIPSGTTFRKSDVFRDFLLAKVINAENAAHKSDKFHTMATRTRQEYLKDLAENCVSNTPIDSTGKFNLISLTSKKKEKTKARAGAEQHSAGAIAWRVVAQDYAQGVEIDCILGISNEFVVLLDLRTKEVVFNCYCGDVIGWTPDSSTLKIFYGRGDHIFLQATEGSVEDIREIVQRLKVMTSGWETVDMTLRRNGLGQLGFHVKYDGTVAEVEDYGFAWQAGLRQGSRLVEICKVAVVTLTHDQMIDLLRTSVTVKVVIIPPFEDGTPRRGWPETYDMNTSEPKTEQESITPGGRPPYRSNAPWQWSGPASHNSLPASKWATPTTPGHAQSLSRPLKQTPIVPFRESQPLHSKRPVSFPETPYTVSPAGADRVPPYRQPSGSFSTPGSATYVRYKPSPERYTAAPHPLLSLDPHFSHDGTSSGDSSSGGLTSQESTMERQKPEPLWHVPAQARLSAIAGSSGNKHPSRQDAAGKDSPNRHSKGEPQYSSHSSSNTLSSNASSSHSDDRWFDPLDPLEPEQDPLSKGGSSDSGIDTTLYTSSPSCMSLAKAPRPAKPHKPPGSMGLCGGGREAAGRSHHADRRREVSPAPAVAGQSKGYRPKLYSSGSSTPTGLAGGSRDPPRQPSDMGSRVGYPAQVYKTASAETPRPSQLAQPSPFQLSASVPKSFFSKQPVRNKHPTGWKRTEEPPPRPLPFSDPKKQVDTNTKNVFGQPRLRASLRDLRSPRKNYKSTIEDDLKKLIIMDNLGPEQERDTGQSPQKGLQRTLSDESLCSGRREPSFASPAGLEPGLPSDVLFTSTCAFPSSTLPARRQHQHPHPPVGPGATPAAGSGFPEKKSTISASELSLADGRDRPLRRLDPGLMPLPDTAAGLEWSSLVNAAKAYEVQRAVSLFSLNDPALSPDIPPAHSPVHSHLSLERGPPTPRTTPTMSEEPPLDLTGKVYQLEVMLKQLHTDLQKEKQDKVVLQSEVASLRQNNQRLQEESQAASEQLRKFAEIFCREKKEL

SEQ ID NO: 24060 - protein, 54 aa, Artificial Sequence
  Synthetic polypeptide
GEVQWLTLVIPALWEAEYGCDPIQRRSSFRPPHPQWNHIPQIRRLQRLLAGQGD

SEQ ID NO: 24061 - protein, 1025 aa, Artificial Sequence
  Synthetic polypeptide
SQHFGRLSMAVTRSKDAPPFGPPIPSGTTFRKSDVFRDFLLAKVINAENAAHKSDKFHTMATRTRQEYLKDLAENCVSNTPIDSTGKFNLISLTSKKKEKTKARAGAEQHSAGAIAWRVVAQDYAQGVEIDCILGISNEFVVLLDLRTKEVVFNCYCGDVIGWTPDSSTLKIFYGRGDHIFLQATEGSVEDIREIVQRLKVMTSGWETVDMTLRRNGLGQLGFHVKYDGTVAEVEDYGFAWQAGLRQGSRLVEICKVAVVTLTHDQMIDLLRTSVTVKVVIIPPFEDGTPRRGWPETYDMNTSEPKTEQESITPGGRPPYRSNAPWQWSGPASHNSLPASKWATPTTPGHAQSLSRPLKQTPIVPFRESQPLHSKRPVSFPETPYTVSPAGADRVPPYRQPSGSFSTPGSATYVRYKPSPERYTAAPHPLLSLDPHFSHDGTSSGDSSSGGLTSQESTMERQKPEPLWHVPAQARLSAIAGSSGNKHPSRQDAAGKDSPNRHSKGEPQYSSHSSSNTLSSNASSSHSDDRWFDPLDPLEPEQDPLSKGGSSDSGIDTTLYTSSPSCMSLAKAPRPAKPHKPPGSMGLCGGGREAAGRSHHADRRREVSPAPAVAGQSKGYRPKLYSSGSSTPTGLAGGSRDPPRQPSDMGSRVGYPAQVYKTASAETPRPSQLAQPSPFQLSASVPKSFFSKQPVRNKHPTGWKRTEEPPPRPLPFSDPKKQVDTNTKNVFGQPRLRASLRDLRSPRKNYKSTIEDDLKKLIIMDNLGPEQERDTGQSPQKGLQRTLSDESLCSGRREPSFASPAGLEPGLPSDVLFTSTCAFPSSTLPARRQHQHPHPPVGPGATPAAGSGFPEKKSTISASELSLADGRDRPLRRLDPGLMPLPDTAAGLEWSSLVNAAKAYEVQRAVSLFSLNDPALSPDIPPAHSPVHSHLSLERGPPTPRTTPTMSEEPPLDLTGKVYQLEVMLKQLHTDLQKEKQDKVVLQSEVASLRQNNQRLQEESQAASEQLRKFAEIFCREKKEL

SEQ ID NO: 24062 - protein, 34 aa, Artificial Sequence
  Synthetic polypeptide
GRAQWLTPVIPALWEAETGESLEVRSSRPAWPTW

SEQ ID NO: 24063 - protein, 58 aa, Artificial Sequence
  Synthetic polypeptide
SQHFGRPRQVNHLRSGVRDQPGQHGDDQWLGDGGHDASAERARAAGLPREVRRHGGRG

SEQ ID NO: 24064 - protein, 836 aa, Artificial Sequence
  Synthetic polypeptide
GQEFETSLANMVMTSGWETVDMTLRRNGLGQLGFHVKYDGTVAEVEDYGFAWQAGLRQGSRLVEICKVAVVTLTHDQMIDLLRTSVTVKVVIIPPFEDGTPRRGWPETYDMNTSEPKTEQESITPGGRPPYRSNAPWQWSGPASHNSLPASKWATPTTPGHAQSLSRPLKQTPIVPFRESQPLHSKRPVSFPETPYTVSPAGADRVPPYRQPSGSFSTPGSATYVRYKPSPERYTAAPHPLLSLDPHFSHDGTSSGDSSSGGLTSQESTMERQKPEPLWHVPAQARLSAIAGSSGNKHPSRQDAAGKDSPNRHSKGEPQYSSHSSSNTLSSNASSSHSDDRWFDPLDPLEPEQDPLSKGGSSDSGIDTTLYTSSPSCMSLAKAPRPAKPHKPPGSMGLCGGGREAAGRSHHADRRREVSPAPAVAGQSKGYRPKLYSSGSSTPTGLAGGSRDPPRQPSDMGSRVGYPAQVYKTASAETPRPSQLAQPSPFQLSASVPKSFFSKQPVRNKHPTGWKRTEEPPPRPLPFSDPKKQVDTNTKNVFGQPRLRASLRDLRSPRKNYKSTIEDDLKKLIIMDNLGPEQERDTGQSPQKGLQRTLSDESLCSGRREPSFASPAGLEPGLPSDVLFTSTCAFPSSTLPARRQHQHPHPPVGPGATPAAGSGFPEKKSTISASELSLADGRDRPLRRLDPGLMPLPDTAAGLEWSSLVNAAKAYEVQRAVSLFSLNDPALSPDIPPAHSPVHSHLSLERGPPTPRTTPTMSEEPPLDLTGKVYQLEVMLKQLHTDLQKEKQDKVVLQSEVASLRQNNQRLQEESQAASEQLRKFAEIFCREKKEL

SEQ ID NO: 24065 - protein, 130 aa, Artificial Sequence
  Synthetic polypeptide
GQEFETSLANMVMTSGWETVDMTLRRNGLGQLGFHVKYDGTVAEVEDYGFAWQAGLRQGSRLVEICKVAVVTLTHDQMIDLLRTSVTVKVVIIPPFEDGTPRRWSLALSPRLKCSGVISTHCNLHLPGSS

SEQ ID NO: 24066 - protein, 42 aa, Artificial Sequence
  Synthetic polypeptide
GPPLCSLNLPGTLLPQGFSTGCSVCLECSSPSHHLSLGALAG

SEQ ID NO: 24067 - protein, 192 aa, Artificial Sequence
  Synthetic polypeptide
TFQAHSCLRDLALAVPSAWNVPPPATISASELSLADGRDRPLRRLDPGLMPLPDTAAGLEWSSLVNAAKAYEVQRAVSLFSLNDPALSPDIPPAHSPVHSHLSLERGPPTPRTTPTMSEEPPLDLTGKVYQLEVMLKQLHTDLQKEKQDKVVLQSEVASLRQNNQRLQEESQAASEQLRKFAEIFCREKKEL

SEQ ID NO: 24068 - protein, 37 aa, Artificial Sequence
  Synthetic polypeptide
HWLFRLPGMFLPQPPSQPRSSRWLMGGTAPCGAWTLG

SEQ ID NO: 24069 - protein, 223 aa, Artificial Sequence
  Synthetic polypeptide
DQPGQHDFCLVSKVVGRCRASMPRWWYNVTDGSCQLFVYGGCDGNSNNYLTKEECLKKCATVTENATGDLATSRNAADSSVPSAPRRQDSEDHSSDMFNYEEYCTANAVTGPCRASFPRWYFDVERNSCNNFIYGGCRGNKNSYRSEEACMLRCFRQQENPPLPLGSKVVVLAGLFVMVLILFLGASMVYLIRVARRNQERALRTVWSSGDDKEQLVKNTYVL

SEQ ID NO: 24070 - protein, 71 aa, Artificial Sequence
  Synthetic polypeptide
QVLWLMPMIPALSEAEAAGSLETSLGNMTSAWCRRWWADAGPPCLGGGTMSLTDPASCLCMGAVTETAIIT

SEQ ID NO: 24071 - protein, 145 aa, Artificial Sequence
  Synthetic polypeptide
DQPGQHDFCLVSKVVGRCRASMPRWWYNVTDGSCQLFVYGGCDGNSNNYLTKEECLKKCATVTAPRRQDSEDHSSDMFNYEEYCTANAVTGPCRASFPRWYFDVERNSCNNFIYGGCRGNKNSYRSEEACMLRCFRQQENPPLPL

SEQ ID NO: 24072 - protein, 305 aa, Artificial Sequence
  Synthetic polypeptide
QGSSLAGAPVCCELLGVVECFWWTEGTRLQSSKRRIPVSQPGMADPHQLFDDTSSAQSRGYGAQRAPGGLSYPAASPTPHAAFLADPVSNMAMAYGSSLAAQGKELVDKNIDRFIPITKLKYYFAVDTMYVGRKLGLLFFPYLHQDWEVQYQQDTPVAPRFDVNAPDLYIPAMAFITYVLVAGLALGTQDRFSPDLLGLQASSALAWLTLEVLAILLSLYLVTVNTDLTTIDLVAFLGYKYVGMIGGVLMGLLFGKIGYYLVLGWCCVAIFVFMFPLLPGAVAHACNPSTLGGRGGRITRSGRCG

SEQ ID NO: 24073 - protein, 51 aa, Artificial Sequence
  Synthetic polypeptide
NAFGGQREPGCNPRSGGSLCPSRAWPTPTSFSMTQVQPRAGAMGPSGHLVA

SEQ ID NO: 24074 - protein, 38 aa, Artificial Sequence
  Synthetic polypeptide
VAGGCRMLLVDRGNQVAILEAEDPCVPAGHGRPPPAFR

SEQ ID NO: 24075 - protein, 325 aa, Artificial Sequence
  Synthetic polypeptide
QGSSLAGAPVCCELLGVVECFWWTEGTRLQSSKRRIPVSQPGMADPHQLFDDTSSAQSRGYGAQRAPGGLSYPAASPTPHAAFLADPVSNMAMAYGSSLAAQGKELVDKNIDRFIPITKLKYYFAVDTMYVGRKLGLLFFPYLHQDWEVQYQQDTPVAPRFDVNAPDLYIPAMAFITYVLVAGLALGTQDRFSPDLLGLQASSALAWLTLEVLAILLSLYLVTVNTDLTTIDLVAFLGYKYVGMIGGVLMGLLFGKIGYYLVLGWCCVAIFVFMIRTLRLKILADAAAEGVPVRGARNQLRMYLTMAVAAAQPMLMYWLTFHLVR

SEQ ID NO: 24076 - protein, 308 aa, Artificial Sequence
  Synthetic polypeptide
QGSSLAGAPVCCELLGVVECFWWTEGTRLQSSKRRIPVSQPGMADPHQLFDDTSSAQSRGYGAQRAPGGLSYPAASPTPHAAFLADPVSNMAMAYGSSLAAQGKELVDKNIDRFIPITKLKYYFAVDTMYVGRKLGLLFFPYLHQDWEVQYQQDTPVAPRFDVNAPDLYIPAMAFITYVLVAGLALGTQDRFSPDLLGLQASSALAWLTLEVLAILLSLYLVTVNTDLTTIDLVAFLGYKYVGMIGGVLMGLLFGKIGYYLVLGWCCVAIFVFMFPLLPGAVAHACNPSTLGGRGGRITRSGDQDHPG

SEQ ID NO: 24077 - protein, 222 aa, Artificial Sequence
  Synthetic polypeptide
QGSSLAGAPVCCELLGVVECFWWTEGTRLQSSKRRIPVSQPGMADPHQLFDDTSSAQSRGYGAQRAPGGLSYPAASPTPHAAFLADPVSNMAMAYGSSLAAQGKELVDKNIDRFIPITKLKYYFAVDTMYVGRKLGLLFFPYLHQDWEVQYQQDTPVAPRFDVNAPDLYIPAMAFITYVLVAGLALGTQDRMIGGVLMGLLFGKIGYYLVLGWCCVAIFVFM

SEQ ID NO: 24078 - protein, 259 aa, Artificial Sequence
  Synthetic polypeptide
QGSSLAGAPVCCELLGVVECFWWTEGTRLQSSKRRIPVSQPGMADPHQLFDDTSSAQSRGYGAQRAPGGLSYPAASPTPHAAFLADPVSNMAMAYGSSLAAQGKELVDKNIDRFIPITKLKYYFAVDTMYVGRKLGLLFFPYLHQDWEVQYQQDTPVAPRFDVNAPDLYIPAMAFITYVLVAGLALGTQDRFSPDLLGLQASSALAWLTLEVLAILLSLYLVTVNTDLTTIDLVAFLGYKYVGMIGGVLMGLLFGKIGY

SEQ ID NO: 24079 - protein, 281 aa, Artificial Sequence
  Synthetic polypeptide
QGSSLAASKRRIPVSQPGMADPHQLFDDTSSAQSRGYGAQRAPGGLSYPAASPTPHAAFLADPVSNMAMAYGSSLAAQGKELVDKNIDRFIPITKLKYYFAVDTMYVGRKLGLLFFPYLHQDWEVQYQQDTPVAPRFDVNAPDLYIPAMAFITYVLVAGLALGTQDRFSPDLLGLQASSALAWLTLEVLAILLSLYLVTVNTDLTTIDLVAFLGYKYVGMIGGVLMGLLFGKIGYYLVLGWCCVAIFVFMFPLLPGAVAHACNPSTLGGRGGRITRSGRCG

SEQ ID NO: 24080 - protein, 45 aa, Artificial Sequence
  Synthetic polypeptide
RALHLQPRSGGSLCPSRAWPTPTSFSMTQVQPRAGAMGPSGHLVA

SEQ ID NO: 24081 - protein, 26 aa, Artificial Sequence
  Synthetic polypeptide
GLFTCSLEAEDPCVPAGHGRPPPAFR

SEQ ID NO: 24082 - protein, 301 aa, Artificial Sequence
  Synthetic polypeptide
QGSSLAASKRRIPVSQPGMADPHQLFDDTSSAQSRGYGAQRAPGGLSYPAASPTPHAAFLADPVSNMAMAYGSSLAAQGKELVDKNIDRFIPITKLKYYFAVDTMYVGRKLGLLFFPYLHQDWEVQYQQDTPVAPRFDVNAPDLYIPAMAFITYVLVAGLALGTQDRFSPDLLGLQASSALAWLTLEVLAILLSLYLVTVNTDLTTIDLVAFLGYKYVGMIGGVLMGLLFGKIGYYLVLGWCCVAIFVFMIRTLRLKILADAAAEGVPVRGARNQLRMYLTMAVAAAQPMLMYWLTFHLVR

SEQ ID NO: 24083 - protein, 284 aa, Artificial Sequence
  Synthetic polypeptide
QGSSLAASKRRIPVSQPGMADPHQLFDDTSSAQSRGYGAQRAPGGLSYPAASPTPHAAFLADPVSNMAMAYGSSLAAQGKELVDKNIDRFIPITKLKYYFAVDTMYVGRKLGLLFFPYLHQDWEVQYQQDTPVAPRFDVNAPDLYIPAMAFITYVLVAGLALGTQDRFSPDLLGLQASSALAWLTLEVLAILLSLYLVTVNTDLTTIDLVAFLGYKYVGMIGGVLMGLLFGKIGYYLVLGWCCVAIFVFMFPLLPGAVAHACNPSTLGGRGGRITRSGDQDHPG

SEQ ID NO: 24084 - protein, 198 aa, Artificial Sequence
  Synthetic polypeptide
QGSSLAASKRRIPVSQPGMADPHQLFDDTSSAQSRGYGAQRAPGGLSYPAASPTPHAAFLADPVSNMAMAYGSSLAAQGKELVDKNIDRFIPITKLKYYFAVDTMYVGRKLGLLFFPYLHQDWEVQYQQDTPVAPRFDVNAPDLYIPAMAFITYVLVAGLALGTQDRMIGGVLMGLLFGKIGYYLVLGWCCVAIFVFM

SEQ ID NO: 24085 - protein, 235 aa, Artificial Sequence
  Synthetic polypeptide
QGSSLAASKRRIPVSQPGMADPHQLFDDTSSAQSRGYGAQRAPGGLSYPAASPTPHAAFLADPVSNMAMAYGSSLAAQGKELVDKNIDRFIPITKLKYYFAVDTMYVGRKLGLLFFPYLHQDWEVQYQQDTPVAPRFDVNAPDLYIPAMAFITYVLVAGLALGTQDRFSPDLLGLQASSALAWLTLEVLAILLSLYLVTVNTDLTTIDLVAFLGYKYVGMIGGVLMGLLFGKIGY

SEQ ID NO: 24086 - protein, 241 aa, Artificial Sequence
  Synthetic polypeptide
TGSPMNAWRRMVSSLLSLQDHPARGQQKVGIEQSFGYGYTTPLTDAGKAFSIAFALLGVPTTMLLLTASAQRLSLLLTHVPLSWLSMRWGWDPRRAACWHLVALLGVVVTVCFLVPAVIFAHLEEAWSFLDAFYFCFISLSTIGLGDYVPGEAPGQPYRALYKVLVTVYLFLGLVAMVLVLQTFRHVSDLHGLTELILLPPPCPASFNADEDDRVDILGPQPESHQQLSASSHTDYASIPR

SEQ ID NO: 24087 - protein, 26 aa, Artificial Sequence
  Synthetic polypeptide
VSRIIQRGVSRKWALNKALAMGTQRH

SEQ ID NO: 24088 - protein, 12 aa, Artificial Sequence
  Synthetic polypeptide
TKLWLWVHNATD

SEQ ID NO: 24089 - protein, 96 aa, Artificial Sequence
  Synthetic polypeptide
LMPVIPALWEAKGGTWSSGSSEEWRPDPQPTPLAYSLLETSGAAAPGSNCQSRLTMTMTTWTSPPLQRTHLLHFPPSPSSVLHQTRVLGAWGMMGS

SEQ ID NO: 24090 - protein, 49 aa, Artificial Sequence
  Synthetic polypeptide
SQHFGRPRAAHGVQEAPRNGDQTPSQHRSPTASSRPQEQQPQEATVRVV

SEQ ID NO: 24091 - protein, 514 aa, Artificial Sequence
  Synthetic polypeptide
PGVVTHACNPSTLGGQGRHMEFRKLRGMETRPPANTARLQPPRDLRSSSPRKQLSESSDDDYDDVDIPTPAEDTPPPLPPKPKFRSPSDEGPGSMGDDGQLSPGVLVRCASGPPPNSPRPGPPPSTSSPHLTAHSEPSLWNPPSRELDKPPLLPPKKEKMKRKGCALLVKLFNGCPLRIHSTAAWTHPSTKDQHLLLGAEEGIFILNRNDQEATLEMLFPSRTTWVYSINNVLMSLSGKTPHLYSHSILGLLERKETRAGNPIAHISPHRLLARKNMVSTKIQDTKGCRACCVAEGASSGGPFLCGALETSVVLLQWYQPMNKFLLVRQVLFPLPTPLSVFALLTGPGSELPAVCIGVSPGRPGKSVLFHTVRFGALSCWLGEMSTEHRGPVQVTQVEEDMVMVLMDGSVKLVTPEGSPVRGLRTPEIPMTEAVEAVAMVGGQLQAFWKHGVQVWALGSDQLLQELRDPTLTFRLLGSPRLECSGTISPHCNLLLPGSSNSPASASRVAGITGL

SEQ ID NO: 24092 - protein, 502 aa, Artificial Sequence
  Synthetic polypeptide
PGVVTHACNPSTLGGQGRHMEFRKLRGMETRPPANTARLQPPRDLRSSSPRKQLSESSDDDYDDVDIPTPAEDTPPPLPPKPKFRSPSDEGPGSMGDDGQLSPGVLVRCASGPPPNSPRPGPPPSTSSPHLTAHSEPSLWNPPSRELDKPPLLPPKKEKMKRKGCALLVKLFNGCPLRIHSTAAWTHPSTKDQHLLLGAEEGIFILNRNDQEATLEMLFPSRTTWVYSINNVLMSLSGKTPHLYSHSILGLLERKETRAGNPIAHISPHRLLARKNMVSTKIQDTKGCRACCVAEGASSGGPFLCGALETSVVLLQWYQPMNKFLLVRQVLFPLPTPLSVFALLTGPGSELPAVCIGVSPGRPGKSVLFHTVRFGALSCWLGEMSTEHRGPVQVTQVEEDMVMVLMDGSVKLVTPEGSPVRGLRTPEIPMTEAVEAVAMVGGQLQAFWKHGVQVWALGSDQLLQELRDPTLTFRLLGSPRPVVVETRPVDDPTAPSNLYIQE

SEQ ID NO: 24093 - protein, 122 aa, Artificial Sequence
  Synthetic polypeptide
LMPVIPALWEAKGGTWSSGSSEEWRPDPQPTPLAYSLLETSGAAAPGQGPQGGWGGGWNVDKAPKAHTCHPSGSNCQSRLTMTMTTWTSPPLQRTHLLHFPPSPSSVLHQTRVLGAWGMMGS

SEQ ID NO: 24094 - protein, 75 aa, Artificial Sequence
  Synthetic polypeptide
SQHFGRPRAAHGVQEAPRNGDQTPSQHRSPTASSRPQEQQPQVRDPREDGEGAGMWTRPPRLIPVTLQEATVRVV

SEQ ID NO: 24095 - protein, 528 aa, Artificial Sequence
  Synthetic polypeptide
PGVVTHACNPSTLGGQGRHMEFRKLRGMETRPPANTARLQPPRDLRSSSPRSGTPGRMGRGLECGQGPQGSYLSPFRKQLSESSDDDYDDVDIPTPAEDTPPPLPPKPKFRSPSDEGPGSMGDDGQLSPGVLVRCASGPPPNSPRPGPPPSTSSPHLTAHSEPSLWNPPSRELDKPPLLPPKKEKMKRKGCALLVKLFNGCPLRIHSTAAWTHPSTKDQHLLLGAEEGIFILNRNDQEATLEMLFPSRTTWVYSINNVLMSLSGKTPHLYSHSILGLLERKETRAGNPIAHISPHRLLARKNMVSTKIQDTKGCRACCVAEGASSGGPFLCGALETSVVLLQWYQPMNKFLLVRQVLFPLPTPLSVFALLTGPGSELPAVCIGVSPGRPGKSVLFHTVRFGALSCWLGEMSTEHRGPVQVTQVEEDMVMVLMDGSVKLVTPEGSPVRGLRTPEIPMTEAVEAVAMVGGQLQAFWKHGVQVWALGSDQLLQELRDPTLTFRLLGSPRPVVVETRPVDDPTAPSNLYIQE

SEQ ID NO: 24096 - protein, 26 aa, Artificial Sequence
  Synthetic polypeptide
KLAGCDDLHGMVQLPPAEGRHTDREH

SEQ ID NO: 24097 - protein, 861 aa, Artificial Sequence
  Synthetic polypeptide
PGVMTFTAWCNSHLRKAGTQIENIDEDFRDGLKLMLLLEVISGERLPKPERGKMRVHKINNVNKALDFIASKGVKLVSIGAEEIVDGNAKMTLGMIWTIILRFAIQDISVEETSAKEGLLLWCQRKTAPYKNVNVQNFHISWKDGLAFNALIHRHRPELIEYDKLRKDDPVTNLNNAFEVAEKYLDIPKMLDAEDIVNTARPDEKAIMTYVSSFYHAFSGAQKAETAANRICKVLAVNQENEHLMEDYEKLASDLLEWIRRTIPWLEDRVPQKTIQEMQQKLEDFRDYRRVHKPPKVQEKCQLEINFNTLQTKLRLSNRPAFMPSEGKMVSDINNGWQHLEQAEKGYEEWLLNEIRRLERLDHLAEKFRQKASIHEAWTDGKEAMLKHRDYETATLSDIKALIRKHEAFESDLAAHQDRVEQIAAIAQELNELDYYDSHNVNTRCQKICDQWDALGSLTHSRREALEKTEKQLEAIDQLHLEYAKRAAPFNNWMESAMEDLQDMFIVHTIEEIEGLISAHDQFKSTLPDADREREAILAIHKEAQRIAESNHIKLSGSNPYTTVTPQIINSKWEKVQQLVPKRDHALLEEQSKQQSNEHLRRQFASQANVVGPWIQTKMEEIGRISIEMNGTLEDQLSHLKQYERSIVDYKPNLDLLEQQHQLIQEALIFDNKHTNYTMEHIRVGWEQLLTTIARTINEVENQILTRDAKGISQEQMQEFRASFNHFDKDHGGALGPEEFKACLISLGYDVENDRQGEAEFNRIMSLVDPNHSGLVTFQAFIDFMSRETTDTDTADQVIASFKVLAGDKNFITAEELRRELPPDQAEYCIARMAPYQGPDAVPGALDYKSFSTALYGESDL

SEQ ID NO: 24098 - protein, 471 aa, Artificial Sequence
  Synthetic polypeptide
PGVMTFTAWCNSHLRKAGTQIENIDEDFRDGLKLMLLLEVHELDYYDSHNVNTRCQKICDQWDALGSLTHSRREALEKTEKQLEAIDQLHLEYAKRAAPFNNWMESAMEDLQDMFIVHTIEEIEGLISAHDQFKSTLPDADREREAILAIHKEAQRIAESNHIKLSGSNPYTTVTPQIINSKWEKVQQLVPKRDHALLEEQSKQQSNEHLRRQFASQANVVGPWIQTKMEEIGRISIEMNGTLEDQLSHLKQYERSIVDYKPNLDLLEQQHQLIQEALIFDNKHTNYTMEHIRVGWEQLLTTIARTINEVENQILTRDAKGISQEQMQEFRASFNHFDKDHGGALGPEEFKACLISLGYDVENDRQGEAEFNRIMSLVDPNHSGLVTFQAFIDFMSRETTDTDTADQVIASFKVLAGDKNFITAEELRRELPPDQAEYCIARMAPYQGPDAVPGALDYKSFSTALYGESDL

SEQ ID NO: 24099 - protein, 52 aa, Artificial Sequence
  Synthetic polypeptide
PGVMTFTAWCNSHLRKAGTQIENIDEDFRDGLKLMLLLEVISEELSWQTGPP

SEQ ID NO: 24100 - protein, 53 aa, Artificial Sequence
  Synthetic polypeptide
SCHCTPAWVTDLCHISGGCKEGSQLEEPSSSRAMCLPQARALLSTSRWAPQGT

SEQ ID NO: 24101 - protein, 48 aa, Artificial Sequence
  Synthetic polypeptide
QTCAIFREAARRAHSSKNHHHQGLCASHRQELCYQLQGGLLRGHSSAH

SEQ ID NO: 24102 - protein, 146 aa, Artificial Sequence
  Synthetic polypeptide
GLIMPLHSSLGDRPVPYFGRLQGGLTARRTIIIKGYVPPTGKSFAINFKVGSSGDIALHINPRMGNGTVVRNSLLNGSWGSEEKKITHNPFGPGQFFDLSIRCGLDRFKVYANGQHLFDFAHRLSAFQRVDTLEIQGDVTLSYVQI

SEQ ID NO: 24103 - protein, 145 aa, Artificial Sequence
  Synthetic polypeptide
IPVSTKMTKVSQPVPYFGRLQGGLTARRTIIIKGYVPPTGKSFAINFKVGSSGDIALHINPRMGNGTVVRNSLLNGSWGSEEKKITHNPFGPGQFFDLSIRCGLDRFKVYANGQHLFDFAHRLSAFQRVDTLEIQGDVTLSYVQI

SEQ ID NO: 24104 - protein, 47 aa, Artificial Sequence
  Synthetic polypeptide
QKLASLCHISGGCKEGSQLEEPSSSRAMCLPQARALLSTSRWAPQGT

SEQ ID NO: 24105 - protein, 48 aa, Artificial Sequence
  Synthetic polypeptide
PACAIFREAARRAHSSKNHHHQGLCASHRQELCYQLQGGLLRGHSSAH

SEQ ID NO: 24106 - protein, 227 aa, Artificial Sequence
  Synthetic polypeptide
GMVAHTCNPSALGCQGIDLMDMASDILQPKGDDVARISWYLRDIITRYQETFNVIERCPKPVIAAVHGGCIGGGVDLVTACDIRYCAQDAFFQVKEVDVGLAADVGTLQRLPKVIGNQSLVNELAFTARKMMADEALGSGLVSRVFPDKEVMLDAALALAAEISSKSPVAVQSTKVNLLYSRDHSVAESLNYVASWNMSMLQTQDLVKSVQATTENKELKTVTFSKL

SEQ ID NO: 24107 - protein, 18 aa, Artificial Sequence
  Synthetic polypeptide
AWWLTRVIPVLWDAKVLT

SEQ ID NO: 24108 - protein, 9 aa, Artificial Sequence
  Synthetic polypeptide
SQCFGMPRY

SEQ ID NO: 24109 - protein, 169 aa, Artificial Sequence
  Synthetic polypeptide
GMVAHTCNPSALGCQGIDLMDMASDILQPKGDDVARISWYLRDIITRYQETFNVIERCPKPVIAAVHGGCIGGGVDLVTACDIRYCAQDAFFQVKEVDVGLAADVGTLQRLPKVIGNQSRVFPDKEVMLDAALALAAEISSKSPVAVQSTKVNLLYSRDHSVAESLNYV

SEQ ID NO: 24110 - protein, 80 aa, Artificial Sequence
  Synthetic polypeptide
GMVAHTCNPSALGCQGIDLMDMASDILQPKGDDVARISWYLRDIITRYQETFNVIERCPKPVIAAVHGGCIGGGESAAIL

SEQ ID NO: 24111 - protein, 50 aa, Artificial Sequence
  Synthetic polypeptide
GMVAHTCNPSALGCQGIDLMDMASDILQPKGDDVARISWYLRDIITRYQE

SEQ ID NO: 24112 - protein, 57 aa, Artificial Sequence
  Synthetic polypeptide
GASLPGRPVSEVRRPSARQPPRMRSEEPLHPAAAPSGKRTTMTRTKPLPPQLSTSGA

SEQ ID NO: 24113 - protein, 18 aa, Artificial Sequence
  Synthetic polypeptide
EVRSLSTRQPPRLGRELR

SEQ ID NO: 24114 - protein, 512 aa, Artificial Sequence
  Synthetic polypeptide
GASPPGSRPVWEENYDDPHKTPASPVVHIRGLIDGVVEADLVEALQEFGPISYVVVMPKKRQALVEFEDVLGACNAVNYAADNQIYIAGHPAFVNYSTSQKISRPGDSDDSRSVNSVLLFTILNPIYSITTDVLYTICNPCGPVQRIVIFRKNGVQAMVEFDSVQSAQRAKASLNGADIYSGCCTLKIEYAKPTRLNVFKNDQDTWDYTNPNLSGQGDPGSNPNKRQRQPPLLGDHPAEYGGPHGGYHSHYHDEGYGPPPPHYEGRRMGPPVGGHRRGPSRYGPQYGHPPPPPPPPEYGPHADSPVLMVYGLDQSKMNCDRVFNVFCLYGNVEKVKFMKSKPGAAMVEMADGYAVDRAITHLNNNFMFGQKLNVCVSKQPAIMPGQSYGLEDGSCSYKDFSESRNNRFSTPEQAAKNRIQHPSNVLHFFNAPLEVTEENFFEICDELGVKRPSSVKVFSGKSERSSSGLLEWESKSDALETLGFLNHYQMKNPNGPYPYTLKLCFSTAQHAS

SEQ ID NO: 24115 - protein, 211 aa, Artificial Sequence
  Synthetic polypeptide
GASPPGSRPVWEENYDDPHKTPASPVVHIRGLIDGVVEADLVEALQEFGPISYVVVMPKKRQALVEFEDVLGACNAVNYAADNQIYIAGHPAFVNYSTSQKISRPGDSDDSRSVNSVLLFTILNPIYSITTDVLYTICNPCGPVQRIVIFRKNGVQAMVEFDSVQSAQRAKASLNGADIYSGCCTLKIEYAKPTRLNVFKNDQDTWDYTNP

SEQ ID NO: 24116 - protein, 186 aa, Artificial Sequence
  Synthetic polypeptide
GASPPGSRPVWEENYDDPHKTPASPVVHIRGLIDGVVEADLVEALQEFGPISYVVVMPKKRQALVEFEDVLGACNAVNYAADNQIYIAGHPAFVNYSTSQKISRPGDSDDSRSVNSVLLFTILNPIYSITTDVLYTICNPCGPVQRIVIFRKNGVQAMVEFDSVQSAQRAKASLNGADIYSGCCTL

SEQ ID NO: 24117 - protein, 28 aa, Artificial Sequence
  Synthetic polypeptide
GASLPGRPVSEVRRPSARQPPRMRRELR

SEQ ID NO: 24118 - protein, 501 aa, Artificial Sequence
  Synthetic polypeptide
EENYDDPHKTPASPVVHIRGLIDGVVEADLVEALQEFGPISYVVVMPKKRQALVEFEDVLGACNAVNYAADNQIYIAGHPAFVNYSTSQKISRPGDSDDSRSVNSVLLFTILNPIYSITTDVLYTICNPCGPVQRIVIFRKNGVQAMVEFDSVQSAQRAKASLNGADIYSGCCTLKIEYAKPTRLNVFKNDQDTWDYTNPNLSGQGDPGSNPNKRQRQPPLLGDHPAEYGGPHGGYHSHYHDEGYGPPPPHYEGRRMGPPVGGHRRGPSRYGPQYGHPPPPPPPPEYGPHADSPVLMVYGLDQSKMNCDRVFNVFCLYGNVEKVKFMKSKPGAAMVEMADGYAVDRAITHLNNNFMFGQKLNVCVSKQPAIMPGQSYGLEDGSCSYKDFSESRNNRFSTPEQAAKNRIQHPSNVLHFFNAPLEVTEENFFEICDELGVKRPSSVKVFSGKSERSSSGLLEWESKSDALETLGFLNHYQMKNPNGPYPYTLKLCFSTAQHAS

SEQ ID NO: 24119 - protein, 57 aa, Artificial Sequence
  Synthetic polypeptide
GAPLPGRHPVWEVRSVSARPPRLRSEETLRPAAAPYEKRTTMTRTKPLPPQLSTSGA

SEQ ID NO: 24120 - protein, 200 aa, Artificial Sequence
  Synthetic polypeptide
EENYDDPHKTPASPVVHIRGLIDGVVEADLVEALQEFGPISYVVVMPKKRQALVEFEDVLGACNAVNYAADNQIYIAGHPAFVNYSTSQKISRPGDSDDSRSVNSVLLFTILNPIYSITTDVLYTICNPCGPVQRIVIFRKNGVQAMVEFDSVQSAQRAKASLNGADIYSGCCTLKIEYAKPTRLNVFKNDQDTWDYTNP

SEQ ID NO: 24121 - protein, 175 aa, Artificial Sequence
  Synthetic polypeptide
EENYDDPHKTPASPVVHIRGLIDGVVEADLVEALQEFGPISYVVVMPKKRQALVEFEDVLGACNAVNYAADNQIYIAGHPAFVNYSTSQKISRPGDSDDSRSVNSVLLFTILNPIYSITTDVLYTICNPCGPVQRIVIFRKNGVQAMVEFDSVQSAQRAKASLNGADIYSGCCTL

SEQ ID NO: 24122 - protein, 35 aa, Artificial Sequence
  Synthetic polypeptide
QSQTVAESSVWWELESPHPQASPTFALHPPASMTT

SEQ ID NO: 24123 - protein, 44 aa, Artificial Sequence
  Synthetic polypeptide
AVMAPLHSSLGDRARPSQSHLFGGSWNLHIRRHPRLSLSIHRPL

SEQ ID NO: 24124 - protein, 327 aa, Artificial Sequence
  Synthetic polypeptide
WRHCTPAWVTEPDRRRVICLVGAGISTSAGIPDFRSPSTGLYDNLEKYHLPYPEAIFEISYFKKHPEPFFALAKELYPGQFKPTICHYFMRLLKDKGLLLRCYTQNIDTLERIAGLEQEDLVEAHGTFYTSHCVSASCRHEYPLSWMKEKIFSEVTPKCEDCQSLVKPDIVFFGESLPARFFSCMQSDFLKVDLLLVMGTSLQVQPFASLISKAPLSTPRLLINKEKAGQSDPFLGMIMGLGGGMDFDSKKAYRDVAWLGECDQGCLALAELLGWKKELEDLVRREHASIDAQSGAGVPNPSTSASPKKSPPPAKDEARTTEREKPQ

SEQ ID NO: 24125 - protein, 209 aa, Artificial Sequence
  Synthetic polypeptide
WRHCTPAWVTEPDRRRVICLVGAGISTSAGIPDFRSPSTGLYDNLEKYHLPYPEAIFEISYFKKHPEPFFALAKELYPGQFKPTICHYFMRLLKDKGLLLRCYTQNIDTLERIAGLEQEDLVEAHGTFYTSHCVSASCRHEYPLSWMKEKIFSEVTPKCEDCQSLVKPDIVFFGESLPARFFSCMQSDFLKVDLLLVMGTSLQGRGLAG

SEQ ID NO: 24126 - protein, 212 aa, Artificial Sequence
  Synthetic polypeptide
WRHCTPAWVTEPDRRRVICLVGAGISTSAGIPDFRSPSTGLYDNLEKYHLPYPEAIFEISYFKKHPEPFFALAKELYPGQFKPTICHYFMRLLKDKGLLLRCYTQNIDTLERIAGLEQEDLVEAHGTFYTSHCVSASCRHEYPLSWMKEKIFSEVTPKCEDCQSLVKPDIVFFGESLPARFFSCMQSDFLKVDLLLVMGTSLQVQPFASLIS

SEQ ID NO: 24127 - protein, 86 aa, Artificial Sequence
  Synthetic polypeptide
WRHCTPAWVTEPDRRRVICLVGAGISTSAGIPDFRSPSTGLYDNLEKYHLPYPEAIFEISYFKKHPEPFFALAKELYPGQFKFPHL

SEQ ID NO: 24128 - protein, 144 aa, Artificial Sequence
  Synthetic polypeptide
WRHCTPAWVTEPDRRRVICLVGAGISTSAGIPDFRSPSTGLYDNLEKYHLPYPEAIFEISYFKKHPEPFFALAKELYPGQFKPTICHYFMRLLKDKGLLLRCYTQNIDTLERIAGLEQEDLVEAHGTFYTSHCVSASCRHEYPL

SEQ ID NO: 24129 - protein, 105 aa, Artificial Sequence
  Synthetic polypeptide
WRHCTPAWVTEPDRRRVICLVGAGISTSAGIPDFRSPSTGLYDNLEKYHLPYPEAIFEISYFKKHPEPFFALAKELYPGQFKPTICHYFMRLLKDKGLLLRCYTQ

SEQ ID NO: 24130 - protein, 53 aa, Artificial Sequence
  Synthetic polypeptide
WRHCTPAWVTEPDRRRVICLVGAGISTSAGIPDFRSPSTGLYDNLEKYHLPYP

SEQ ID NO: 24131 - protein, 48 aa, Artificial Sequence
  Synthetic polypeptide
WRHCTPAWVTEPDRRRVICLVGAGISTSAGIPDFRSPSTGLYDNLEKY

SEQ ID NO: 24132 - protein, 64 aa, Artificial Sequence
  Synthetic polypeptide
SQRFGRLRREDHLRPAAGASSASRQGAICWCRHPCPCKGWWSRGPDLCYPSVHLQSPGGLLPEM

SEQ ID NO: 24133 - protein, 52 aa, Artificial Sequence
  Synthetic polypeptide
GQLLEPVLLLGKERFAGVDIRVRVKGGGHVAQIYAIRQSISKALVAYYQKCE

SEQ ID NO: 24134 - protein, 33 aa, Artificial Sequence
  Synthetic polypeptide
PVIPALWEAEAGGSPEASCWSQFCFSARSDLLV

SEQ ID NO: 24135 - protein, 48 aa, Artificial Sequence
  Synthetic polypeptide
SQRFGRLRREDHLRPAAGASSASRQGAICWCRHPCPCKGWWSRGPDLW

SEQ ID NO: 24136 - protein, 104 aa, Artificial Sequence
  Synthetic polypeptide
GQLLEPVLLLGKERFAGVDIRVRVKGGGHVAQIYGESQELGAWRRWLWEGGLHSAPVPFNCVSFSQLSVSPSPKPWWPITRNMWMRLPRRRSKTSSSSMTGPCW

SEQ ID NO: 24137 - protein, 66 aa, Artificial Sequence
  Synthetic polypeptide
SQRFGRLRREDHLRPAAGASSASRQGAICWCRHPCPCKGWWSRGPDLCYPSVHLQSPGGLLPEICG

SEQ ID NO: 24138 - protein, 98 aa, Artificial Sequence
  Synthetic polypeptide
GQLLEPVLLLGKERFAGVDIRVRVKGGGHVAQIYAIRQSISKALVAYYQKYVDEASKKEIKDILIQYDRTLLVADPRRCESKKFGGPGARARYQKSYR

SEQ ID NO: 24139 - protein, 54 aa, Artificial Sequence
  Synthetic polypeptide
GQLLEPVLLLGKERFAGVDIRVRVKGGGHVAQIYAIRQSISKALVAYYQKCECG

SEQ ID NO: 24140 - protein, 85 aa, Artificial Sequence
  Synthetic polypeptide
REQMDNPRIDPGGFSGPQEHWQRGIPHSLPAELSAGLQQGLPPPPYLQSVREPRFSLHPQPGRQHLKEGHSEARGVGHGQHQCQG

SEQ ID NO: 24141 - protein, 5405 aa, Artificial Sequence
  Synthetic polypeptide
WISVQRQLYSDGNRWTTQGLTQEASVDLKNTGREEFLTAFLQNYQLAYSKAYPRLLISSLSESPASVSILSQADNTSKKVTVRPGESVMVNISAKAEMIGSKIFQHAVVIHSDYAISVQALNAKPDTAELTLLRPIQALGTEYFVLTPPGTSARNVKEFAVVAGAAGASVSVTLKGSVTFNGKFYPAGDVLRVTLQPYNVAQLQSSVDLSGSKVTASSPVAVLSGHSCAQKHTTCNHVVEQLLPTSAWGTHYVVPTLASQSRYDLAFVVASQATKLTYNHGGITGSRGLQAGDVVEFEVRPSWPLYLSANVGIQVLLFGTGAIRNEVTYDPYLVLIPDVAAYCPAYVVKSVPGCEGVALVVAQTKAISGLTIDGHAVGAKLTWEAVPGSEFSYAEVELGTADMIHTAEATTNLGLLTFGLAKAIGYATAADCGRTVLSPVEPSCEGMQCAAGQRCQVVGGKAGCVAESTAVCRAQGDPHYTTFDGRRYDMMGTCSYTMVELCSEDDTLPAFSVEAKNEHRGSRRVSYVGLVTVRAYSHSVSLTRGEVGFVLVDNQRSRLPVSLSEGRLRVYQSGPRAVVELVFGLVVTYDWDCQLALSLPARFQDQVCGLCGNYNGDPADDFLTPDGALAPDAVEFASSWKLDDGDYLCEDGCQNNCPACTPGQAQHYEGDRLCGMLTKLDGPFAVCHDTLDPRPFLEQCVYDLCVVGGERLSLCRGLSAYAQACLELGISVGDWRSPANCPLSCPANSRYELCGPACPTSCNGAAAPSNCSGRPCVEGCVCLPGFVASGGACVPASSCGCTFQGLQLAPGQEVWADELCQRRCTCNGATHQVTCRDKQSCPAGERCSVQNGLLGCYPDRFGTCQGSGDPHYVSFDGRRFDFMGTCTYLLVGSCGQNAALPAFRVLVENEHRGSQTVSYTRAVRVEARGVKVAVRREYPGQVLVDDVLQYLPFQAADGQVQVFRQGRDAVVRTDFGLTVTYDWNARVTAKVPSSYAEALCGLCGNFNGDPADDLALRGGGQAANALAFGNSWQEETRPGCGATEPGDCPKLDSLVAQQLQSKNECGILADPKGPFRECHSKLDPQGAVRDCVYDRCLLPGQSGPLCDALATYAAACQAAGATVHPWRSEELCPLSCPPHSHYEACSYGCPLSCGDLPVPGGCGSECHEGCVCDEGFALSGESCLPLASCGCVHQGTYHPPGQTFYPGPGCDSLCHCQEGGLVSCESSSCGPHEACQPSGGSLGCVAVGSSTCQASGDPHYTTFDGRRFDFMGTCVYVLAQTCGTRPGLHRFAVLQENVAWGNGRVSVTRVITVQVANFTLRLEQRQWKVTVNGVDMKLPVVLANGQIRASQHGSDVVIETDFGLRVAYDLVYYVRVTVPGNYYQQMCGLCGNYNGDPKDDFQKPNGSQAGNANEFGNSWEEVVPDSPCLPPTPCPPGSEDCIPSHKCPPELEKKYQKEEFCGLLSSPTGPLSSCHKLVDPQGPLKDCIFDLCLGGGNLSILCSNIHAYVSACQAAGGHVEPWRTETFCPMECPPNSHYELCADTCSLGCSALSAPPQCQDGCAEGCQCDSGFLYNGQACVPIQQCGCYHNGVYYEPEQTVLIDNCRQQCTCHAGKGMVCQEHSCKPGQVCQPSGGILSCVTKDPCHGVTCRPQETCKEQGGQGVCLPNYEATCWLWGDPHYHSFDGRKFDFQGTCNYVLATTGCPGVSTQGLTPFTVTTKNQNRGNPAVSYVRVVTVAALGTNISIHKDEIGKVRVNGVLTALPVSVADGRISVTQGASKALLVADFGLQVSYDWNWRVDVTLPSSYHGAVCGLCGNMDRNPNNDQVFPNGTLAPSIPIWGGSWRAPGWDPLCWDECRGSCPTCPEDRLEQYEGPGFCGPLAPGTGGPFTTCHAHVPPESFFKGCVLDVCMGGGDRDILCKALASYVAACQAAGVVIEDWRAQVGCEITCPENSHYEVCGSPCPASCPSPAPLTTPAVCEGPCVEGCQCDAGFVLSADRCVPLNNGCGCWANGTYHEAGSEFWADGTCSQWCRCGPGGGSLVCTPASCGLGEVCGLLPSGQHGCQPVSTAECQAWGDPHYVTLDGHRFNFQGTCEYLLSAPCHGPPLGAENFTVTVANEHRGSQAVSYTRSVTLQIYNHSLTLSARWPRKLQVDGVFVTLPFQLDSLLHAHLSGADVVVTTTSGLSLAFDGDSFVRLRVPAAYAGSLCGLCGNYNQDPADDLKAVGGKPAGWQVGGAQGCGECVSKPCPSPCTPEQQESFGGPDACGVISATDGPLAPCHGLVPPAQYFQGCLLDACQVQGHPGGLCPAVATYVAACQAAGAQLREWRRPDFCPFQCPAHSHYELCGDSCPGSCPSLSAPEGCESACREGCVCDAGFVLSGDTCVPVGQCGCLHDDRYYPLGQTFYPGPGCDSLCRCREGGEVSCEPSSCGPHETCRPSGGSLGCVAVGSTTCQASGDPHYTTFDGRRFDFMGTCVYVLAQTCGTRPGLHRFAVLQENVAWGNGRVSVTRVITVQVANFTLRLEQRQWKVTVNGVDMKLPVVLANGQIRASQHGSDVVIETDFGLRVAYDLVYYVRVTVPGNYYQLMCGLCGNYNGDPKDDFQKPNGSQAGNANEFGNSWEEVVPDSPCLPPPTCPPGSEGCIPSEECPPELEKKYQKEEFCGLLSSPTGPLSSCHKLVDPQGPLKDCIFDLCLGGGNLSILCSNIHAYVSACQAAGGQVEPWRNETFCPMECPQNSHYELCADTCSLGCSALSAPLQCPDGCAEGCQCDSGFLYNGQACVPIQQCGCYHNGAYYEPEQTVLIDNCRQQCTCHVGKVVVCQEHSCKPGQVCQPSGGILSCVNKDPCHGVTCRPQETCKEQGGQGVCLPNYEATCWLWGDPHYHSFDGRKFDFQGTCNYVLATTGCPGVSTQGLTPFTVTTKNQNRGNPAVSYVRVVTVAALGTNISIHKDEIGKVRVNGVLTALPVSVADGRISVTQGASKALLVADFGLQVSYDWNWRVDVTLPSSYHGAVCGLCGNMDRNPNNDQVFPNGTLAPSIPIWGGSWRAPGWDPLCWDECRGSCPTCPEDRLEQYEGPGFCGPLAPGTGGPFTTCHAHVPPESFFKGCVLDVCMGGGDRDILCKALASYVAACQAAGVVIEDWRAQVGCEITCPENSHYEVCGPPCPASCPSPAPLTTPAVCEGPCVEGCQCDAGFVLSADRCVPLNNGCGCWANGTYHEAGSEFWADGTCSQWCRCGPGGGSLVCTPASCGLGEVCGLLPSGQHGCQPVSTAECQAWGDPHYVTLDGHRFDFQGTCEYLLSAPCHGPPLGAENFTVTVANEHRGSQAVSYTRSVTLQIYNHSLTLSARWPRKLQVDGVFVTLPFQLDSLLHAHLSGADVVVTTTSGLSLAFDGDSFVRLRVPAAYAGSLCGLCGNYNQDPADDLKAVGGKPAGWQVGGAQGCGECVSKPCPSPCTPEQQESFGGPDACGVISATDGPLAPCHGLVPPAQYFQGCLLDACQVQGHPGGLCPAVATYVAACQAAGAQLREWRRPDFCPFQCPAHSHYELCGDSCPGSCPSLSAPEGCESACREGCVCDAGFVLSGDTCVPVGQCGCLHDDRYYPLGQTFYPGPGCDSLCRCREGGEVSCEPSSCGPHETCRPSGGSLGCVAVGSTTCQASGDPHYTTFDGHRFDFMGTCVYVLAQTCGTRPGLHRFAVLQENVAWGNGRVSVTRVITVQVANFTLRLEQRQWKVTVNGVDMKLPVVLANGQIRASQHGSDVVIETDFGLRVAYDLVYYVRVTVPGNYYQLMCGLCGNYNGDPKDDFQKPNGSQAGNANEFGNSWEEVVPDSPCLPPPTCPPGSAGCIPSDKCPPELEKKYQKEEFCGLLSSPTGPLSSCHKLVDPQGPLKDCIFDLCLGGGNLSILCSNIHAYVSACQAAGGHVEPWRNETFCPMECPQNSHYELCADTCSLGCSALSAPLQCPDGCAEGCQCDSGFLYNGQACVPIQQCGCYHNGVYYEPEQTVLIDNCRQQCTCHVGKVVVCQEHSCKPGQVCQPSGGILSCVTKDPCHGVTCRPQETCKEQGGQGVCLPNYEATCWLWGDPHYHSFDGRKFDFQGTCNYVLATTGCPGVSTQGLTPFTVTTKNQNRGNPAVSYVRVVTVAALGTNISIHKDEIGKVRVNGVLTALPVSVADGRISVAQGASKALLVADFGLQVSYDWNWRVDVTLPSSYHGAVCGLCGNMDRNPNNDQVFPNGTLAPSIPIWGGSWRAPGWDPLCWDECRGSCPTCPEDRLEQYEGPGFCGPLSSGTGGPFTTCHAHVPPESFFKGCVLDVCMGGGDRDILCKALASYVAACQAAGVVIEDWRAQVGCEITCPENSHYEVCGPPCPASCPSPAPLTTPAVCEGPCVEGCQCDAGFVLSADRCVPLNNGCGCWANGTYHEAGSEFWADGTCSQWCRCGPGGGSLVCTPASCGLGEVCGLLPSGQHGCQPVSTAECQAWGDPHYVTLDGHRFDFQGTCEYLLSAPCHGPPLGAENFTVTVANEHRGSQAVSYTRSVTLQIYNHSLTLSARWPRKLQVDGVFVALPFQLDSLLHAHLSGADVVVTTTSGLSLAFDGDSFVRLRVPAAYAASLCGLCGNYNQDPADDLKAVGGKPAGWQVGGAQGCGECVSKPCPSPCTPEQQESFGGPDACGVISATDGPLAPCHGLVPPAQYFQGCLLDACQVQGHPGGLCPAVATYVAACQAAGAQLGEWRRPDFCPLQCPAHSHYELCGDSCPVSCPSLSAPEGCESACREGCVCDAGFVLSGDTCVPVGQCGCLHDGRYYPLGEVFYPGPECERRCECGPGGHVTCQEGAACGPHEECRLEDGVQACHATGCGRCLANGGIHYITLDGRVYDLHGSCSYVLAQVCHPKPGDEDFSIVLEKNAAGDLQRLLVTVAGQVVSLAQGQQVTVDGEAVALPVAVGRVRVTAEGRNMVLQTTKGLRLLFDGDAHLLMSIPSPFRGRLCGLCGNFNGNWSDDFVLPNGSAASSVETFGAAWRAPGSSKGCGEGCGPQGCPVCLAEETAPYESNEACGQLRNPQGPFATCQAVLSPSEYFRQCVYDLCAQKGDKAFLCRSLAAYTAACQAAGVAVKPWRTDSFCPLHCPAHSHYSICTRTCQGSCAALSGLTGCTTRCFEGCECDDRFLLSQGVCIPVQDCGCTHNGRYLPVNSSLLTSDCSERCSCSSSSGLTCQAAGCPPGRVCEVKAEARNCWATRGLCVLSVGANLTTFDGARGATTSPGVYELSSRCPGLQNTIPWYRVVAEVQICHGKTEAVGQVHIFFQDGMVTLTPNKGVWVNGLRVDLPAEKLASVSVSRTPDGSLLVRQKAGVQVWLGANGKVAVIVSNDHAGKLCGACGNFDGDQTNDWHDSQEKPAMEKWRAQDFSPCYG

SEQ ID NO: 24142 - protein, 38 aa, Artificial Sequence
  Synthetic polypeptide
ETEFLMDTRAPYSVLTHPDGSLFSASCTVTGTDGQPKD

SEQ ID NO: 24143 - protein, 51 aa, Artificial Sequence
  Synthetic polypeptide
GWNQDGRIGTAPVYSSQHERCRRWVISAFPSEIWSQNMDLRKYLQKMIFLK

SEQ ID NO: 24144 - protein, 14 aa, Artificial Sequence
  Synthetic polypeptide
FLHFHLRFGVKIWT

SEQ ID NO: 24145 - protein, 52 aa, Artificial Sequence
  Synthetic polypeptide
STYRSFGAVRRSCCGRHRSSASRRSSCGGGSRSWQNVRWTSWNGSCTCSCAS

SEQ ID NO: 24146 - protein, 10 aa, Artificial Sequence
  Synthetic polypeptide
TEVLTGASEP

SEQ ID NO: 24147 - protein, 563 aa, Artificial Sequence
  Synthetic polypeptide
MKYLQELRSREEELLRAAQEQRFQEEQLRRREQELAEREMDIVERELHLLMCQLSQEKPRVRKRKGNFKRSRLLKLREGGSHISLPSGFEHKITVQASPTLDKRKGSDGASPPASPSIIPRLRAIRLTPVDCGGSSSGSSSGGSGTWSRGGPPKKEELVGGKKKGRTWGPSSTLQKERVGGEERLKGLGEGSKQWSSSAPNLGKSPKHTPIAPGFASLNEMEEFAEAEDGGSSVPPSPYSTPSYLSVPLPAEPSPGARAPWEPTPSAPPARWGHGARRRCDLALLGCATLLGAVGLGADVAEARAADGEEQRRWLDGLFFPRAGRFPRGLSPPARPHGRREDVGPGLGLAPSATLVSLSSVSDCNSTRSLLRSDSDEAAPAAPSPPPSPPAPTPTPSPSTNPLVDLELESFKKDPRQSLTPTHVTAACAVSRGHRRTPSDGALGQRGPPEPAGHGPGPRDLLDFPRLPDPQALFPARRRPPEFPGRPTTLTFAPRPRPAASRPRLDPWKLVSFGRTLTISPPSRPDTPESPGPPSVQPTLLDMDMEGQNQDSTVPLCGAHGSH

SEQ ID NO: 24148 - protein, 31 aa, Artificial Sequence
  Synthetic polypeptide
CLGLALKYYSRNEERARGEKDGDTRFAKHRL

SEQ ID NO: 24149 - protein, 499 aa, Artificial Sequence
  Synthetic polypeptide
NTTAETKRGQEERRTGIQDSQSIGFEHKITVQASPTLDKRKGSDGASPPASPSIIPRLRAIRLTPVDCGGSSSGSSSGGSGTWSRGGPPKKEELVGGKKKGRTWGPSSTLQKERVGGEERLKGLGEGSKQWSSSAPNLGKSPKHTPIAPGFASLNEMEEFAEAEDGGSSVPPSPYSTPSYLSVPLPAEPSPGARAPWEPTPSAPPARWGHGARRRCDLALLGCATLLGAVGLGADVAEARAADGEEQRRWLDGLFFPRAGRFPRGLSPPARPHGRREDVGPGLGLAPSATLVSLSSVSDCNSTRSLLRSDSDEAAPAAPSPPPSPPAPTPTPSPSTNPLVDLELESFKKDPRQSLTPTHVTAACAVSRGHRRTPSDGALGQRGPPEPAGHGPGPRDLLDFPRLPDPQALFPARRRPPEFPGRPTTLTFAPRPRPAASRPRLDPWKLVSFGRTLTISPPSRPDTPESPGPPSVQPTLLDMDMEGQNQDSTVPLCGAHGSH

SEQ ID NO: 24150 - protein, 58 aa, Artificial Sequence
  Synthetic polypeptide
NTTAETKRGQEERRTGIQDSQSIGFEHKITVQASPTLDKRKGSDGASPPASPSIIPRL

SEQ ID NO: 24151 - protein, 29 aa, Artificial Sequence
  Synthetic polypeptide
LDRLPSMPLPAPTPGHHHRPSQTSTAYQC

SEQ ID NO: 24152 - protein, 111 aa, Artificial Sequence
  Synthetic polypeptide
TPALPPPLQEQWTLKLISVTEPGADHDFPTSPVYSASQISPDSTDFLPCHYQLLLQAITIVRPKRVQPTNAEQGSEAETGGGGGEGTSGSRLLVARSWPHSGGTGTPGRGL

SEQ ID NO: 24153 - protein, 266 aa, Artificial Sequence
  Synthetic polypeptide
VLTRPTSFHATTSSYSRPSPSSVPNEYSLPMLSKGLKRKREEEEEKEPLAVDSWWLDPGHTAVAQAPPAVASSSLFDLSVLKLHHSLQQSEPDLRHLVLVVNTLRRIQASMAPAAALPPVPSPPAAPSVADNLLASSDAALSASMASLLEDLSHIEGLSQAPQPLADEGPPGRSIGGAAPSLGALDLLGPATGCLLDDGLEGLFEDIDTSMYDNELWAPASEGLKPGPEDGPGKEEAPELDEAELDYLMDVLVGTQALERPPGPGR

SEQ ID NO: 24154 - protein, 59 aa, Artificial Sequence
  Synthetic polypeptide
NPWNLQNGDQPLTGAYTVTLDGRGPSRVISKHDLGHFMLRCLTTDEYDGHSTYPSHQYQ

SEQ ID NO: 24155 - protein, 27 aa, Artificial Sequence
  Synthetic polypeptide
HIYLAFVPVSWHTTPKILGISKMETSH

SEQ ID NO: 24156 - protein, 50 aa, Artificial Sequence
  Synthetic polypeptide
YCDIYIWPLSLFPGIQLLKSLESPKWRPATNWGVHSDPGWTRALKGHLQT

SEQ ID NO: 24157 - protein, 5 aa, Artificial Sequence
  Synthetic polypeptide
FQVTK

SEQ ID NO: 24158 - protein, 63 aa, Artificial Sequence
  Synthetic polypeptide
LGTVVRACNSRLRSDSAGAGLLQAAIRGAPAGPRGSGRCSAGSRCGQDRGWAGRCHRAAGHPQ

SEQ ID NO: 24159 - protein, 148 aa, Artificial Sequence
  Synthetic polypeptide
SWAQWYVPVIPGYEVTVLVRDSSRLPSEGPRPAHVVVGDVLQAADVDKTVAGQDAVIVLLGTRNDLSPTTVMSEGARNIVAAMKAHGVDKVVACTSGDQPLTGAYTVTLDGRGPSRVISKHDLGHFMLRCLTTDEYDGHSTYPSHQYQ

SEQ ID NO: 24160 - protein, 191 aa, Artificial Sequence
  Synthetic polypeptide
SWAQWYVPVIPGYEVTVLVRDSSRLPSEGPRPAHVVVGDVLQAADVDKTVAGQDAVIVLLGTRNDLSPTTVMSEGARNIVAAMKAHGVDKVVACTSAFLLWDPTKVPPRLQAVTDDHIRMHKVLRESGLKYVAVMPPHIGDQPLTGAYTVTLDGRGPSRVISKHDLGHFMLRCLTTDEYDGHSTYPSHQYQ

SEQ ID NO: 24161 - protein, 139 aa, Artificial Sequence
  Synthetic polypeptide
SWAQWYVPVIPGYEVTVLVRDSSRLPSEGPRPAHVVVGDVLQAADVDKTVAGQDAVIVLLGTRNDLSPTTVMSEGARNIVAAMKAHGVDKVVACTSGGWWDHGGGAELGGTGEAAQGPLKGDAEAIPCYCAFTEHQLCA

SEQ ID NO: 24162 - protein, 2 aa, Artificial Sequence
  Synthetic polypeptide
QS

SEQ ID NO: 24163 - protein, 16 aa, Artificial Sequence
  Synthetic polypeptide
EDRPRGQDEESRACRR

SEQ ID NO: 24164 - protein, 87 aa, Artificial Sequence
  Synthetic polypeptide
NLQQPTRMIYSWQKGRKTDQGDRMKSLGHAADDSGAPHYAPHAGPAALHAAPWYDPPARPCTWPDPTRGHAPAAAYARTDAPCPASF

SEQ ID NO: 24165 - protein, 34 aa, Artificial Sequence
  Synthetic polypeptide
NLQQPTRMIYSWQKGRKTDQGDRMKSLGHAADDS

SEQ ID NO: 24166 - protein, 39 aa, Artificial Sequence
  Synthetic polypeptide
HRKEVRQRLREIERREAGRWGRGQEKDRRMREEDAERAV

SEQ ID NO: 24167 - protein, 283 aa, Artificial Sequence
  Synthetic polypeptide
GRKMQKELFELFSGFLKYFPGAHRQVYKNLQEINAYIGHSVEKHRETLDPSAPKDLIDTYLLHMEKEKSNAHSEFSHQNLNLNTLSLFFAGTETTSTTLRYGFLLMLKYPHVAERVYREIEQVIGPHRPPELHDRAKMPYTEAVIYEIQRFSDLLPMGVPHIVTQHTSFRGYIIPKDTEVFLILSTALHDPHYFEKPDAFNPDHFLDANGALKKTEAFIPFSLGKRICLGEGIARAELFLFFTTILQNFSMASPVAPEDIDLTPQECGVGKIPPTYQIRFLPR

SEQ ID NO: 24168 - protein, 54 aa, Artificial Sequence
  Synthetic polypeptide
TGRGRQWVTQKGSETETKRDRKERGREMGQRPRKRQKDEGGRCRKSCLSSSLAS

SEQ ID NO: 24169 - protein, 101 aa, Artificial Sequence
  Synthetic polypeptide
GRGRERLREELKGRGDRREDPERQTDKEKLRAGARRLKKVPSWATQGISQVPGDSRAPFGVSSRFRESPPRYIGFGMDRSWSSRTAPRPRCPWVRMNRMTG

SEQ ID NO: 24170 - protein, 6 aa, Artificial Sequence
  Synthetic polypeptide
GQGHAG

SEQ ID NO: 24171 - protein, 898 aa, Artificial Sequence
  Synthetic polypeptide
QRERKTERGTEGQGGQKRGPGETDRQGEAEGRGTQAEESPFVGNPGNITGARGLTGTLRCQLQVQGEPPEVHWLRDGQILELADSTQTQVPLGEDEQDDWIVVSQLRITSLQLSDTGQYQCLVFLGHQTFVSQPGYVGLEGLPYFLEEPEDRTVAANTPFNLSCQAQGPPEPVDLLWLQDAVPLATAPGHGPQRSLHVPGLNKTSSFSCEAHNAKGVTTSRTATITVLPQQPRNLHLVSRQPTELEVAWTPGLSGIYPLTHCTLQAVLSNDGMGIQAGEPDPPEEPLTSQASVPPHQLRLGSLHPHTPYHIRVACTSSQGPSSWTHWLPVETPEGVPLGPPENISATRNGSQAFVHWQEPRAPLQGTLLGYRLAYQGQDTPEVLMDIGLRQEVTLELQGDGSVSNLTVCVAAYTAAGDGPWSLPVPLEAWRPGQAQPVHQLVKEPSTPAFSWPWWYVLLGAVVAAACVLILALFLVHRRKKETRYGEVFEPTVERGELVVRYRVRKSYSRRTTEATLNSLGISEELKEKLRDVMVDRHKVALGKTLGEGEFGAVMEGQLNQDDSILKVAVKTMKIAICTRSELEDFLSEAVCMKEFDHPNVMRLIGVCFQGSERESFPAPVVILPFMKHGDLHSFLLYSRLGDQPVYLPTQMLVKFMADIASGMEYLSTKRFIHRDLAARNCMLNENMSVCVADFGLSKKIYNGDYYRQGRIAKMPVKWIAIESLADRVYTSKSDVWSFGVTMWEIATRGQTPYPGVENSEIYDYLRQGNRLKQPADCLDGLYALMSRCWELNPQDRPSFTELREDLENTLKALPPAQEPDEILYVNMDEGGGYPEPPGAAGGADPPTQPDPKDSCSCLTAAEVHPAGRYVLCPSTTPSPAQPADRGSPAAPGQEDGA

SEQ ID NO: 24172 - protein, 889 aa, Artificial Sequence
  Synthetic polypeptide
QRERKTERGTEGQGGQKRGPGETDRQGEAEGRGTQAEESPFVGNPGNITGARGLTGTLRCQLQVQGEPPEVHWLRDGQILELADSTQTQVPLGEDEQDDWIVVSQLRITSLQLSDTGQYQCLVFLGHQTFVSQPGYVGLEGLPYFLEEPEDRTVAANTPFNLSCQAQGPPEPVDLLWLQDAVPLATAPGHGPQRSLHVPGLNKTSSFSCEAHNAKGVTTSRTATITVLPQQPRNLHLVSRQPTELEVAWTPGLSGIYPLTHCTLQAVLSNDGMGIQAGEPDPPEEPLTSQASVPPHQLRLGSLHPHTPYHIRVACTSSQGPSSWTHWLPVETPEGVPLGPPENISATRNGSQAFVHWQEPRAPLQGTLLGYRLAYQGQDTPEVLMDIGLRQEVTLELQGDGSVSNLTVCVAAYTAAGDGPWSLPVPLEAWRPVKEPSTPAFSWPWWYVLLGAVVAAACVLILALFLVHRRKKETRYGEVFEPTVERGELVVRYRVRKSYSRRTTEATLNSLGISEELKEKLRDVMVDRHKVALGKTLGEGEFGAVMEGQLNQDDSILKVAVKTMKIAICTRSELEDFLSEAVCMKEFDHPNVMRLIGVCFQGSERESFPAPVVILPFMKHGDLHSFLLYSRLGDQPVYLPTQMLVKFMADIASGMEYLSTKRFIHRDLAARNCMLNENMSVCVADFGLSKKIYNGDYYRQGRIAKMPVKWIAIESLADRVYTSKSDVWSFGVTMWEIATRGQTPYPGVENSEIYDYLRQGNRLKQPADCLDGLYALMSRCWELNPQDRPSFTELREDLENTLKALPPAQEPDEILYVNMDEGGGYPEPPGAAGGADPPTQPDPKDSCSCLTAAEVHPAGRYVLCPSTTPSPAQPADRGSPAAPGQEDGA

SEQ ID NO: 24173 - protein, 721 aa, Artificial Sequence
  Synthetic polypeptide
GWAWWLTPVIPALWEAEAGGSRGLNKTSSFSCEAHNAKGVTTSRTATITVLPQQPRNLHLVSRQPTELEVAWTPGLSGIYPLTHCTLQAVLSNDGMGIQAGEPDPPEEPLTSQASVPPHQLRLGSLHPHTPYHIRVACTSSQGPSSWTHWLPVETPEGVPLGPPENISATRNGSQAFVHWQEPRAPLQGTLLGYRLAYQGQDTPEVLMDIGLRQEVTLELQGDGSVSNLTVCVAAYTAAGDGPWSLPVPLEAWRPGQAQPVHQLVKEPSTPAFSWPWWYVLLGAVVAAACVLILALFLVHRRKKETRYGEVFEPTVERGELVVRYRVRKSYSRRTTEATLNSLGISEELKEKLRDVMVDRHKVALGKTLGEGEFGAVMEGQLNQDDSILKVAVKTMKIAICTRSELEDFLSEAVCMKEFDHPNVMRLIGVCFQGSERESFPAPVVILPFMKHGDLHSFLLYSRLGDQPVYLPTQMLVKFMADIASGMEYLSTKRFIHRDLAARNCMLNENMSVCVADFGLSKKIYNGDYYRQGRIAKMPVKWIAIESLADRVYTSKSDVWSFGVTMWEIATRGQTPYPGVENSEIYDYLRQGNRLKQPADCLDGLYALMSRCWELNPQDRPSFTELREDLENTLKALPPAQEPDEILYVNMDEGGGYPEPPGAAGGADPPTQPDPKDSCSCLTAAEVHPAGRYVLCPSTTPSPAQPADRGSPAAPGQEDGA

SEQ ID NO: 24174 - protein, 14 aa, Artificial Sequence
  Synthetic polypeptide
SQHFGRLRRADHEG

SEQ ID NO: 24175 - protein, 18 aa, Artificial Sequence
  Synthetic polypeptide
GGRITRAEQDILFLLRSP

SEQ ID NO: 24176 - protein, 712 aa, Artificial Sequence
  Synthetic polypeptide
GWAWWLTPVIPALWEAEAGGSRGLNKTSSFSCEAHNAKGVTTSRTATITVLPQQPRNLHLVSRQPTELEVAWTPGLSGIYPLTHCTLQAVLSNDGMGIQAGEPDPPEEPLTSQASVPPHQLRLGSLHPHTPYHIRVACTSSQGPSSWTHWLPVETPEGVPLGPPENISATRNGSQAFVHWQEPRAPLQGTLLGYRLAYQGQDTPEVLMDIGLRQEVTLELQGDGSVSNLTVCVAAYTAAGDGPWSLPVPLEAWRPVKEPSTPAFSWPWWYVLLGAVVAAACVLILALFLVHRRKKETRYGEVFEPTVERGELVVRYRVRKSYSRRTTEATLNSLGISEELKEKLRDVMVDRHKVALGKTLGEGEFGAVMEGQLNQDDSILKVAVKTMKIAICTRSELEDFLSEAVCMKEFDHPNVMRLIGVCFQGSERESFPAPVVILPFMKHGDLHSFLLYSRLGDQPVYLPTQMLVKFMADIASGMEYLSTKRFIHRDLAARNCMLNENMSVCVADFGLSKKIYNGDYYRQGRIAKMPVKWIAIESLADRVYTSKSDVWSFGVTMWEIATRGQTPYPGVENSEIYDYLRQGNRLKQPADCLDGLYALMSRCWELNPQDRPSFTELREDLENTLKALPPAQEPDEILYVNMDEGGGYPEPPGAAGGADPPTQPDPKDSCSCLTAAEVHPAGRYVLCPSTTPSPAQPADRGSPAAPGQEDGA

SEQ ID NO: 24177 - protein, 11 aa, Artificial Sequence
  Synthetic polypeptide
WTLCFEQPGHQ

SEQ ID NO: 24178 - protein, 398 aa, Artificial Sequence
  Synthetic polypeptide
RGMMSSNTLTADGPCALNSLGISEELKEKLRDVMVDRHKVALGKTLGEGEFGAVMEGQLNQDDSILKVAVKTMKIAICTRSELEDFLSEAVCMKEFDHPNVMRLIGVCFQGSERESFPAPVVILPFMKHGDLHSFLLYSRLGDQPVYLPTQMLVKFMADIASGMEYLSTKRFIHRDLAARNCMLNENMSVCVADFGLSKKIYNGDYYRQGRIAKMPVKWIAIESLADRVYTSKSDVWSFGVTMWEIATRGQTPYPGVENSEIYDYLRQGNRLKQPADCLDGLYALMSRCWELNPQDRPSFTELREDLENTLKALPPAQEPDEILYVNMDEGGGYPEPPGAAGGADPPTQPDPKDSCSCLTAAEVHPAGRYVLCPSTTPSPAQPADRGSPAAPGQEDGA

SEQ ID NO: 24179 - protein, 780 aa, Artificial Sequence
  Synthetic polypeptide
GRVQWLTPVIPALWEAEAGGSRDAMDNITRQNQFYDTQVIKQENESGYERRPLEMEQQQAYRPEMKTEMKQGAPTSFLPPEASQLKPDRQQFQSRKRPYEENRGRGYFEHREDRRGRSPQPPAEEDEDDFDDTLVAIDTYNCDLHFKVARDRSSGYPLTIEGFAYLWSGARASYGVRRGRVCFEMKINEEISVKHLPSTEPDPHVVRIGWSLDSCSTQLGEEPFSYGYGGTGKKSTNSRFENYGDKFAENDVIGCFADFECGNDVELSFTKNGKWMGIAFRIQKEALGGQALYPHVLVKNCAVEFNFGQRAEPYCSVLPGFTFIQHLPLSERIRGTVGPKSKAECEILMMVGLPAAGKTTWAIKHAASNPSKKYNILGTNAIMDKMRVMGLRRQRNYAGRWDVLIQQATQCLNRLIQIAARKKRNYILDQTNVYGSAQRRKMRPFEGFQRKAIVICPTDEDLKDRTIKRTDEEGKDVPDHAVLEMKANFTLPDVGDFLDEVLFIELQREEADKLVRQYNEEGRKAGPPPEKRFDNRGGGGFRGRGGGGGFQRYENRGPPGGNRGGFQNRGGGSGGGGNYRGGFNRSGGGGYSQNRWGNNNRDNNNSNNRGSYNRAPQQQPPPQQPPPPQPPPQQPPPPPSYSPARNPPGASTYNKNSNIPGSSANTSTPTVSSYSPPQPSYSQPPYNQGGYSQGYTAPPPPPPPPPAYNYGSYGGYNPAPYTPPPPPTAQTYPQPSYNQYQQYAQQWNQYYQNQGQWPPYYGNYDYGSYSGNTQGGTSTQ

SEQ ID NO: 24180 - protein, 64 aa, Artificial Sequence
  Synthetic polypeptide
AECSGSRLLFQHFGRPRRADHEMPWTILPGRTNSTIPKSSNKKTSQATRGDHWKWSSSRPIVQK

SEQ ID NO: 24181 - protein, 79 aa, Artificial Sequence
  Synthetic polypeptide
PSAVAHACYSSTLGGRGGRITRCHGQYYQAEPILRYPSHQTRKRVRLREETTGNGAAAGLSSRNEDRDEARSTHQLPPA

SEQ ID NO: 24182 - protein, 719 aa, Artificial Sequence
  Synthetic polypeptide
GRVQWLTPVIPALWEAEAGGSRDAMDNITRQNQFYDTQVIKQENESGYERRPLEMEQQQAYRPEMKTEMKQGAPTSFLPPEASQLKPDRQQFQSRKRPYEENRGRGYFEHREDRRGRSPQPPAEEDEDDFDDTLVAIDTYNCDLHFKVARDRSSGYPLTIEGFAYLWSGARASYGVRRGRVCFEMKDFECGNDVELSFTKNGKWMGIAFRIQKEALGGQALYPHVLVKNCAVEFNFGQRAEPYCSVLPGFTFIQHLPLSERIRGTVGPKSKAECEILMMVGLPAAGKTTWAIKHAASNPSKKYNILGTNAIMDKMRVMGLRRQRNYAGRWDVLIQQATQCLNRLIQIAARKKRNYILDQTNVYGSAQRRKMRPFEGFQRKAIVICPTDEDLKDRTIKRTDEEGKDVPDHAVLEMKANFTLPDVGDFLDEVLFIELQREEADKLVRQYNEEGRKAGPPPEKRFDNRGGGGFRGRGGGGGFQRYENRGPPGGNRGGFQNRGGGSGGGGNYRGGFNRSGGGGYSQNRWGNNNRDNNNSNNRGSYNRAPQQQPPPQQPPPPQPPPQQPPPPPSYSPARNPPGASTYNKNSNIPGSSANTSTPTVSSYSPPQSFGFFPSTFQPSYSQPPYNQGGYSQGYTAPPPPPPPPPAYNYGSYGGYNPAPYTPPPPPTAQTYPQPSYNQYQQYAQQWNQYYQNQGQWPPYYGNYDYGSYSGNTQGGTSTQ

SEQ ID NO: 24183 - protein, 65 aa, Artificial Sequence
  Synthetic polypeptide
GRVQWLTPVIPALWEAEAGGSRDAMDNITRQNQFYDTQVIKQENESGYERRPLEMEQQQAYRPEM

SEQ ID NO: 24184 - protein, 64 aa, Artificial Sequence
  Synthetic polypeptide
PSAVAHACYSSTLGGRGGRITRCHGQYYQAEPILRYPSHQTRKRVRLREETTGNGAAAGLSSRN

SEQ ID NO: 24185 - protein, 728 aa, Artificial Sequence
  Synthetic polypeptide
GRVQWLTPVIPALWEAEAGGSRDAMDNITRQNQFYDTQVIKQENESGYERRPLEMEQQQAYRPEMKTEMKQGAPTSFLPPEASQLKPDRQQFQSRKRPYEENRGRGYFEHREDRRGRSPQPPAEEDEDDFDDTLVAIDTYNCDLHFKVARDRSSGYPLTIEGFAYLWSGARASYGVRRGRVCFEMKINEEISVKHLPSTEPDPHVVRIGWSLDSCSTQLGEEPFSYGYGGTGKKSTNSRFENYGDKFAENDVIGCFADFECGNDVELSFTKNGKWMGIAFRIQKEALGGQALYPHVLVKNCAVEFNFGQRAEPYCSVLPGFTFIQHLPLSERIRGTVGPKSKAECEILMMVGLPAAGKTTWAIKHAASNPSKKYNILGTNAIMDKMRVMGLRRQRNYAGRWDVLIQQATQCLNRLIQIAARKKRNYILDQTNVYGSAQRRKMRPFEGFQRKAIVICPTDEDLKDRTIKRTDEEGKDVPDHAVLEMKANFTLPDVGDFLDEVLFIELQREEADKLVRQYNEEGRKAGPPPEKRFDNRGGGGFRGRGGGGGFQRYENRGPPGGNRGGFQNRGGGSGGGGNYRGGFNRSGGGGYSQNRWGNNNRDNNNSNNRGSYNRAPQQQPPPQQPPPPQPPPQQPPPPPSYSPARNPPGASTYNKNSNIPGSSANTSTPTVSSYSPPQTYPQPSYNQYQQYAQQWNQYYQNQGQWPPYYGNYDYGSYSGNTQGGTSTQ

SEQ ID NO: 24186 - protein, 35 aa, Artificial Sequence
  Synthetic polypeptide
GQAQWLTPVIPALWEAEAGGSRGQEFETSTAKMAA

SEQ ID NO: 24187 - protein, 34 aa, Artificial Sequence
  Synthetic polypeptide
SQHFGRPRRVDHEVRSSRPAQPRWLHRAWTWALG

SEQ ID NO: 24188 - protein, 360 aa, Artificial Sequence
  Synthetic polypeptide
PGAVAHACNPSTLGGRGGWITRSGVRDQHSQDGCIEPGPGHWGELSRTPVPSKPQDKVEAAEATPVALDSDTSGAENAAVSAMLHAVAASRLPVCSQQQGEPDLTEHEKVAILAQLYHEKPLVFLERFRTGLREEHLACFGHVRGDHRADFYCAEVARQGTARPRTLRTRLRNRRYAALRELIQGGEYFSDEQMRFRAPLLYEQYIGQYLTQEELSARTPTHQPPKPGSPGRPACPLSNLLLQSYEERELQQRLLQQQEEEEACLEEEEEEEDSDEEDQRSGKDSEAWVPDSEERLILREEFTSRMHQRFLDGKDGDFDYSTVDDNPDFDNLDIVARDEEERYFDEEEPEDAPSPELDGD

SEQ ID NO: 24189 - protein, 333 aa, Artificial Sequence
  Synthetic polypeptide
PGMVAGCIEPGPGHWGELSRTPVPSKPQDKVEAAEATPVALDSDTSGAENAAVSAMLHAVAASRLPVCSQQQGEPDLTEHEKVAILAQLYHEKPLVFLERFRTGLREEHLACFGHVRGDHRADFYCAEVARQGTARPRTLRTRLRNRRYAALRELIQGGEYFSDEQMRFRAPLLYEQYIGQYLTQEELSARTPTHQPPKPGSPGRPACPLSNLLLQSYEERELQQRLLQQQEEEEACLEEEEEEEDSDEEDQRSGKDSEAWVPDSEERLILREEFTSRMHQRFLDGKDGDFDYSTVDDNPDFDNLDIVARDEEERYFDEEEPEDAPSPELDGD

SEQ ID NO: 24190 - protein, 18 aa, Artificial Sequence
  Synthetic polypeptide
NPVCTKNTKISRAWWQAA

SEQ ID NO: 24191 - protein, 60 aa, Artificial Sequence
  Synthetic polypeptide
PGAVAHACNPSTLGGRGGWITRSGVRDQHSQDGETLSVLKIQKLAGHGGRLHRAWTWALG

SEQ ID NO: 24192 - protein, 91 aa, Artificial Sequence
  Synthetic polypeptide
GQAQWCMPVIPALWEAEARHGCPGPQLALPAADANVHQLHHHGCPAVLHGSLRAQCHRRPPLGLQQQLRAFHNRAHHQARPSRRRAPKPPR

SEQ ID NO: 24193 - protein, 170 aa, Artificial Sequence
  Synthetic polypeptide
SQRFGRPRLGMAARGHSWPCLQQTPTSTSCTITDVQLFSMAPYVLNVTAVHPWGSSSSFVPFITEHIIKPDPPEGVRLSPLAERQLQVQWEPPGSWPFPEIFSLKYWIRYKRQGAARFHRVGPIEATSFILRAVRPRARYYVQVAAQDLTDYGELSDWSLPATATMSLGK

SEQ ID NO: 24194 - protein, 71 aa, Artificial Sequence
  Synthetic polypeptide
PGTVVHACNPSALGGRGSAWLPGATAGPACSRRQRPPAAPSRMSSCSPWLPTCSMSPPSTPGAPAAASCLS

SEQ ID NO: 24195 - protein, 95 aa, Artificial Sequence
  Synthetic polypeptide
KYKTLASFHSAAPVPPGWRWGWLHDQDLWGTSEKRRHAQPLQPRLQECGPPGPPSPGGAENGGKGPRWRPQTDTSGTKRSGQNRRTGGSCQQEAL

SEQ ID NO: 24196 - protein, 89 aa, Artificial Sequence
  Synthetic polypeptide
PASTARHLYLRGGAGVGSMTKIYGGRQRNGVMPSHFSRGSKSVARRVLQALEGLKMVEKDQDGGRKLTPQGQRDLDRIAGQVAAANKKH

SEQ ID NO: 24197 - protein, 37 aa, Artificial Sequence
  Synthetic polypeptide
DQPGQHGETPSLLKIQNISQLPQRGTCTSGVALGLAP

SEQ ID NO: 24198 - protein, 24 aa, Artificial Sequence
  Synthetic polypeptide
KYKTLASFHSAAPVPPGWRWGWLH

SEQ ID NO: 24199 - protein, 19 aa, Artificial Sequence
  Synthetic polypeptide
PASTARHLYLRGGAGVGSM

SEQ ID NO: 24200 - protein, 25 aa, Artificial Sequence
  Synthetic polypeptide
KYKTLASFHSAAPVPPGWRWGWLHD

SEQ ID NO: 24201 - protein, 20 aa, Artificial Sequence
  Synthetic polypeptide
PASTARHLYLRGGAGVGSMT

SEQ ID NO: 24202 - protein, 45 aa, Artificial Sequence
  Synthetic polypeptide
KYKTLASFHSAAPVPPGWRWGWLHDQDLWGTSEKRRHAQPLQPRL

SEQ ID NO: 24203 - protein, 40 aa, Artificial Sequence
  Synthetic polypeptide
PASTARHLYLRGGAGVGSMTKIYGGRQRNGVMPSHFSRGS

SEQ ID NO: 24204 - protein, 104 aa, Artificial Sequence
  Synthetic polypeptide
SLLFGRPRHVDHLRSGVRDQPGQHVTTLSSAVGTLHPSRTAGGGGGGGGAAPPLNSIPSVTPPPPATTNSTNPSPQGSHSAIGLSGLNPSTGPGLWWNPAPYQP

SEQ ID NO: 24205 - protein, 73 aa, Artificial Sequence
  Synthetic polypeptide
GQEFETSLANMLLPYPQLWGRSTPAGQLEGVGAGAGLRPPSIPSPLSLPHPRPPPTAQTPALKAATRLSACQA

SEQ ID NO: 24206 - protein, 113 aa, Artificial Sequence
  Synthetic polypeptide
WVWWLMPIIPALWEAKACGSPEVRSSRPAWPTCYYLILSCGDAPPQPDSWRGWGRGRGCAPPQFHPLCHSPTPGHHQQHKPQPSRQPLGYRLVRPEPQHGPWPLVEPCPLPAL

SEQ ID NO: 24207 - protein, 227 aa, Artificial Sequence
  Synthetic polypeptide
SLLFGRPRHVDHLRSGVRDQPGQHVTTLSSAVGTLHPSRTAGGGGGGGGAAPPLNSIPSVTPPPPATTNSTNPSPQGSHSAIGLSGLNPSTGSTMVGLSSGLSPALMSNNPLATIQALASGGTLPLTSLDGSGNLVLGAAGAAPGSPGLVTSPLFLNHAGLPLLSTPPGVGLVSAAAAAVAASISSKSPGLSSSSSSSSSSSSSTCSETAAQTPGGPGGPEAGSKPE

SEQ ID NO: 24208 - protein, 137 aa, Artificial Sequence
  Synthetic polypeptide
WVWWLMPIIPALWEAKACGSPEVRSSRPAWPTCYYLILSCGDAPPQPDSWRGWGRGRGCAPPQFHPLCHSPTPGHHQQHKPQPSRQPLGYRLVRPEPQHGKHNGGVELRAESSPHEQQPFGHYPSPGLWWNPAPYQP

SEQ ID NO: 24209 - protein, 241 aa, Artificial Sequence
  Synthetic polypeptide
SLLFGRPRHVDHLRSGVRDQPGQHVTTLSSAVGTLHPSRTAGGGGGGGGAAPPLNSIPSVTPPPPATTNSTNPSPQGSHSAIGLSGLNPSTGSTMVGLSSGLSPALMSNNPLATIQGACCLMSHPSSPALSSGASSPAIAAPAMPSCPCSLHCLPLHTHLTFGEGVRGADGGQWDRWGDGGHSGQDAGRQRSPLARHALSPASLSPRQPWPLVEPCPLPALMAAGIWCWGQPVQPRGALAW

SEQ ID NO: 24210 - protein, 177 aa, Artificial Sequence
  Synthetic polypeptide
WVWWLMPIIPALWEAKACGSPEVRSSRPAWPTCYYLILSCGDAPPQPDSWRGWGRGRGCAPPQFHPLCHSPTPGHHQQHKPQPSRQPLGYRLVRPEPQHGKHNGGVELRAESSPHEQQPFGHYPRCVLPHVTPIVTSPILWGLEPCHCCSSHAILPLLTALLASSYPSHLWGRCEGC

SEQ ID NO: 24211 - protein, 92 aa, Artificial Sequence
  Synthetic polypeptide
SLLFGRPRHVDHLRSGVRDQPGQHVTTLSSAVGTLHPSRTAGGGGGGGGAAPPLNSIPSVTPPPPATTNSTNPSPQGSHSAIGLSGLNPSTG

SEQ ID NO: 24212 - protein, 101 aa, Artificial Sequence
  Synthetic polypeptide
WVWWLMPIIPALWEAKACGSPEVRSSRPAWPTCYYLILSCGDAPPQPDSWRGWGRGRGCAPPQFHPLCHSPTPGHHQQHKPQPSRQPLGYRLVRPEPQHGV

SEQ ID NO: 24213 - protein, 37 aa, Artificial Sequence
  Synthetic polypeptide
YIQAPSTQQPHVDECGTSLCGCVPLALLSPLPGTQPA

SEQ ID NO: 24214 - protein, 1600 aa, Artificial Sequence
  Synthetic polypeptide
GFNEPDNTYKLPAHSSPMWTNVEPRSVAVFPWHSLVPFLAPSQPDPSVQPSEAQQPASHPVASNQSKEPAESAAVAHERPPGGTGSADPERPPGATCPESPGPGPPHPLGVVESGKGPPPTTEEEASGPPGEPRLDSETESDHDDAFLSIMSPEIQLPLPPGKRRTQSLSALPKERDSSSEKDGRSPNKREKDHIRRPMNAFMIFSKRHRALVHQRHPNQDNRTVSKILGEWWYALGPKEKQKYHDLAFQVKEAHFKAHPDWKWCNKDRKKSSSEAKPTSLGLAGGHKETRERSMSETGTAAAPGVSSELLSVAAQTLLSSDTKAPGSSSCGAERLHTVGGPGSARPRAFSHSGVHSLDGGEVDSQALQELTQMVSGPASYSGPKPSTQYGAPGPFAAPGEGGALAATGRPPLLPTRASRSQRAASEDMTSDEERMVICEEEGDDDVIADDGFGTTDIDLKCKERVTDSESGDSSGEDPEGNKGFGRKVFSPVIRSSFTHCRPPLDPEPPGPPDPPVAFGKGYGSAPSSSASSPASSSASAATSFSLGSGTFKAQESGQGSTAGPLRPPPPGAGGPATPSKATRFLPMDPATFRRKRPESVGGLEPPGPSVIAAPPSGGGNILQTLVLPPNKEEQEGGGARVPSAPAPSLAYGAPAAPLSRPAATMVTNVVRPVSSTPVPIASKPFPTSGRAEASPNDTAGARTEMGTGSRVPGGSPLGVSLVYSDKKSAAATSPAPHLVAGPLLGTVGKAPATVTNLLVGTPGYGAPAPPAVQFIAQGAPGGGTTAGSGAGAGSGPNGPVPLGILQPGALGKAGGITQVQYILPTLPQQLQVAPAPAPAPGTKAAAPSGPAPTTSIRFTLPPGTSTNGKVLAATAPTPGIPILQSVPSAPPPKAQSVSPVQAPPPGGSAQLLPGKVLVPLAAPSMSVRGGGAGQPLPLVSPPFSVPVQNGAQPPSKIIQLTPVPVSTPSGLVPPLSPATLPGPTSQPQKVLLPSSTRITYVQSAGGHALPLGTSPASSQAGTVTSYGPTSSVALGFTSLGPSGPAFVQPLLSGQAPLLAPGQVGVSPVPSPQLPPACAAPGGPVITAFYSGSPAPTSSAPLAQPSQAPPSLVYTVATSTTPPAATILPKGPPAPATATPAPTSPFPSATGSMTYSLVAPKAQRPSPKAPQKVKAAIASIPVGSFEAGASGRPGPAPRQPLEPGPVREPTAPESELEGQPTPPAPPPLPETWTPTARSSPPLPPPAEERTSAKGPETMASKFPSSSSDWRVPGQGLENRGEPPTPPSPAPAPAVAPGGSSESSSGRAAGDTPERKEAAGTGKKVKVRPPPLKKTFDSVDKVLSEVDFEERFAELPEFRPEEVLPSPTLQSLATSPRAILGSYRKKRKNSTDLDSAPEDPTSPKRKMRRRSSCSSEPNTPKSAKCEGDIFTFDRTGTEAEDVLGELEYDKVPYSSLRRTLDQRRALVMQLFQDHGFFPSAQATAAFQARYADIFPSKVCLQLKIREVRQKIMQAATPTEQPPGAEAPLPVPPPTGTAAAPAPTPSPAGGPDPTSPSSDSGTAQAAPPLPPPPESGPGQPGWEGAPQPSPPPPGPSTAATGR

SEQ ID NO: 24215 - protein, 48 aa, Artificial Sequence
  Synthetic polypeptide
TMGVIKHTSLGGCEDSMNQIIHTSSQHTAAPCGRMWNLALWLCSLGTP

SEQ ID NO: 24216 - protein, 1601 aa, Artificial Sequence
  Synthetic polypeptide
GFNEPDNTYKLPAHSSPMWTNVEPRSVAVFPWHSLVPFLAPSQPDPSVQPSEAQQPASHPVASNQSKEPAESAAVAHERPPGGTGSADPERPPGATCPESPGPGPPHPLGVVESGKGPPPTTEEEASGPPGEPRLDSETESDHDDAFLSIMSPEIQLPLPPGKRRTQSLSALPKERDSSSEKDGRSPNKREKDHIRRPMNAFMIFSKRHRALVHQRHPNQDNRTVSKILGEWWYALGPKEKQKYHDLAFQVKEAHFKAHPDWKWCNKDRKKSSSEAKPTSLGLAGGHKETRERSMSETGTAAAPGVSSELLSVAAQTLLSSDTKAPGSSSCGAERLHTVGGPGSARPRAFSHSGVHSLDGGEVDSQALQELTQMVSGPASYSGPKPSTQYGAPGPFAAPGEGGALAATGRPPLLPTRASRSQRAASEDMTSDEERMVICEEEGDDDVIADDGFGTTDIDLKCKERVTDSESGDSSGEDPEGNKGFGRKVFSPVIRSSFTHCRPPLDPEPPGPPDPPVAFGKGYGSAPSSSASSPASSSASAATSFSLGSGTFKAQESGQGSTAGPLRPPPPGAGGPATPSKATRFLPMDPATFRRKRPESVGGLEPPGPSVIAAPPSGGGNILQTLVLPPNKEEQEGGGARVPSAPAPSLAYGAPAAPLSRPAATMVTNVVRPVSSTPVPIASKPFPTSGRAEASPNDTAGARTEMGTGSRVPGGSPLGVSLVYSDKKSAAATSPAPHLVAGPLLGTVGKAPATVTNLLVGTPGYGAPAPPAVQFIAQGAPGGGTTAGSGAGAGSGPNGPVPLGILQPGALGKAGGITQVQYILPTLPQQLQVAPAPAPAPGTKAAAPSGPAPTTSIRFTLPPGTSTNGKVLAATAPTPGIPILQSVPSAPPPKAQSVSPVQAPPPGGSAQLLPGKVLVPLAAPSMSVRGGGAGQPLPLVSPPFSVPVQNGAQPPSKIIQLTPVPVSTPSGLVPPLSPATLPGPTSQPQKVLLPSSTRITYVQSAGGHALPLGTSPASSQAGTVTSYGPTSSVALGFTSLGPSGPAFVQPLLSGQAPLLAPGQVGVSPVPSPQLPPACAAPGGPVITAFYSGSPAPTSSAPLAQPSQAPPSLVYTVATSTTPPAATILPKGPPAPATATPAPTSPFPSATGSMTYSLVAPKAQRPSPKAPQKVKAAIASIPVGSFEAGASGRPGPAPRQPLEPGPVREPTAPESELEGQPTPPAPPPLPETWTPTARSSPPLPPPAEERTSAKGPETMASKFPSSSSDWRVPGQGLENRGEPPTPPSPAPAPAVAPGGSSESSSGRAAGDTPERKEAAGTGKKVKVRPPPLKKTFDSVDNRVLSEVDFEERFAELPEFRPEEVLPSPTLQSLATSPRAILGSYRKKRKNSTDLDSAPEDPTSPKRKMRRRSSCSSEPNTPKSAKCEGDIFTFDRTGTEAEDVLGELEYDKVPYSSLRRTLDQRRALVMQLFQDHGFFPSAQATAAFQARYADIFPSKVCLQLKIREVRQKIMQAATPTEQPPGAEAPLPVPPPTGTAAAPAPTPSPAGGPDPTSPSSDSGTAQAAPPLPPPPESGPGQPGWEGAPQPSPPPPGPSTAATGR

SEQ ID NO: 24217 - protein, 1603 aa, Artificial Sequence
  Synthetic polypeptide
GFNEPDNTYKLPAHSSPMWTNVEPRSVAVFPWHSLVPFLAPSQPDPSVQPSEAQQPASHPVASNQSKEPAESAAVAHERPPGGTGSADPERPPGATCPESPGPGPPHPLGVVESGKGPPPTTEEEASGPPGEPRLDSETESDHDDAFLSIMSPEIQLPLPPGKRRTQSLSALPKERDSSSEKDGRSPNKREKDHIRRPMNAFMIFSKRHRALVHQRHPNQDNRTVSKILGEWWYALGPKEKQKYHDLAFQVKEAHFKAHPDWKWCNKDRKKSSSEAKPTSLGLAGGHKETRERSMSETGTAAAPGVSSELLSVAAQTLLSSDTKAPGSSSCGAERLHTVGGPGSARPRAFSHSGVHSLDGGEVDSQALQELTQMVSGPASYSGPKPSTQYGAPGPFAAPGEGGALAATGRPPLLPTRASRSQRAASEDMTSDEERMVICEEEGDDDVIADDGFGTTDIDLKCKERVTDSESGDSSGEDPEGNKGFGRKVFSPVIRSSFTHCRPPLDPEPPGPPDPPVAFGKGYGSAPSSSASSPASSSASAATSFSLGSGTFKAQESGQGSTAGPLRPPPPGAGGPATPSKATRFLPMDPATFRRKRPESVGGLEPPGPSVIAAPPSGGGNILQTLVLPPNKEEQEGGGARVPSAPAPSLAYGAPAAPLSRPAATMVTNVVRPVSSTPVPIASKPFPTSGRAEASPNDTAGARTEMGTGSRVPGGSPLGVSLVYSDKKSAAATSPAPHLVAGPLLGTVGKAPATVTNLLVGTPGYGAPAPPAVQFIAQGAPGGGTTAGSGAGAGSGPNGPVPLGILQPGALGKAGGITQVQYILPTLPQQLQVAPAPAPAPGTKAAAPSGPAPTTSIRFTLPPGTSTNGKVLAATAPTPGIPILQSVPSAPPPKAQSVSPVQAPPPGGSAQLLPGKVLVPLAAPSMSVRGGGAGQPLPLVSPPFSVPVQNGAQPPSKIIQLTPVPVSTPSGLVPPLSPATLPGPTSQPQKVLLPSSTRITYVQSAGGHALPLGTSPASSQAGTVTSYGPTSSVALGFTSLGPSGPAFVQPLLSAGQAPLLAPGQVGVSPVPSPQLPPACAAPGGPVITAFYSGSPAPTSSAPLAQPSQAPPSLVYTVATSTTPPAATILPKGPPAPATATPAPTSPFPSATAGSMTYSLVAPKAQRPSPKAPQKVKAAIASIPVGSFEAGASGRPGPAPRQPLEPGPVREPTAPESELEGQPTPPAPPPLPETWTPTARSSPPLPPPAEERTSAKGPETMASKFPSSSSDWRVPGQGLENRGEPPTPPSPAPAPAVAPGGSSESSSGRAAGDTPERKEAAGTGKKVKVRPPPLKKTFDSVDNRVLSEVDFEERFAELPEFRPEEVLPSPTLQSLATSPRAILGSYRKKRKNSTDLDSAPEDPTSPKRKMRRRSSCSSEPNTPKSAKCEGDIFTFDRTGTEAEDVLGELEYDKVPYSSLRRTLDQRRALVMQLFQDHGFFPSAQATAAFQARYADIFPSKVCLQLKIREVRQKIMQAATPTEQPPGAEAPLPVPPPTGTAAAPAPTPSPAGGPDPTSPSSDSGTAQAAPPLPPPPESGPGQPGWEGAPQPSPPPPGPSTAATGR

SEQ ID NO: 24218 - protein, 31 aa, Artificial Sequence
  Synthetic polypeptide
NELTIAGGIQEDGVEGIEEVQALGAARASCI

SEQ ID NO: 24219 - protein, 37 aa, Artificial Sequence
  Synthetic polypeptide
MSSPSLEVYKKMEWKASRRSRPWEQPGLPASEVRADP

SEQ ID NO: 24220 - protein, 83 aa, Artificial Sequence
  Synthetic polypeptide
AHHRWRYTRRWSGRHRGGPGLGSSQGFLHLKFARTRENQVVLGQHSGPFPSVPELVLHYSSRPLPVQGAEHLALLYPVVTQTP

SEQ ID NO: 24221 - protein, 23 aa, Artificial Sequence
  Synthetic polypeptide
KYKNLTSITFKLLEPAHHCPSHD

SEQ ID NO: 24222 - protein, 399 aa, Artificial Sequence
  Synthetic polypeptide
PASLLNFWNLPTTAQVTIEAEPTKVSEGKDVLLLVHNLPQNLTGYIWYKGQMRDLYHYITSYVVDGEIIIYGPAYSGRETAYSNASLLIQNVTREDAGSYTLHIIKGDDGTRGVTGRFTFTLHLETPKPSISSSNLNPRETMEAVSLTCDPETPDASYLWWMNGQSLPMTHSLKLSETNRTLFLLGVTKYTAGPYECEIRNPVSASRSDPVTLNLLPKLPKPYITINNLNPRENKDVLNFTCEPKSENYTYIWWLNGQSLPVSPRVKRPIENRILILPSVTRNETGPYQCEIRDRYGGIRSDPVTLNVLYGPDLPRIYPSFTYYRSGEVLYLSCSADSNPPAQYSWTINEKFQLPGQKLFIRHITTKHSGLYVCSVRNSATGKESSKSMTVEVSDWTVP

SEQ ID NO: 24223 - protein, 33 aa, Artificial Sequence
  Synthetic polypeptide
GGWIMRSEVQDQSGQHSEALSVLKIQKFNQHHF

SEQ ID NO: 24224 - protein, 304 aa, Artificial Sequence
  Synthetic polypeptide
PASLLNFWNLPTTAQVTIEAEPTKVSEGKDVLLLVHNLPQNLTGYIWYKGQMRDLYHYITSYVVDGEIIIYGPAYSGRETAYSNASLLIQNVTREDAGSYTLHIIKGDDGTRGVTGRFTFTLHPKLPKPYITINNLNPRENKDVLNFTCEPKSENYTYIWWLNGQSLPVSPRVKRPIENRILILPSVTRNETGPYQCEIRDRYGGIRSDPVTLNVLYGPDLPRIYPSFTYYRSGEVLYLSCSADSNPPAQYSWTINEKFQLPGQKLFIRHITTKHSGLYVCSVRNSATGKESSKSMTVEVSEAL

SEQ ID NO: 24225 - protein, 397 aa, Artificial Sequence
  Synthetic polypeptide
PASLLNFWNLPTTAQVTIEAEPTKVSEGKDVLLLVHNLPQNLTGYIWYKGQMRDLYHYITSYVVDGEIIIYGPAYSGRETAYSNASLLIQNVTREDAGSYTLHIIKGDDGTRGVTGRFTFTLHLETPKPSISSSNLNPRETMEAVSLTCDPETPDASYLWWMNGQSLPMTHSLKLSETNRTLFLLGVTKYTAGPYECEIRNPVSASRSDPVTLNLLPKLPKPYITINNLNPRENKDVLNFTCEPKSENYTYIWWLNGQSLPVSPRVKRPIENRILILPSVTRNETGPYQCEIRDRYGGIRSDPVTLNVLYGPDLPRIYPSFTYYRSGEVLYLSCSADSNPPAQYSWTINEKFQLPGQKLFIRHITTKHSGLYVCSVRNSATGKESSKSMTVEVSEAL

SEQ ID NO: 24226 - protein, 306 aa, Artificial Sequence
  Synthetic polypeptide
PASLLNFWNLPTTAQVTIEAEPTKVSEGKDVLLLVHNLPQNLTGYIWYKGQMRDLYHYITSYVVDGEIIIYGPAYSGRETAYSNASLLIQNVTREDAGSYTLHIIKGDDGTRGVTGRFTFTLHPKLPKPYITINNLNPRENKDVLNFTCEPKSENYTYIWWLNGQSLPVSPRVKRPIENRILILPSVTRNETGPYQCEIRDRYGGIRSDPVTLNVLYGPDLPRIYPSFTYYRSGEVLYLSCSADSNPPAQYSWTINEKFQLPGQKLFIRHITTKHSGLYVCSVRNSATGKESSKSMTVEVSDWTVP

SEQ ID NO: 24227 - protein, 408 aa, Artificial Sequence
  Synthetic polypeptide
PASLLNFWNLPTTAQVTIEAEPTKVSEGKDVLLLVHNLPQNLTGYIWYKGQMRDLYHYITSYVVDGEIIIYGPAYSGRETAYSNASLLIQNVTREDAGSYTLHIIKGDDGTRGVTGRFTFTLHLETPKPSISSSNLNPRETMEAVSLTCDPETPDASYLWWMNGQSLPMTHSLKLSETNRTLFLLGVTKYTAGPYECEIRNPVSASRSDPVTLNLLPKLPKPYITINNLNPRENKDVLNFTCEPKSENYTYIWWLNGQSLPVSPRVKRPIENRILILPSVTRNETGPYQCEIRDRYGGIRSDPVTLNVLYGPDLPRIYPSFTYYRSGEVLYLSCSADSNPPAQYSWTINEKFQLPGQKLFIRHITTKHSGLYVCSVRNSATGKESSKSMTVEVSAYSSSINYTSGNRN

SEQ ID NO: 24228 - protein, 406 aa, Artificial Sequence
  Synthetic polypeptide
PASLLNFWNLPTTAQVTIEAEPTKVSEGKDVLLLVHNLPQNLTGYIWYKGQMRDLYHYITSYVVDGEIIIYGPAYSGRETAYSNASLLIQNVTREDAGSYTLHIIKGDDGTRGVTGRFTFTLHLETPKPSISSSNLNPRETMEAVSLTCDPETPDASYLWWMNGQSLPMTHSLKLSETNRTLFLLGVTKYTAGPYECEIRNPVSASRSDPVTLNLLPKLPKPYITINNLNPRENKDVLNFTCEPKSENYTYIWWLNGQSLPVSPRVKRPIENRILILPSVTRNETGPYQCEIRDRYGGIRSDPVTLNVLYGPDLPRIYPSFTYYRSGEVLYLSCSADSNPPAQYSWTINEKFQLPGQKLFIRHITTKHSGLYVCSVRNSATGKESSKSMTVEVSGKWIPASLAIGF

SEQ ID NO: 24229 - protein, 10 aa, Artificial Sequence
  Synthetic polypeptide
PALWEDEHHF

SEQ ID NO: 24230 - protein, 23 aa, Artificial Sequence
  Synthetic polypeptide
QHFGRMSITFKLLEPAYHCSSHD

SEQ ID NO: 24231 - protein, 162 aa, Artificial Sequence
  Synthetic polypeptide
GWVWWLTPVIPALWEAKAGGSRGQEFETSLTNMALETRASPGHTPGCVTFVLNDHSMAFTGDALLIRGCGRTDFQQGCAKTLYHSVHEKIFTLPGDCLIYPAHDYHGFTVSTVEEERTLNPRLTLSCEEFVKIMGNLNLPKPQQIDFAVPANMRCGVQTPTA

SEQ ID NO: 24232 - protein, 21 aa, Artificial Sequence
  Synthetic polypeptide
PTWRWRPGPALATPQAVSPSS

SEQ ID NO: 24233 - protein, 26 aa, Artificial Sequence
  Synthetic polypeptide
DQPDQHGVGDQGQPWPHPRLCHLRPE

SEQ ID NO: 24234 - protein, 53 aa, Artificial Sequence
  Synthetic polypeptide
GWVWWLTPVIPALWEAKAGGSRGQEFETSLTNMALETRASPGHTPGCVTFVLN

SEQ ID NO: 24235 - protein, 168 aa, Artificial Sequence
  Synthetic polypeptide
GWVWWLTPVIPALWEAKAGGSRGQEFETSLTNMALETRASPGHTPGCVTFVLNDHSMAFTGDALLIRGCGRTDFQQGCAKTLYHSVHEKIFTLPGDCLIYPAHDYHGFTVSTVEEERTLNPRLTLSCEEFVKIMGNLNLPKPQQIGEQLGTWTSGSERGGAGVLDSWV

SEQ ID NO: 24236 - protein, 141 aa, Artificial Sequence
  Synthetic polypeptide
RYSMENSRDKQLALETRASPGHTPGCVTFVLNDHSMAFTGDALLIRGCGRTDFQQGCAKTLYHSVHEKIFTLPGDCLIYPAHDYHGFTVSTVEEERTLNPRLTLSCEEFVKIMGNLNLPKPQQIDFAVPANMRCGVQTPTA

SEQ ID NO: 24237 - protein, 22 aa, Artificial Sequence
  Synthetic polypeptide
TISVGDQGQPWPHPRLCHLRPE

SEQ ID NO: 24238 - protein, 32 aa, Artificial Sequence
  Synthetic polypeptide
RYSMENSRDKQLALETRASPGHTPGCVTFVLN

SEQ ID NO: 24239 - protein, 147 aa, Artificial Sequence
  Synthetic polypeptide
RYSMENSRDKQLALETRASPGHTPGCVTFVLNDHSMAFTGDALLIRGCGRTDFQQGCAKTLYHSVHEKIFTLPGDCLIYPAHDYHGFTVSTVEEERTLNPRLTLSCEEFVKIMGNLNLPKPQQIGEQLGTWTSGSERGGAGVLDSWV

SEQ ID NO: 24240 - protein, 44 aa, Artificial Sequence
  Synthetic polypeptide
GQELETSLANMRARSWCTPTRAASGPRTATPALYPPPWAPRTTW

SEQ ID NO: 24241 - protein, 166 aa, Artificial Sequence
  Synthetic polypeptide
SQHFGRPRRADHLRSGVGDQPGQHEGKELVHTYKGCIRSQDCYSGVISTTMGPKDHMVTSSFCCQSDGCNSAFLSVPLTNLTENGLMCPACTASFRDKCMGPMTHCTGKENHCVSLSGHVQAGIFKPRFAMRGCATESMCFTKPGAEVPTGTNVLFLHHIECTHSP

SEQ ID NO: 24242 - protein, 24 aa, Artificial Sequence
  Synthetic polypeptide
FGTRLARGAQIRVGCILLQTLVRW

SEQ ID NO: 24243 - protein, 73 aa, Artificial Sequence
  Synthetic polypeptide
MGPDWPAGLKFGLAAFYCRPWCGGRGSDVGSLCHCGRHPGAAGVSDHMCASGHGLVLGTAEGFLSDPRSQWLG

SEQ ID NO: 24244 - protein, 97 aa, Artificial Sequence
  Synthetic polypeptide
WDQTGPRGSNSGWLHSIADPGAVVEAQTSVPYAIVGGILALLVFLIICVLVGMVWCSVRQKGSYLTHEASGLDEQGEAREAFLNGSDGHKRKEEFFI

SEQ ID NO: 24245 - protein, 13 aa, Artificial Sequence
  Synthetic polypeptide
GLKGQDRKYRQRT

SEQ ID NO: 24246 - protein, 378 aa, Artificial Sequence
  Synthetic polypeptide
CLPYTGIVRIKGAGQEVQTENVTVAEGGVAEITCRLHQYDGSIVVIQNPARQTLFFNGTRALKDERFQLEEFSPRRVRIRLSDARLEDEGGYFCQLYTEDTHHQIATLTVLVAPENPVVEVREQAVEGGEVELSCLVPRSRPAATLRWYRDRKELKGVSSSQENGKVWSVASTVRFRVDRKDDGGIIICEAQNQALPSGHSKQTQYVLDVQYSPTARIHASQAVVREGDTLVLTCAVTGNPRPNQIRWNRGNESLPERAEAVGETLTLPGLVSADNGTYTCEASNKHGHARALYVLVVYDPGAVVEAQTSVPYAIVGGILALLVFLIICVLVGMVWCSVRQKGSYLTHEASGLDEQGEAREAFLNGSDGHKRKEEFFI

SEQ ID NO: 24247 - protein, 51 aa, Artificial Sequence
  Synthetic polypeptide
NPGMDGTTEKGVPNLQTNLPQVIGKLYMHRAGLSPIPEAVTSNAFPVAHQT

SEQ ID NO: 24248 - protein, 73 aa, Artificial Sequence
  Synthetic polypeptide
TEKTEVGVWGCQNVWKMRVKILEWMGPQKREFPTCKQISLKSLASSTCTGPGCHLFPKPLPRMHFLWLIRHEL

SEQ ID NO: 24249 - protein, 210 aa, Artificial Sequence
  Synthetic polypeptide
ELKSWNGWDHRKGSSQPANKSPSSHWQALHAQGRAVTYSRSRYLECISCGSSDMSCERGRHQSLQCRSPEEQCLDVVTHWIQEGEEGRPKDDRHLRGCGYLPGCPGSNGFHNNDTFHFLKCCNTTKCNEGPILELENLPQNGRQCYSCKGNSTHGCSSEETFLIDCRGPMNQCLVATGTHERSLWGSWLPCKSTTALRPPCCEEAQATHV

SEQ ID NO: 24250 - protein, 215 aa, Artificial Sequence
  Synthetic polypeptide
ELKSWNGWDHRKGSSQPANKSPSSHWQALHAQGRAVTYSRSRYLECISCGSSDMSCERGRHQSLQCRSPEEQCLDVVTHWIQEGEEGRPKDDRHLRGCGYLPGCPGSNGFHNNDTFHFLKCCNTTKCNEGPKPKNQSYMVRGCATASMCQHAHLGDAFSMNHIDVSCCTKSGCNHPDLDVQYRSGAAPQPGPAHLSLTITLLMTARLWGGTLLWT

SEQ ID NO: 24251 - protein, 264 aa, Artificial Sequence
  Synthetic polypeptide
ELKSWNGWDHRKGSSQPANKSPSSHWQALHAQGRAVTYSRSRYLECISCGSSDMSCERGRHQSLQCRSPEEQCLDVVTHWIQEGEEGRPKDDRHLRGCGYLPGCPGSNGFHNNDTFHFLKCCNTTKCNEGPILELENLPQNGRQCYSCKGNSTHGCSSEETFLIDCRGPMNQCLVATGTHEPKNQSYMVRGCATASMCQHAHLGDAFSMNHIDVSCCTKSGCNHPDLDVQYRSGAAPQPGPAHLSLTITLLMTARLWGGTLLWT

SEQ ID NO: 24252 - protein, 219 aa, Artificial Sequence
  Synthetic polypeptide
ELKSWNGWDHRKGSSQPANKSPSSHWQALHAQGRAVTYSRSRYLECISCGSSDMSCERGRHQSLQCRSPEEQCLDVVTHWIQEGEEVLELENLPQNGRQCYSCKGNSTHGCSSEETFLIDCRGPMNQCLVATGTHEPKNQSYMVRGCATASMCQHAHLGDAFSMNHIDVSCCTKSGCNHPDLDVQYRSGAAPQPGPAHLSLTITLLMTARLWGGTLLWT

SEQ ID NO: 24253 - protein, 180 aa, Artificial Sequence
  Synthetic polypeptide
ELKSWNGWDHRKGSSQPANKSPSSHWQALHAQGRAVTYSRSRYLECISCGSSDMSCERGRHQSLQCRSPEEQCLDVVTHWIQEGEEGRPKDDRHLRGCGYLPGCPGSNGFHNNDTFHFLKCCNTTKCNEGPILELENLPQNGRQCYSCKGNSTHGCSSEETFLIDCRGPMNQCLVATGTH

SEQ ID NO: 24254 - protein, 106 aa, Artificial Sequence
  Synthetic polypeptide
ELKSWNGWDHRKGSSQPANKSPSSHWQALHAQGRAVTYSRSRYLECISCGSSDMSCERGRHQSLQCRSPEEQCLDVVTHWIQEGEEGRPKDDRHLRGCGYLPGCPG

SEQ ID NO: 24255 - protein, 86 aa, Artificial Sequence
  Synthetic polypeptide
ELKSWNGWDHRKGSSQPANKSPSSHWQALHAQGRAVTYSRSRYLECISCGSSDMSCERGRHQSLQCRSPEEQCLDVVTHWIQEGEE

SEQ ID NO: 24256 - protein, 36 aa, Artificial Sequence
  Synthetic polypeptide
QWSSKCDFKTSSITWELANENSQVPSRPTESWRAGC

SEQ ID NO: 24257 - protein, 232 aa, Artificial Sequence
  Synthetic polypeptide
SGPQSVISRPAASPGNLQMKTLRSLPDLLNPGGQAVNATGHLSDTLWLIPITFLTIGYGDVVPGTMWGKIVCLCTGVMGVCCTALLVAVVARKLEFNKAEKHVHNFMMDIQYTKEMKESAARVLQEAWMFYKHTRRKESHAARRHQRKLLAAINAFRQVRLKHRKLREQVNSMVDISKMHMILYDLQQNLSSSHRALEKQIDTLAGKLDALTELLSTALGPRQLPEPSQQSK

SEQ ID NO: 24258 - protein, 18 aa, Artificial Sequence
  Synthetic polypeptide
ILEGRLLMPLGTFQTHFG

SEQ ID NO: 24259 - protein, 33 aa, Artificial Sequence
  Synthetic polypeptide
KEARSKWRWRLFQNQEHMKACSVIKPGNKFQVT

SEQ ID NO: 24260 - protein, 31 aa, Artificial Sequence
  Synthetic polypeptide
ILAVLLMAVYSQARRRQDPNGDGDCFRIRNT

SEQ ID NO: 24261 - protein, 56 aa, Artificial Sequence
  Synthetic polypeptide
LFCSWLSIHRLEGGKIQMEMETVSESGTHEGLFSHQTWEQISSDLTRFQDSMVNSF

SEQ ID NO: 24262 - protein, 640 aa, Artificial Sequence
  Synthetic polypeptide
LFCSWLSIHRLEGGKIQMEMETVSESGTHEGLFSHQTWEQISSDLTRFQDSMVNSFQFSKQDDMPCQVDAGLSIIHVRQKPSEGRTCKKSFSDVSVLDLHQQLQSREKSHTCDECGKSFCYSSALRIHQRVHMGEKLYNCDVCGKEFNQSSHLQIHQRIHTGEKPFKCEQCGKGFSRRSGLYVHRKLHTGVKPHICEKCGKAFIHDSQLQEHQRIHTGEKPFKCDICCKSFRSRANLNRHSMVHMREKPFRCDTCGKSFGLKSALNSHRMVHTGEKRYKCEECGKRFIYRQDLYKHQIDHTGEKPYNCKECGKSFRWASGLSRHVRVHSGETTFKCEECGKGFYTNSQRYSHQRAHSGEKPYRCEECGKGYKRRLDLDFHQRVHRGEKPYNCKECGKSFGWASCLLNHQRIHSGEKPFKCEECGKRFTQNSQLYTHRRVHSGEKPFKCEECGKRFTQNSQLYSHRRVHTGVKPYKCEECGKGFNSKFNLDMHQRVHTGERPYNCKECGKSFSRASSILNHKRLHGDEKPFKCEECGKRFTENSQLHSHQRVHTGEKPYKCEKCGKSFRWASTHLTHQRLHSREKLLQCEDCGKSIVHSSCLKDQQRDQSGEKTSKCEDCGKRYKRRLNLDTLLSLFLNDT

SEQ ID NO: 24263 - protein, 140 aa, Artificial Sequence
  Synthetic polypeptide
FSIFADRTQKSAFQQDPKEAVTFKDVAVAFTEEELGLLGPAQRKLYRDVMVENFRNLLSVGHPPFKQDVSPIERNEQLWIMTTATRRQGNLGEKNQSKLITVQDRESEEELSCWQIWQQIANDLTRCQDSMINNSQCHKQ

SEQ ID NO: 24264 - protein, 48 aa, Artificial Sequence
  Synthetic polypeptide
SNCGSQSSNIGITQVERLILEPYRRPSDLAFLQIGPRNLHFNKIPRKQ

SEQ ID NO: 24265 - protein, 47 aa, Artificial Sequence
  Synthetic polypeptide
DPEICISTRSQGSSDLQGRGCGLHGGGIGAAGPCPEEAVPRCDGGEL

SEQ ID NO: 24266 - protein, 102 aa, Artificial Sequence
  Synthetic polypeptide
FSIFADRTQKSAFQQDPKEAVTFKDVAVAFTEEELGLLGPAQRKLYRDVMVENFRNLLSVGHPPFKQDVSPIERNEQLWIMTTATRRQGNLGKNQTVMSSYS

SEQ ID NO: 24267 - protein, 816 aa, Artificial Sequence
  Synthetic polypeptide
FSIFADRTQKSAFQQDPKEAVTFKDVAVAFTEEELGLLGPAQRKLYRDVMVENFRNLLSVGHPPFKQDVSPIERNEQLWIMTTATRRQGNLGEKNQSKLITVQDRESEEELSCWQIWQQIANDLTRCQDSMINNSQCHKQGDFPYQVGTELSIQISEDENYIVNKADGPNNTGNPEFPILRTQDSWRKTFLTESQRLNRDQQISIKNKLCQCKKGVDPIGWISHHDGHRVHKSEKSYRPNDYEKDNMKILTFDHNSMIHTGQKSYQCNECKKPFSDLSSFDLHQQLQSGEKSLTCVERGKGFCYSPVLPVHQKVHVGEKLKCDECGKEFSQGAHLQTHQKVHVIEKPYKCKQCGKGFSRRSALNVHCKVHTAEKPYNCEECGRAFSQASHLQDHQRLHTGEKPFKCDACGKSFSRNSHLQSHQRVHTGEKPYKCEECGKGFICSSNLYIHQRVHTGEKPYKCEECGKGFSRPSSLQAHQGVHTGEKSYICTVCGKGFTLSSNLQAHQRVHTGEKPYKCNECGKSFRRNSHYQVHLVVHTGEKPYKCEICGKGFSQSSYLQIHQKAHSIEKPFKCEECGQGFNQSSRLQIHQLIHTGEKPYKCEECGKGFSRRADLKIHCRIHTGEKPYNCEECGKVFRQASNLLAHQRVHSGEKPFKCEECGKSFGRSAHLQAHQKVHTGDKPYKCDECGKGFKWSLNLDMHQRVHTGEKPYKCGECGKYFSQASSLQLHQSVHTGEKPYKCDVCGKVFSRSSQLQSHQRVHTGEKPYKCEICGKSFSWRSNLTVHHRIHVGDKSYKSNRGGKNIRESTQEKKSIK

SEQ ID NO: 24268 - protein, 85 aa, Artificial Sequence
  Synthetic polypeptide
FSIFADRTQKSAFQQDPKEAVTFKDVAVAFTEEELGLLGPAQRKLYRDVMVENFRNLLSVGHPPFKQDVSPIERNEQLWIMTTAT

SEQ ID NO: 24269 - protein, 79 aa, Artificial Sequence
  Synthetic polypeptide
FSIFADRTQKSAFQQDPKEAVTFKDVAVAFTEEELGLLGPAQRKLYRDVMVENFRNLLSVGHPPFKQDVSPIERNEQLW

SEQ ID NO: 24270 - protein, 102 aa, Artificial Sequence
  Synthetic polypeptide
FSIFADRTQKSAFQQDPKEAVTFKDVAVAFTEEELGLLGPAQRKLYRDVMVENFRNLLSVGHPPFKQDVSPIERNEQLWIMTTATRRQGNLGEKNQSKLITV

SEQ ID NO: 24271 - protein, 107 aa, Artificial Sequence
  Synthetic polypeptide
FSIFADRTQKSAFQQDPKEAVTFKDVAVAFTEEELGLLGPAQRKLYRDVMVENFRNLLSVGHPPFKQDVSPIERNEQLWIMTTATRRQGNLDTLLVKALLLYDLAQT

SEQ ID NO: 24272 - protein, 40 aa, Artificial Sequence
  Synthetic polypeptide
FSIFADRTQKSAFQQDPKEAVTFKDVAVAFTEEELGLLGP

SEQ ID NO: 24273 - protein, 33 aa, Artificial Sequence
  Synthetic polypeptide
DPEICISTRSQGSSDLQGRGCGLHGGGIGAAGP

SEQ ID NO: 24274 - protein, 73 aa, Artificial Sequence
  Synthetic polypeptide
FSIFADRTQKSAFQQDPKEAVTFKDVAVAFTEEELGLLGPAQRKLYRDVMVENFRNLLSVGHPPFKQDVSPIE

SEQ ID NO: 24275 - protein, 152 aa, Artificial Sequence
  Synthetic polypeptide
FSIFADRTQKSAFQQDPKEAVTFKDVAVAFTEEELGLLGPAQRKLYRDVMVENFRNLLSVGHPPFKQDVSPIERNEQLWIMTTATRRQGNLGEKNQSKLITVQDRESEEELSCWQIWQQIANDLTRCQDSMINNSQCHKQGDFPYQVGTELS

SEQ ID NO: 24276 - protein, 166 aa, Artificial Sequence
  Synthetic polypeptide
FSIFADRTQKSAFQQDPKEAVTFKDVAVAFTEEELGLLGPAQRKLYRDVMVENFRNLLSVGHPPFKQDVSPIERNEQLWIMTTATRRQGNLGEKNQSKLITVQDRESEEELSCWQIWQQIANDLTRCQDSMINNSQCHKQGDFPYQVGTELSIQISEDENYIVNKA

SEQ ID NO: 24277 - protein, 40 aa, Artificial Sequence
  Synthetic polypeptide
GQNPSCSPQKQSPWSQTPLCPCQEALPSGSLRLGSWEPGH

SEQ ID NO: 24278 - protein, 54 aa, Artificial Sequence
  Synthetic polypeptide
ARTHHAAHRSRAHGARPHSVPVRRLCHRAPCGWDPGSRGTDCRHVFHHHPEPKD

SEQ ID NO: 24279 - protein, 63 aa, Artificial Sequence
  Synthetic polypeptide
PEPIMQPTEAEPMEPDPTLSLSGGSAIGLLAAGILGAGALIAGMCFIIIQSLRTDRQRIGICS

SEQ ID NO: 24280 - protein, 39 aa, Artificial Sequence
  Synthetic polypeptide
EPSTSILVLWMLQGSQAALYIQKIPEQPQKNQDLLLSVQ

SEQ ID NO: 24281 - protein, 39 aa, Artificial Sequence
  Synthetic polypeptide
SLQPQSWSSGCSKAPRQLSTSRRFQSSLKRTRTFSCQSR

SEQ ID NO: 24282 - protein, 39 aa, Artificial Sequence
  Synthetic polypeptide
AFNLNPGPLDAPRLPGSSLHPEDSRAASKEPGPSPVSPG

SEQ ID NO: 24283 - protein, 41 aa, Artificial Sequence
  Synthetic polypeptide
EPSTSILVLWMLQGSQAALYIQKIPEQPQKNQDLLLSVQGV

SEQ ID NO: 24284 - protein, 40 aa, Artificial Sequence
  Synthetic polypeptide
SLQPQSWSSGCSKAPRQLSTSRRFQSSLKRTRTFSCQSRV

SEQ ID NO: 24285 - protein, 40 aa, Artificial Sequence
  Synthetic polypeptide
AFNLNPGPLDAPRLPGSSLHPEDSRAASKEPGPSPVSPGC

SEQ ID NO: 24286 - protein, 284 aa, Artificial Sequence
  Synthetic polypeptide
EPSTSILVLWMLQGSQAALYIQKIPEQPQKNQDLLLSVQGVPDTFQDFNWYLGEETYGGTRLFTYIPGIQRPQRDGSAMGQRDIVGFPNGSMLLRRAQPTDSGTYQVAITINSEWTMKAKTEVQVAEKNKELPSTHLPTNAGILAATIIGSLAAGALLISCIAYLLVTRNWRGQSHRLPAPRGQGSLSILCSAVSPVPSVTPSTWMATTEKPELGPAHDAGDNNIYEVMPSPVLLVSPISDTRSINPARPLPTPPHLQAEPENHQYQDLLNPDPAPYCQLVPTS

SEQ ID NO: 24287 - protein, 106 aa, Artificial Sequence
  Synthetic polypeptide
SLQPQSWSSGCSKAPRQLSTSRRFQSSLKRTRTFSCQSRVSQTPSRTSTGTWGRRRTEARGYLPTSLGYNGLRGMAVPWDSETSWASPMVPCCCAAPSLQTVAPTK

SEQ ID NO: 24288 - protein, 112 aa, Artificial Sequence
  Synthetic polypeptide
AFNLNPGPLDAPRLPGSSLHPEDSRAASKEPGPSPVSPGCPRHLPGLQLVPGGGDVRRHEAIYLHPWDTTASEGWQCHGTARHRGLPQWFHAAAPRPAYRQWHLPSSHYHQL

SEQ ID NO: 24289 - protein, 285 aa, Artificial Sequence
  Synthetic polypeptide
EPSTSILVLWMLQGSQAALYIQKIPEQPQKNQDLLLSVQGVPDTFQDFNWYLGEETYGGTRLFTYIPGIQRPQRDGSAMGQRDIVGFPNGSMLLRRAQPTDSGTYQVAITINSEWTMKAKTEVQVAEKNKELPSTHLPTNAGILAATIIGSLAAGALLISCIAYLLVTRNWRGQSHRLPAPRGQGSLSILCSAVSPVPSVTPSTWMATTEKPELGPAHDAGDNNIYEVMPSPVLLVSPISDTRSINPARPLPTPPHLQAEPENHQYQQDLLNPDPAPYCQLVPTS

SEQ ID NO: 24290 - protein, 56 aa, Artificial Sequence
  Synthetic polypeptide
EKRLEGNSTTEAAFVSGVWRLPLPTPPHLQAEPENHQYQDLLNPDPAPYCQLVPTS

SEQ ID NO: 24291 - protein, 41 aa, Artificial Sequence
  Synthetic polypeptide
KRDWKETAQQKQHLSPGCGGCPCPHPHTCRRSQRTTSTRTC

SEQ ID NO: 24292 - protein, 56 aa, Artificial Sequence
  Synthetic polypeptide
KETGRKQHNRSSICLRGVEAAPAHTPTPAGGAREPPVPGPAKPRPCPLLPAGANFL

SEQ ID NO: 24293 - protein, 57 aa, Artificial Sequence
  Synthetic polypeptide
EKRLEGNSTTEAAFVSGVWRLPLPTPPHLQAEPENHQYQQDLLNPDPAPYCQLVPTS

SEQ ID NO: 24294 - protein, 42 aa, Artificial Sequence
  Synthetic polypeptide
KRDWKETAQQKQHLSPGCGGCPCPHPHTCRRSQRTTSTSRTC

SEQ ID NO: 24295 - protein, 57 aa, Artificial Sequence
  Synthetic polypeptide
KETGRKQHNRSSICLRGVEAAPAHTPTPAGGAREPPVPAGPAKPRPCPLLPAGANFL

SEQ ID NO: 24296 - protein, 583 aa, Artificial Sequence
  Synthetic polypeptide
SQHFGRQEDHLSPRVGDQPGQHNAQAEVRLSVPPLVEVMRGKSVILDCTPTGTHDHYMLEWFLTDRSGARPRLASAEMQGSELQVTMHDTRGRSPPYQLDSQGRLVLAEAQVGDERDYVCVVRAGAAGTAEATARLNVFAKPEATEVSPNKGTLSVMEDSAQEIATCNSRNGNPAPKITWYRNGQRLEVPVEMNPEGYMTSRTVREASGLLSLTSTLYLRLRKDDRDASFHCAAHYSLPEGRHGRLDSPTFHLTLHYPTEHVQFWVGSPSTPAGWVREGDTVQLLCRGDGSPSPEYTLFRLQDEQEEVLNVNLEGNLTLEGVTRGQSGTYGCRVEDYDAADDVQLSKTLELRVAYLDPLELSEGKVLSLPLNSSAVVNCSVHGLPTPALRWTKDSTPLGDGPMLSLSSITFDSNGTYVCEASLPTVPVLSRTQNFTLLVQGSPELKTAEIEPKADGSWREGDEVTLICSARGHPDPKLSWSQLGGSPAEPIPGRQGWVSSSLTLKVTSALSRDGISCEASNPHGNKRHVFHFGTVSPQTSQAGVAVMAVAVSVGLLLLVVAVFYCVRRKGGPCCRQRREKGAP

SEQ ID NO: 24297 - protein, 26 aa, Artificial Sequence
  Synthetic polypeptide
AQELETSLGNIMPRRRCACLYPRWWR

SEQ ID NO: 24298 - protein, 623 aa, Artificial Sequence
  Synthetic polypeptide
SQHFGRQEDHLSPRVGDQPGQHNAQAEVRLSVPPLVEVMRGKSVILDCTPTGTHDHYMLEWFLTDRSGARPRLASAEMQGSELQVTMHDTRGRSPPYQLDSQGRLVLAEAQVGDERDYVCVVRAGAAGTAEATARLNVFAKPEATEVSPNKGTLSVMEDSAQEIATCNSRNGNPAPKITWYRNGQRLEVPVEMNPEGYMTSRTVREASGLLSLTSTLYLRLRKDDRDASFHCAAHYSLPEGRHGRLDSPTFHLTLHYPTEHVQFWVGSPSTPAGWVREGDTVQLLCRGDGSPSPEYTLFRLQDEQEEVLNVNLEGNLTLEGVTRGQSGTYGCRVEDYDAADDVQLSKTLELRVAYLDPLELSEGKVLSLPLNSSAVVNCSVHGLPTPALRWTKDSTPLGDGPMLSLSSITFDSNGTYVCEASLPTVPVLSRTQNFTLLVQGSPELKTAEIEPKADGSWREGDEVTLICSARGHPDPKLSWSQLGGSPAEPIPGRQGWVSSSLTLKVTSALSRDGISCEASNPHGNKRHVFHFGTVSPQTSQAGVAVMAVAVSVGLLLLVVAVFYCVRRKGGPCCRQRREKGAPPPGEPGLSHSGSEQPEQTGLLMGGASGGARGGSGGFGDEC

SEQ ID NO: 24299 - protein, 286 aa, Artificial Sequence
  Synthetic polypeptide
SQHFGRQEDHLSPRVGDQPGQHNAQAEVRLSVPPLVEVMRGKSVILDCTPTGTHDHYMLEWFLVTMHDTRGRSPPYQLDSQGRLVLAEAQVGDERDYVCVVRAGAAGTAEATARLNVFAKPEATEVSPNKGTLSVMEDSAQEIATCNSRNGNPAPKITWYRNGQRLEVPVEMNPEGYMTSRTVREASGLLSLTSTLYLRLRKDDRDASFHCAAHYSLPEGRHGRLDSPTFHLTLHYPTEHVQFWVGSPSTPAGWVREGDTVQLLCRGDGSPSPEYTLFRLQVTHPR

SEQ ID NO: 24300 - protein, 31 aa, Artificial Sequence
  Synthetic polypeptide
PQCHYQPLPHPYAIPTQHTPILTSIPSRILG

SEQ ID NO: 24301 - protein, 81 aa, Artificial Sequence
  Synthetic polypeptide
FPPPTPIASASPCPTLTPVPLPAPTPSLCHPHPAHPHPHLHPQPHPRLSHSGSEQPEQTGLLMGGASGGARGGSGGFGDEC

SEQ ID NO: 24302 - protein, 141 aa, Artificial Sequence
  Synthetic polypeptide
PSLEGPPSYKPPTPKAKLEAQEMPSQLFTLGASEHSPLKTPYFDAGASCTEQEMPRYHELPTLEERSGPLHPGATSLGSPIPVPPGPPAVEDVSLDLEDEEGEEEEEYLDKINPIYDALSYSSPSDSYQGKGFVMSRAMYV

SEQ ID NO: 24303 - protein, 105 aa, Artificial Sequence
  Synthetic polypeptide
AMIMPLHSSPAWRDLPPTSHQPQKRSWRHRRCPPSSSLWGPRSTAHSRPPTLMLAPHALSRKCLDTMSCPPWKNGQDPCTLEPQAWGPPSRCLQGHLLWKTFPWI

SEQ ID NO: 24304 - protein, 49 aa, Artificial Sequence
  Synthetic polypeptide
SCHCTLAQPGGTSLLQATNPKSEAGGTGDALPALHSGGLGAQPTQDPLL

SEQ ID NO: 24305 - protein, 340 aa, Artificial Sequence
  Synthetic polypeptide
DQPSPGGIQPHVSRTLFLLLLLAASAWGVTLSPKDCQVFRSDHGSSISCQPPAEIPGYLPADTVHLAVEFFNLTHLPANLLQGASKLQELHLSSNGLESLSPEFLRPVPQLRVLDLTRNALTGLPPGLFQASATLDTLVLKENQLEVLEVSWLHGLKALGHLDLSGNRLRKLPPGLLANFTLLRTLDLGENQLETLPPDLLRGPLQLERLHLEGNKLQVLGKDLLLPQPDLRYLFLNGNKLARVAAGAFQGLRQLDMLDLSNNSLASVPEGLWASLGQPNWDMRDGFDISGNPWICDQNLSDLYRWLQAQKDKMFSQNDTRCAGPEAVKGQTLLAVAKSQ

SEQ ID NO: 24306 - protein, 35 aa, Artificial Sequence
  Synthetic polypeptide
AQEFETSLAQGAFNPMFLELCSCCCCWQPQPGGSP

SEQ ID NO: 24307 - protein, 25 aa, Artificial Sequence
  Synthetic polypeptide
EAKTGRSLEDSCGPASPRTARGWCR

SEQ ID NO: 24308 - protein, 59 aa, Artificial Sequence
  Synthetic polypeptide
SQHFERPRQDDHLRTPAGQPLRGPRGAGVGEPAGNVVGGGLRGGSRGVRLQRGLVRGPP

SEQ ID NO: 24309 - protein, 112 aa, Artificial Sequence
  Synthetic polypeptide
SQHFERPRQDDHLRTPAGQPLRGPRGAGVGEPAGNVVGGGLRGGSRGVRLQRGRVCACQRRLLWACVSSGPRVQGVCPRATIVVAPAAWALAEPTLGLPEGPGVSEVPVRSL

SEQ ID NO: 24310 - protein, 61 aa, Artificial Sequence
  Synthetic polypeptide
PSEVEAAVSRDHTTVLQSGHQRSSSSGPSAVGSAEGRPLRTRRAPEELHASPAATCSPKTL

SEQ ID NO: 24311 - protein, 88 aa, Artificial Sequence
  Synthetic polypeptide
AEITPLYSSLGIRDLHHLGHQQLVPPRAGPSGPGGPRRSSTRRQPQPVPQRHFNEPACVHLRARALYRLQRHVGTLLGTARSCVWRLD

SEQ ID NO: 24312 - protein, 624 aa, Artificial Sequence
  Synthetic polypeptide
SCSEPRSHHCTPVWASEIFIIWAISSWFRRGPAPQDQAGPGGAPRVASRNLFPKDTLMNLHVYISEHEHFTDFNATSALFWEQHDLVYGDWTSGENSDGCYEHFAELDIPQSVQQNGSIYIHVYFTKSGFHPDPRQKALYRRLATVHMSRMINKYKRRRFQKTKNLLTGETEADPEMIKRAEDYGPVEVISHWHPNITINIVDDHTPWVKGSVPPPLDQYVKFDAVSGDYYPIIYFNDYWNLQKDYYPINESLASLPLRVSFCPLSLWRWQLYAAQSTKSPWNFLGDELYEQSDEEQDSVKVALLETNPYLLALTIIVSIVHSVFEFLAFKNDIQFWNSRQSLEGLSVRSVFFGVFQSFVVLLYILDNETNFVVQVSVFIGVLIDLWKITKVMDVRLDREHRVAGIFPRLSFKDKSTYIESSTKVYDDMAFRYLSWILFPLLGCYAVYSLLYLEHKGWYSWVLSMLYGFLLTFGFITMTPQLFINYKLKSVAHLPWRMLTYKALNTFIDDLFAFVIKMPVMYRIGCLRDDVVFFIYLYQRWIYRVDPTRVNEFGMSGEDPTAAAPVAEVPTAAGALTPTPAPTTTTATREEASTSLPTKPTQGASSASEPQEAPPKPAEDKKKD

SEQ ID NO: 24313 - protein, 122 aa, Artificial Sequence
  Synthetic polypeptide
AEITPLYSSLGIRDLHHLGHQQLVPPRAGPSGPGGPRRSSTRRQPQPVPQRHFNERPAERLHLHPRLLHQEWLPPRPPAEGPVPPACHSPHVPDDQQIQAQTISENQEPADRRDRSGPRNDQ

SEQ ID NO: 24314 - protein, 126 aa, Artificial Sequence
  Synthetic polypeptide
SCSEPRSHHCTPVWASEIFIIWAISSWFRRGPAPQDQAGPGGAPRVASRNLFPKDTLMSVQQNGSIYIHVYFTKSGFHPDPRQKALYRRLATVHMSRMINKYKRRRFQKTKNLLTGETEADPEMIK

SEQ ID NO: 24315 - protein, 35 aa, Artificial Sequence
  Synthetic polypeptide
GSISKKKRKEGPSPVPAGTWPSLQGAPGFCSRPGR

SEQ ID NO: 24316 - protein, 672 aa, Artificial Sequence
  Synthetic polypeptide
TWEAELAVSRDSTIALQPGRQSEAPSQKKKEKKDPAQFLQVHGRACKVHLDSAVALAAESPVNMMPWQGDTNNMIDRFDVRAHLDHIPDYTPPLLTTISPEQESDERKCNYERYRGLVQNDFAGISEEQCLYQIYIDELYGGLQRPSEDEKKKLAEKKASIGYTYEDSTVAKVEKAAEKPEEEESAAEEESNSDEDEVIPDIDVEVDVDELNQEQVADLNKQATTYGMADGDFVRMLRKDKEEAEAIKHAKALEEEKAMYSGRRSRRQRREFREKRLRGRKISPPSYARRDSPTYDPYKRSPSESSSESRSRSRSPTPGREEKITFITSFGGSDEEAAAAAAAAAASGVTTGKPPAPPQPGGPAPGRNASARRRSSSSSSSSSASRTSSSRSSSRSSSRSRRGGGYYRSGRHARSRSRSWSRSRSRSRRYSRSRSRGRRHSGGGSRDGHRYSRSPARRGGYGPRRRSRSRSHSGDRYRRGGRGLRHHSSSRSRSSWSLSPSRSRSLTRSRSHSPSPSQSRSRSRSRSQSPSPSPAREKLTRPAASPAVGEKLKKTEPAAGKETGAAKPKLTPQEKLKLRMQKALNRQFKADKKAAQEKMIQQEHERQEREDELRAMARKIRMKERERREKEREEWERQYSRQSRSPSPRYSREYSSSRRRSRSRSRSPHYRH

SEQ ID NO: 24317 - protein, 55 aa, Artificial Sequence
  Synthetic polypeptide
AETAPLHSSLGDRVRLHLKKKKKRRTQPSSCRYMAELARCTWILQSPWPLRALLI

SEQ ID NO: 24318 - protein, 24 aa, Artificial Sequence
  Synthetic polypeptide
GSISKKKRKEGPSPVPAGVGRTEV

SEQ ID NO: 24319 - protein, 610 aa, Artificial Sequence
  Synthetic polypeptide
TWEAELAVSRDSTIALQPGRQSEAPSQKKKEKKDPAQFLQESDERKCNYERYRGLVQNDFAGISEEQCLYQIYIDELYGGLQRPSEDEKKKLAEKKASIGYTYEDSTVAKVEKAAEKPEEEESAAEEESNSDEDEVIPDIDVEVDVDELNQEQVADLNKQATTYGMADGDFVRMLRKDKEEAEAIKHAKALEEEKAMYSGRRSRRQRREFREKRLRGRKISPPSYARRDSPTYDPYKRSPSESSSESRSRSRSPTPGREEKITFITSFGGSDEEAAAAAAAAAASGVTTGKPPAPPQPGGPAPGRNASARRRSSSSSSSSSASRTSSSRSSSRSSSRSRRGGGYYRSGRHARSRSRSWSRSRSRSRRYSRSRSRGRRHSGGGSRDGHRYSRSPARRGGYGPRRRSRSRSHSGDRYRRGGRGLRHHSSSRSRSSWSLSPSRSRSLTRSRSHSPSPSQSRSRSRSRSQSPSPSPAREKLTRPAASPAVGEKLKKTEPAAGKETGAAKPKLTPQEKLKLRMQKALNRQFKADKKAAQEKMIQQEHERQEREDELRAMARKIRMKERERREKEREEWERQYSRQSRSPSPRYSREYSSSRRRSRSRSRSPHYRH

SEQ ID NO: 24320 - protein, 102 aa, Artificial Sequence
  Synthetic polypeptide
AETAPLHSSLGDRVRLHLKKKKKRRTQPSSCRSRTNGSVTTSATEAWCRTTLPASQRSSACTRSTLMSCTEASRDPAKMRRRSWQRRRLPSVIPTRTARWPR

SEQ ID NO: 24321 - protein, 592 aa, Artificial Sequence
  Synthetic polypeptide
TWEAELAVSRDSTIALQPGRQSEAPSQKKKEKKDPAQFLQVHGRACKVHLDSAVALAAESPVNMMPWQGDTNNMIDRFDVRAHLDHIPDYTPPLLTTISPEQESDERKCNYERYRGLVQNDFAGISEEQCLYQIYIDELYGGLQRPSEDEKKKLAEKKASIGYTYEDSTVAKVEKAAEKPEEEESAAEEESNSDEDEVIPDIDVEVDVDELNQEQVADLNKQATTYGMADGDFVRMLRKDKEEAEAIKHAKALEEEKAMYSGRRSRRQRREFREKRLRGRKISPPSYARRDSPTYDPYKRSPSESSSESRSRSRSPTPGREEKITFITSFGGSDEEAAAAAAAAAASGVTTGKPPAPPQPGGPAPGRNASARRRSSSSSSSSSASRTSSSRSSSRSSSRSRRGGGYYRSGRHARSRSRSWSRSRSRSRRYSRSRSRGRRHSGGGSRDGHRYSRSPARRGGYGPRRRSRSRSHSGDRYRRGGRGLRHHSSSRSRSSWSLSPSRSRSLTRSRSHSPSPSQSRSRSRSRSQSPSPSPAREKLTRPAASPAVGEKLKKTEPAAGKETGAAKVTQADASGEAETEDAEGAEQAVQGG

SEQ ID NO: 24322 - protein, 84 aa, Artificial Sequence
  Synthetic polypeptide
TWEAELAVSRDSTIALQPGRQSEAPSQKKKEKKDPAQFLQVHGRACKVHLDSAVALAAESPVNMMPWQGDTNNMIDRFDVRAHL

SEQ ID NO: 24323 - protein, 653 aa, Artificial Sequence
  Synthetic polypeptide
TWEAELAVSRDSTIALQPGRQSEAPSQKKKEKKDPAQFLQVHGRACKVHLDSAVALAAESPVNMMPWQGDTNNMIDRFDVRAHLDHIPDYTPPLLTTISPEQESDERKCNYERYRGLVQNDFAGISEEQCLYQIYIDELYGGLQRPSEDEKKKLAEKKASIGYTYEDSTVAKVEKAAEKPEEEESAAEEESNSDEDEVIPDIDVEVDVDELNQEQVADLNKQATTYGMADGDFVRMLRKDKEEAEAIKHAKALEEEKAMYSGRRSRRQRREFREKRLRGRKISPPSYARRDSPTYDPYKRSPSESSSESRSRSRSPTPGREEKITFITSFGGSDEEAAAAAAAAAASGVTTGKPPAPPQPGGPAPGRNASARRRSSSSSSSSSASRTSSSRSSSRSSSRSRRGGGYYRSGRHARSRSRSWSRSRSRSRRYSRSRSRGRRHSGGGSRDGHRYSRSPARRGGYGPRRRSRSRSHSGDRYRRGGRGLRHHSSSRSRSSWSLSPSRSRSLTRSRSHSPSPSQSRSRSRSRSQSPSPSPAREKLTRPAASPAVGEKLKKTEPAAGKETGAAKVIKADKKAAQEKMIQQEHERQEREDELRAMARKIRMKERERREKEREEWERQYSRQSRSPSPRYSREYSSSRRRSRSRSRSPHYRH

SEQ ID NO: 24324 - protein, 205 aa, Artificial Sequence
  Synthetic polypeptide
TWEAELAVSRDSTIALQPGRQSEAPSQKKKEKKDPAQFLQVHGRACKVHLDSAVALAAESPVNMMPWQGDTNNMIDRFDVRAHLDHIPDYTPPLLTTISPEQESDERKCNYERYRGLVQNDFAGISEEQCLYQIYIDELYGGLQRPSEDEKKKLAEKKASIGYTYEDSTVAKVEKAAEKPEEEESAAEEESNSDEDETWRWTWMN

SEQ ID NO: 24325 - protein, 88 aa, Artificial Sequence
  Synthetic polypeptide
QCGMVVTQHRLQSQGSATFWLCNPGASDQTPPGLNLLVWKVGVITGLRGVVKMDVICIKHLEHCLLRGAAGASTQREVPGPFLHVNRL

SEQ ID NO: 24326 - protein, 491 aa, Artificial Sequence
  Synthetic polypeptide
GELRERVLRGKYRVPFYMSTDCESILRRFLVLNPAKRCTLEQIMKDKWINIGYEGEELKPYTEPEEDFGDTKRIEVMVGMGYTREEIKESLTSQKYNEVTATYLLLGRKTEEGGDRGAPGLALARVRAPSDTTNGTSSSKGTSHSKGQRSSSSTYHRQRRHSDFCGPSPAPLHPKRSPTSTGEAELKEERLPGRKASCSTAGSGSRGLPPSSPMVSSAHNPNKAEIPERRKDSTSTPNNLPPSMMTRRNTYVCTERPGAERPSLLPNGKENSSGTPRVPPASPSSHSLAPPSGERSRLARGSTIRSTFHGGQVRDRRAGGGGGGGVQNGPPASPTLAHEAAPLPAGRPRPTTNLFTKLTSKLTRRVADEPERIGGPEVTSCHLPWDQTETAPRLLRFPWSVKLTSSRPPEALMAALRQATAAARCRCRQPQPFLLACLHGGAGGPEPLSHFEVEVCQLPRPGLRGVLFRRVAGTALAFRTLVTRISNDLEL

SEQ ID NO: 24327 - protein, 70 aa, Artificial Sequence
  Synthetic polypeptide
PNPSRPQPPRLESGRYNRASRRCENGCNMHKALRTLPAKGSCGSEYSEGSTGSLSTCQQTVRASCGDFWC

SEQ ID NO: 24328 - protein, 427 aa, Artificial Sequence
  Synthetic polypeptide
GELRERVLRGKYRVPFYMSTDCESILRRFLVLNPAKRCTLEQIMKDKWINIGYEGEELKPYTEPEEDFGDTKRIEVMVGMGYTREEIKESLTSQKYNEVTATYLLLGRKTEEGGDRGAPGLALARVRAPSDTTNGTSSSKGTSHSKGQRSSSSTYHRQRRHSDFCGPSPAPLHPKRSPTSTGEAELKEERLPGRKASCSTAGSGSRGLPPSSPMVSSAHNPNKAEIPERRKDSTSTPNNLPPSMMTRRNTYVCTERPGAERPSLLPNGKENSSGTPRVPPASPSSHSLAPPSGERSRLARGSTIRSTFHGGQVRDRRAGGGGGGGVQNGPPASPTLAHEAAPLPAGRPRPTTNLFTKLTSKLTRRVTLDPSKRQNSNRCVSGASLPQGSKIRSQTNLRESGDLRSQVAIYLGIKRKPPPGCSDSPGV

SEQ ID NO: 24329 - protein, 29 aa, Artificial Sequence
  Synthetic polypeptide
AKEAEVAVSQDHATALQHRTPQTPHRAGA

SEQ ID NO: 24330 - protein, 387 aa, Artificial Sequence
  Synthetic polypeptide
AKIMPLHSSTGPPKPPTELEPEPEIEGLLTPVLEAGDVDEGPVARPLSPTRLQPALPPEAQSVPELEEVARVLAEIPRPLKRRGSMEQAPAVALPPTHKKQYQQIISRLFHRHGGPGPGGPEPELSPITEGSEARAGPPAPAPPAPIPPPAPSQSSPPEQPQSMEMRSVLRKAGSPRKARRARLNPLVLLLDAALTGELEVVQQAVKEMNDPSQPNEEGITALHNAICGANYSIVDFLITAGANVNSPDSHGWTPLHCAASCNDTVICMALVQHGAAIFATTLSDGATAFEKCDPYREGYADCATYLADVEQSMGLMNSGAVYALWDYSAEFGDELSFREGESVTVLRRDGPEETDWWWAALHGQEGYVPRNYFGLFPRVKPQRSKV

SEQ ID NO: 24331 - protein, 37 aa, Artificial Sequence
  Synthetic polypeptide
LLSLSQGGGGGSEPRSCHCTPAQDPPNPPPSWSLSRR

SEQ ID NO: 24332 - protein, 124 aa, Artificial Sequence
  Synthetic polypeptide
PQKDPQQALKELAKMCILADCTLILAWSPEEAGRYLETYKAYEQKPADLLMEKLEQDFVSRVTECLTTVKSVNKTDSQTLLTTFGSLEQLIAASREDLALCPGLGPQKARRLFDVLHEPFLKVP

SEQ ID NO: 24333 - protein, 40 aa, Artificial Sequence
  Synthetic polypeptide
GTSRCGWNPCCAESWLCDPKKIPSRPSRSWLRCVSWPTAH

SEQ ID NO: 24334 - protein, 36 aa, Artificial Sequence
  Synthetic polypeptide
KGSRDKALADVVGILAVLNPGCVTPKRSPAGPQGAG

SEQ ID NO: 24335 - protein, 100 aa, Artificial Sequence
  Synthetic polypeptide
PQKDPQQALKELAKMCILADCTLILAWSPEEAGRYLETYKAYEQKPADLLMEKLEQDFVSRSLEQLIAASREDLALCPGLGPQKARRLFDVLHEPFLKVP

SEQ ID NO: 24336 - protein, 63 aa, Artificial Sequence
  Synthetic polypeptide
PQKDPQQALKELAKMCILADCTLILAWSLWNSSSPHQEKIWPYAQAWALRKPGGCLMSCTSPS

SEQ ID NO: 24337 - protein, 40 aa, Artificial Sequence
  Synthetic polypeptide
PQKDPQQALKELAKMCILADCTLILAWRPGGCLMSCTSPS

SEQ ID NO: 24338 - protein, 150 aa, Artificial Sequence
  Synthetic polypeptide
PQKDPQQALKELAKMCILADCTLILAWSPEEAGRYLETYKAYEQKPADLLMEKLEQDFVSRVTECLTTVKSVNKTDSQTLLTTFGSLEQLIAASREDLALCPGLGPQKVRALGKNPRSWGKERAPNKHNLRPQSFKVKKEPKTRHSGFRL

SEQ ID NO: 24339 - protein, 108 aa, Artificial Sequence
  Synthetic polypeptide
PQKDPQQALKELAKMCILADCTLILAWSPEEAGRYLETYKAYEQKPADLLMEKLEQDFVSRVTECLTTVKSVNKTDSQTLLTTFGSLEQLIAASREDLALCPGLGPQK

SEQ ID NO: 24340 - protein, 85 aa, Artificial Sequence
  Synthetic polypeptide
PQKDPQQALKELAKMCILADCTLILAWSPEEAGRYLETYKAYEQKPADLLMEKLEQDFVSRVTECLTTVKSVNKTDSQTLLTTFG

SEQ ID NO: 24341 - protein, 61 aa, Artificial Sequence
  Synthetic polypeptide
PQKDPQQALKELAKMCILADCTLILAWSPEEAGRYLETYKAYEQKPADLLMEKLEQDFVSR

SEQ ID NO: 24342 - protein, 32 aa, Artificial Sequence
  Synthetic polypeptide
GWARWLTPIISALWEVEAGGSQGASSTSPRVR

SEQ ID NO: 24343 - protein, 21 aa, Artificial Sequence
  Synthetic polypeptide
SQHFGRSRRVDHKEPPQQAQE

SEQ ID NO: 24344 - protein, 139 aa, Artificial Sequence
  Synthetic polypeptide
MGTVAHAYNLSTLGGRGGWITRSLLNKPKSEMTPEELQKREEEEFNTGPLSVLTQSVKNNTQVLINCRNNKKLLGRVKAFDRHCNMVLENVKEMWTEVPKSGKGKKKSKPVNKDRYISKMFLRGDSVIVVLRNPLIAGK

SEQ ID NO: 24345 - protein, 99 aa, Artificial Sequence
  Synthetic polypeptide
MGTVAHAYNLSTLGGRGGWITRSLLNKPKSEMTPEELQKREEEEFNTGPLSVLTQSVKNNTQVLINCRNNKKLLGRVKAFDSASPPCSPPGTATWCWRT

SEQ ID NO: 24346 - protein, 15 aa, Artificial Sequence
  Synthetic polypeptide
NNSSFQREPPQQAQE

SEQ ID NO: 24347 - protein, 124 aa, Artificial Sequence
  Synthetic polypeptide
ITVLFKGSLLNKPKSEMTPEELQKREEEEFNTGPLSVLTQSVKNNTQVLINCRNNKKLLGRVKAFDRHCNMVLENVKEMWTEVPKSGKGKKKSKPVNKDRYISKMFLRGDSVIVVLRNPLIAGK

SEQ ID NO: 24348 - protein, 15 aa, Artificial Sequence
  Synthetic polypeptide
QFFSKGASSTSPRVR

SEQ ID NO: 24349 - protein, 84 aa, Artificial Sequence
  Synthetic polypeptide
ITVLFKGSLLNKPKSEMTPEELQKREEEEFNTGPLSVLTQSVKNNTQVLINCRNNKKLLGRVKAFDSASPPCSPPGTATWCWRT

SEQ ID NO: 24350 - protein, 162 aa, Artificial Sequence
  Synthetic polypeptide
ASGLGPHQHGVPTRGHASLLPGHLHPRGVSRHGSPDQAPGSAHGHTDDSCRTGTRCRADQTVQGGAQGGEGGEDRERPDQAAPVSPGPSHLGGGFPELHVPPGGRGTAGQEEARAHYPCHSAPAGRRWWAQENFPSQRRAEAPYRCPGGSHEAGRCEADPAG

SEQ ID NO: 24351 - protein, 865 aa, Artificial Sequence
  Synthetic polypeptide
EPQAWVLISMVYLPEAMPASFQAIYTPVESAGTEAQIKHLARLMATQMTAAGLGPGVEQTKQCKEEPKEEKVVKTESVLIKRRLSAQGQAISVVGSLSSMSPLEEEAPQAKRRPEPIIPVTQPRLAGAGGRKKIFRLSDVLKPLTDAQVEAMKLGAVKRILRAEKAVACSGAAQVRIKILASLVTQFNSGLKAEVLSFILEDVRARLDLAFAWLYQEYNAYLAAGASGSLDKYEDCLIRLLSGLQEKPDQKDGIFTKVVLEAPLITESALEVVRKYCEDESRTYLGMSTLRDLIFKRPSRQFQYLHVLLDLSSHEKDKVRSQALLFIKRMYEKEQLREYVEKFALNYLQLLVHPNPPSVLFGADKDTEVAAPWTEETVKQCLYLYLALLPQNHKLIHELAAVYTEAIADIKRTVLRVIEQPIRGMGMNSPELLLLVENCPKGAETLVTRCLHSLTDKVPPSPELVKRVRDLYHKRLPDVRFLIPVLNGLEKKEVIQALPKLIKLNPIVVKEVFNRLLGTQHGEGNSALSPLNPGELLIALHNIDSVKCDMKSIIKATNLCFAERNVYTSEVLAVVMQQLMEQSPLPMLLMRTVIQSLTMYPRLGGFVMNILSRLIMKQVWKYPKVWEGFIKCCQRTKPQSFQVILQLPPQQLGAVFDKCPELREPLLAHVRSFTPHQQAHIPNSIMTILEASGKQEPEAKEAPAGPLEEDDLEPLTLAPAPAPRPPQDLIGLRLAQEKALKRQLEEEQKLKPGGVGAPSSSSPSPSPSARPGPPPSEEAMDFREEGPECETPGIFISMDDDSGLTEAALLDSSLEGPLPKETAAGGLTLKEERSPQTLAPVGEDAMKTPSPAAEDAREPEAKGNS

SEQ ID NO: 24352 - protein, 47 aa, Artificial Sequence
  Synthetic polypeptide
SLRPGSSSAWCTYPRPCQPPSRPSTPPWSQQARKPRSSTWLGSWPHR

SEQ ID NO: 24353 - protein, 264 aa, Artificial Sequence
  Synthetic polypeptide
EPQAWVLISMVYLPEAMPASFQAIYTPVESAGTEAQIKHLARLMATQMTAAGLGPGVEQTKQCKEEPKEEKVVKTESVLIKRRLSAQGQAISVVGSLSSMSPLEEEAPQAKRRPEPIIPVTQPRLAGAGGRKKIFRLSDVLKPLTDAQVEAMKLGAVKRILRAEKAVACSGAAQVRIKILASLVTQFNSGLKAEVLSFILEDVRARLDLAFAWLYQEYNAYLAAGSSPRLCWRRHSSQRVPWRWSASTARMRVAPIWACPHFET

SEQ ID NO: 24354 - protein, 36 aa, Artificial Sequence
  Synthetic polypeptide
NDGYQRLKRTCYGKRARQPWSSCLSSWCTLPSPPST

SEQ ID NO: 24355 - protein, 16 aa, Artificial Sequence
  Synthetic polypeptide
KGRAMGRGQGSLGAAA

SEQ ID NO: 24356 - protein, 1056 aa, Artificial Sequence
  Synthetic polypeptide
WLPEAEKDVLWEEGKAALEQLLKFMVHPAISSINLTTALGSLANIARQRPMFMSEVIQAYETLHANLPPTLAKSQVSSVRKNLKLHLLSVLKHPASLEFQAQITTLLVDLGTPQAEIARNMPSSKDTRKRPRDDSDSTLKKMKLEPNLGEDDEDKDLEPGPSGTSKASAQISGQSDTDITAEFLQPLLTPDNVANLVLISMVYLPEAMPASFQAIYTPVESAGTEAQIKHLARLMATQMTAAGLGPGVEQTKQCKEEPKEEKVVKTESVLIKRRLSAQGQAISVVGSLSSMSPLEEEAPQAKRRPEPIIPVTQPRLAGAGGRKKIFRLSDVLKPLTDAQVEAMKLGAVKRILRAEKAVACSGAAQVRIKILASLVTQFNSGLKAEVLSFILEDVRARLDLAFAWLYQEYNAYLAAGASGSLDKYEDCLIRLLSGLQEKPDQKDGIFTKVVLEAPLITESALEVVRKYCEDESRTYLGMSTLRDLIFKRPSRQFQYLHVLLDLSSHEKDKVRSQALLFIKRMYEKEQLREYVEKFALNYLQLLVHPNPPSVLFGADKDTEVAAPWTEETVKQCLYLYLALLPQNHKLIHELAAVYTEAIADIKRTVLRVIEQPIRGMGMNSPELLLLVENCPKGAETLVTRCLHSLTDKVPPSPELVKRVRDLYHKRLPDVRFLIPVLNGLEKKEVIQALPKLIKLNPIVVKEVFNRLLGTQHGEGNSALSPLNPGELLIALHNIDSVKCDMKSIIKATNLCFAERNVYTSEVLAVVMQQLMEQSPLPMLLMRTVIQSLTMYPRLGGFVMNILSRLIMKQVWKYPKVWEGFIKCCQRTKPQSFQVILQLPPQQLGAVFDKCPELREPLLAHVRSFTPHQQAHIPNSIMTILEASGKQEPEAKEAPAGPLEEDDLEPLTLAPAPAPRPPQDLIGLRLAQEKALKRQLEEEQKLKPGGVGAPSSSSPSPSPSARPGPPPSEEAMDFREEGPECETPGIFISMDDDSGLTEAALLDSSLEGPLPKETAAGGLTLKEERSPQTLAPVGEDAMKTPSPAAEDAREPEAKGNS

SEQ ID NO: 24357 - protein, 455 aa, Artificial Sequence
  Synthetic polypeptide
WLPEAEKDVLWEEGKAALEQLLKFMVHPAISSINLTTALGSLANIARQRPMFMSEVIQAYETLHANLPPTLAKSQVSSVRKNLKLHLLSVLKHPASLEFQAQITTLLVDLGTPQAEIARNMPSSKDTRKRPRDDSDSTLKKMKLEPNLGEDDEDKDLEPGPSGTSKASAQISGQSDTDITAEFLQPLLTPDNVANLVLISMVYLPEAMPASFQAIYTPVESAGTEAQIKHLARLMATQMTAAGLGPGVEQTKQCKEEPKEEKVVKTESVLIKRRLSAQGQAISVVGSLSSMSPLEEEAPQAKRRPEPIIPVTQPRLAGAGGRKKIFRLSDVLKPLTDAQVEAMKLGAVKRILRAEKAVACSGAAQVRIKILASLVTQFNSGLKAEVLSFILEDVRARLDLAFAWLYQEYNAYLAAGSSPRLCWRRHSSQRVPWRWSASTARMRVAPIWACPHFET

SEQ ID NO: 24358 - protein, 78 aa, Artificial Sequence
  Synthetic polypeptide
KDKELFTYTMTWQDLKGTVSDTRSWSQQLHSSCLLDNSLPPPVFKRNYRRSCWLRTVAVPADTQVWEQDLQPFRAVLL

SEQ ID NO: 24359 - protein, 137 aa, Artificial Sequence
  Synthetic polypeptide
LGKISKAPCQIQEVGLNNYIALVCWITVFLLQCSKGTTDAPVGSGLWLCQPTPRCGNKIYNPSEQCCYDDAILSLKETRRCGSTCTFWPCFELCCPESFGPQQKFLVKLRVLGMKSQCHLSPISRSCTRNRRHVLYP

SEQ ID NO: 24360 - protein, 91 aa, Artificial Sequence
  Synthetic polypeptide
GHSAMSRDVFRRHTWAGVLLACHGVYPMSWMTPSLRVWPPSSYRKSSTASLGTGGAPQPPGKVQRASRRCESCMRKSMSPRWRSFTSPLLR

SEQ ID NO: 24361 - protein, 30 aa, Artificial Sequence
  Synthetic polypeptide
ATRRCPETFLDGTLGRGCSWLAMGFIQCPG

SEQ ID NO: 24362 - protein, 622 aa, Artificial Sequence
  Synthetic polypeptide
TAHLGGGAPGLPWGLSNVLDDPKSAGVATFVIQEEFDRFTGYWWCPTASWEGSEGLKTLRILYEEVDESEVEVIHVPSPALEERKTDSYRYPRTGSKNPKIALKLAEFQTDSQGKIVSTQEKELVQPFSSLFPKVEYIARAGWTRDGKYAWAMFLDRPQQWLQLVLLPPALFIPSTENEEQRLASARAVPRNVQPYVVYEEVTNVWINVHDIFYPFPQSEGEDELCFLRANECKTGFCHLYKVTAVLKSQGYDWSEPFSPGEDEFKCPIKEEIALTSGEWEVLARHGSKIWVNEETKLVYFQGTKDTPLEHHLYVVSYEAAGEIVRLTTPGFSHSCSMSQNFDMFVSHYSSVSTPPCVHVYKLSGPDDDPLHKQPRFWASMMEAASCPPDYVPPEIFHFHTRSDVRLYGMIYKPHALQPGKKHPTVLFVYGGPQVQLVNNSFKGIKYLRLNTLASLGYAVVVIDGRGSCQRGLRFEGALKNQMGQVEIEDQVEGLQFVAEKYGFIDLSRVAIHGWSYGGFLSLMGLIHKPQVFKVAIAGAPVTVWMAYDTGYTERYMDVPENNQHGYEAGSVALHVEKLPNEPNRLLILHGFLDENVHFFHTNFLVSQLIRAGKPYQLQEYL

SEQ ID NO: 24363 - protein, 649 aa, Artificial Sequence
  Synthetic polypeptide
TAHLGGGAPGLPWGLSNVLDDPKSAGVATFVIQEEFDRFTGYWWCPTASWEGSEGLKTLRILYEEVDESEVEVIHVPSPALEERKTDSYRYPRTGSKNPKIALKLAEFQTDSQGKIVSTQEKELVQPFSSLFPKVEYIARAGWTRDGKYAWAMFLDRPQQWLQLVLLPPALFIPSTENEEQRLASARAVPRNVQPYVVYEEVTNVWINVHDIFYPFPQSEGEDELCFLRANECKTGFCHLYKVTAVLKSQGYDWSEPFSPGEDEFKCPIKEEIALTSGEWEVLARHGSKIWVNEETKLVYFQGTKDTPLEHHLYVVSYEAAGEIVRLTTPGFSHSCSMSQNFDMFVSHYSSVSTPPCVHVYKLSGPDDDPLHKQPRFWASMMEAASCPPDYVPPEIFHFHTRSDVRLYGMIYKPHALQPGKKHPTVLFVYGGPQVQLVNNSFKGIKYLRLNTLASLGYAVVVIDGRGSCQRGLRFEGALKNQMGQVEIEDQVEGLQFVAEKYGFIDLSRVAIHGWSYGGFLSLMGLIHKPQVFKVAIAGAPVTVWMAYDTGYTERYMDVPENNQHGYEAGSVALHVEKLPNEPNRLLILHGFLDENVHFFHTNFLVSQLIRAGKPYQLQIYPNERHSIRCPESGEHYEVTLLHFLQEYL

SEQ ID NO: 24364 - protein, 101 aa, Artificial Sequence
  Synthetic polypeptide
TAHLGGGAPGLPWGLSNVLDDPKSAGVATFVIQEEFDRFTGYWWCPTASWEGSEGLKTLRILYEEVDESEVEVIHVPSPALEERKTDSYRYPRTARIPRLP

SEQ ID NO: 24365 - protein, 275 aa, Artificial Sequence
  Synthetic polypeptide
TAHLGGGAPGLPWGLSNVLDDPKSAGVATFVIQEEFDRFTGYWWCPTASWEGSEGLKTLRILYEEVDESEVEVIHVPSPALEERKTDSYRYPRTGSKNPKIALKLAEFQTDSQGKIVSTQEKELVQPFSSLFPKVEYIARAGWTRDGKYAWAMFLDRPQQWLQLVLLPPALFIPSTENEEQRLASARAVPRNVQPYVVYEEVTNVWINVHDIFYPFPQSEGEDELCFLRANECKTGFCHLYKVTAVLKSQGYDWSEPFSPGEGEQSLTNAVDSSR

SEQ ID NO: 24366 - protein, 35 aa, Artificial Sequence
  Synthetic polypeptide
GHSAMSRDVFRRHTWAGVLLACHGVYPMSWMTPSL

SEQ ID NO: 24367 - protein, 24 aa, Artificial Sequence
  Synthetic polypeptide
TAHLGGGAPGLPWGLSNVLDDPKS

SEQ ID NO: 24368 - protein, 42 aa, Artificial Sequence
  Synthetic polypeptide
FVSSTGQNACLPHEISSLPTWCQQPFAHTLPPMKRGISPEPG

SEQ ID NO: 24369 - protein, 50 aa, Artificial Sequence
  Synthetic polypeptide
NGVIVIIPKAVVRMKWVNLCQAQAKMPACHTKYLPFQPGVSSLSLILYHL

SEQ ID NO: 24370 - protein, 369 aa, Artificial Sequence
  Synthetic polypeptide
NGLICVKHRPKCLPATRNIFPSNLVSAAFRSYSTTYEERNITGTRVKVPVGQEVEGMNILGLVVFAIVFGVALRKLGPEGELLIRFFNSFNEATMVLVSWIMWYAPVGIMFLVAGKIVEMEDVGLLFARLGKYILCCLLGHAIHGLLVLPLIYFLFTRKNPYRFLWGIVTPLATAFGTSSSSATLPLMMKCVEENNGVAKHISRFILPIGATVNMDGAALFQCVAAVFIAQLSQQSLDFVKIITILVTATASSVGAAGIPAGGVLTLAIILEAVNLPVDHISLILAVDWLVDRSCTVLNVEGDALGAGLLQNYVDRTESRSTEPELIQVKSELPLDPLPVPTEEGNPLLKHYRGPAGDATVASEKESVM

SEQ ID NO: 24371 - protein, 245 aa, Artificial Sequence
  Synthetic polypeptide
NGLICVKHRPKCLPATRNIFPSNLVSAAFRSYSTTYEERNITGTRVKVPVGQEVEGMNILGLVVFAIVFGVALRKLGPEGELLIRFFNSFNEATMVLVSWIMWYAPVGIMFLVAGKIVEMEDVGLLFARLGKYILCCLLGHAIHGLLVLPLIYFLFTRKNPYRFLWGIVTPLATAFGTSSSSATLPLMMKCVEENNGVAKHISRFILPIGATVNMDGAALFQCVAAVFIAQLSQQSLDFVKIITI

SEQ ID NO: 24372 - protein, 25 aa, Artificial Sequence
  Synthetic polypeptide
LLMDPLYPHPEPGRQDAPGQVVHAV

SEQ ID NO: 24373 - protein, 156 aa, Artificial Sequence
  Synthetic polypeptide
WIRFILIQNRAGKTRLAKWYMQFDDDEKQKLIEEVHAVVTVRDAKHTNFVEVLAISVADSLSVLQFRNFKIIYRRYAGLYFCICVDVNDNNLAYLEAIHNFVEVLNEYFHNVCELDLVFNFYKVYTVVDEMFLAGEIRETSQTKVLKQLLMLQSLE

SEQ ID NO: 24374 - protein, 74 aa, Artificial Sequence
  Synthetic polypeptide
RKPDTKATECMIPLIYNVQNRHIHRDRKETRGCQALGERRVTANGSALSSSRTGQARRAWPSGTCSLMMMRNRS

SEQ ID NO: 24375 - protein, 142 aa, Artificial Sequence
  Synthetic polypeptide
WIRFILIQNRAGKTRLAKWYMQFDDDEKQKLIEEVHAVVTVRDAKHTNFVEFRNFKIIYRRYAGLYFCICVDVNDNNLAYLEAIHNFVEVLNEYFHNVCELDLVFNFYKVYTVVDEMFLAGEIRETSQTKVLKQLLMLQSLE

SEQ ID NO: 24376 - protein, 104 aa, Artificial Sequence
  Synthetic polypeptide
WIRFILIQNRAGKTRLAKWYMQFDDDEKQKLIEEVHAVVTVRDAKHTNFVEVLNEYFHNVCELDLVFNFYKVYTVVDEMFLAGEIRETSQTKVLKQLLMLQSLE

SEQ ID NO: 24377 - protein, 46 aa, Artificial Sequence
  Synthetic polypeptide
SQHFGRLRQADHIRSGVRDQPGQRDPLYPHPEPGRQDAPGQVVHAV

SEQ ID NO: 24378 - protein, 166 aa, Artificial Sequence
  Synthetic polypeptide
GQEFETSLANVIRFILIQNRAGKTRLAKWYMQFDDDEKQKLIEEVHAVVTVRDAKHTNFVEVLAISVADSLSVLQFRNFKIIYRRYAGLYFCICVDVNDNNLAYLEAIHNFVEVLNEYFHNVCELDLVFNFYKVYTVVDEMFLAGEIRETSQTKVLKQLLMLQSLE

SEQ ID NO: 24379 - protein, 152 aa, Artificial Sequence
  Synthetic polypeptide
GQEFETSLANVIRFILIQNRAGKTRLAKWYMQFDDDEKQKLIEEVHAVVTVRDAKHTNFVEFRNFKIIYRRYAGLYFCICVDVNDNNLAYLEAIHNFVEVLNEYFHNVCELDLVFNFYKVYTVVDEMFLAGEIRETSQTKVLKQLLMLQSLE

SEQ ID NO: 24380 - protein, 114 aa, Artificial Sequence
  Synthetic polypeptide
GQEFETSLANVIRFILIQNRAGKTRLAKWYMQFDDDEKQKLIEEVHAVVTVRDAKHTNFVEVLNEYFHNVCELDLVFNFYKVYTVVDEMFLAGEIRETSQTKVLKQLLMLQSLE

SEQ ID NO: 24381 - protein, 17 aa, Artificial Sequence
  Synthetic polypeptide
ELRTEHGRHLPGQREQV

SEQ ID NO: 24382 - protein, 226 aa, Artificial Sequence
  Synthetic polypeptide
NSGLSTEGIYRVSGNKSEMESLQRQFDQDHNLDLAEKDFTVNTVAGAMKSFFSELPDPLVPYNMQIDLVEAHKINDREQKLHALKEVLKKFPKENHEVFKYVISHLNKVSHNNKVNLMTSENLSICFWPTLMRPDFSTMDALTATRTYQTIIELFIQQCPFFFYNRPITEPPGARPSSPSAVASTVPFLTSTPVTSQPSPPQSPPPTPQSPMQPLLPSQLQAEHTL

SEQ ID NO: 24383 - protein, 3 aa, Artificial Sequence
  Synthetic polypeptide
TQD

SEQ ID NO: 24384 - protein, 119 aa, Artificial Sequence
  Synthetic polypeptide
VVGHERAGDLRLVIWVGSSALALAGGAAPGVARAQRPGGSGGRSHPGGPGSPRGGGTVGPGDRGPAAADGGRPQRTVRAAETRGAAAAPPLTLEGPVQSHHGTPALTQGPQSPRDGAQL

SEQ ID NO: 24385 - protein, 105 aa, Artificial Sequence
  Synthetic polypeptide
SGWGPQPSLSLAEQHLESPVPSAPGALAGGPTQAAPGVRGEEEQWAREIGAQLRRMADDLNAQYERRRQEEQQRHRPSPWRVLYNLIMGLLPLPRGHRAPEMEPN

SEQ ID NO: 24386 - protein, 118 aa, Artificial Sequence
  Synthetic polypeptide
GWTREGRRPEACDLGGVLSPRSRWRSSTWSRPCPAPRGLWRAVPPRRPRESAGRRNSGPGRSGPSCGGWRTTSTHSTSGGDKRSSSGTAPHPGGSCTISSWDSCPYPGATEPPRWSPI

SEQ ID NO: 24387 - protein, 152 aa, Artificial Sequence
  Synthetic polypeptide
VVGHERAGDLRLVIWVGSSALALAGGAAPGVARAQRPGGSGGRSHPGGPGSPRGGGTVGPGDRGPAAADGGRPQRTVRAAETRGAAAAPPLTLEGPVQSHHGTPALTQGPQSPRDGAQLGACTRPVDVRDSGGRPLPPPDTLASAGDFLCTM

SEQ ID NO: 24388 - protein, 138 aa, Artificial Sequence
  Synthetic polypeptide
GWTREGRRPEACDLGGVLSPRSRWRSSTWSRPCPAPRGLWRAVPPRRPRESAGRRNSGPGRSGPSCGGWRTTSTHSTSGGDKRSSSGTAPHPGGSCTISSWDSCPYPGATEPPRWSPIRCLHPPGGRQGLGGQAPPTS

SEQ ID NO: 24389 - protein, 10 aa, Artificial Sequence
  Synthetic polypeptide
VAGLLQLYHP

SEQ ID NO: 24390 - protein, 360 aa, Artificial Sequence
  Synthetic polypeptide
EPCSIAGGEWQDSFNYTTPDYGHYDDKDTLDLNTPVDKTSNTLRVPDILALVIFAVVFLVGVLGNALVVWVTAFEAKRTINAIWFLNLAVADFLSCLALPILFTSIVQHHHWPFGGAACSILPSLILLNMYASILLLATISADRFLLVFKPIWCQNFRGAGLAWIACAVAWGLALLLTIPSFLYRVVREEYFPPKVLCGVDYSHDKRRERAVAIVRLVLGFLWPLLTLTICYTFILLRTWSRRATRSTKTLKVVVAVVASFFIFWLPYQVTGIMMSFLEPSSPTFLLLKKLDSLCVSFAYINCCINPIIYVVAGQGFQGRLRKSLPSLLRNVLTEESVVRESKSFTRSTVDTMAQKTQAV

SEQ ID NO: 24391 - protein, 85 aa, Artificial Sequence
  Synthetic polypeptide
PSPGLQTCTSPWPARNHAASQEVSGRTPSIIPPLIMGTMMTRIPWTSTPLWIKLLTRCVFQTSWPWSSLQSSSWWECWAMPWWSG

SEQ ID NO: 24392 - protein, 11 aa, Artificial Sequence
  Synthetic polypeptide
PTRDQGQATTR

SEQ ID NO: 24393 - protein, 198 aa, Artificial Sequence
  Synthetic polypeptide
SQHFGRPKRTDHLRSGVQDQPDQHETKDRPLQDEYSVLVASMLEPAVVYRDLLNRGLEDQLLLPGSDQFDSVLCSLVTDVDLDGRPEVLVATYGQELLCYKYRGPESGLPEAQHGFHLLWQRSFSSPLLAMAHVDLTGDGLQELAVVSLKGVHILQHSLIQASELVLTRLRHQVEQRRRRLQGLEDGAGAGPAENAAS

SEQ ID NO: 24394 - protein, 39 aa, Artificial Sequence
  Synthetic polypeptide
GREFKTSLTNTRPRTGHYKMSTACSWPACWSQQWCIGTC

SEQ ID NO: 24395 - protein, 81 aa, Artificial Sequence
  Synthetic polypeptide
SQHFGRPKRTDHLRSGVQDQPDQHETKDRPLQDEYSVLVASMLEPAVVYRDLLNRGLEDQLLLPGSDQFDSVLCSLVTDVD

SEQ ID NO: 24396 - protein, 44 aa, Artificial Sequence
  Synthetic polypeptide
SQHFGRPKRTDHLRSGVQDQPDQHETKDRPLQDEYSVLVASMLE

SEQ ID NO: 24397 - protein, 31 aa, Artificial Sequence
  Synthetic polypeptide
GREFKTSLTNTRPRTGHYKMSTACSWPACWS

SEQ ID NO: 24398 - protein, 29 aa, Artificial Sequence
  Synthetic polypeptide
CQHFRRLRQVDHKVRSSRPAWPIRSRQRR

SEQ ID NO: 24399 - protein, 175 aa, Artificial Sequence
  Synthetic polypeptide
EAEAGRSQGQEFETSLANKIQTKTVAQCVEYYYIWKKMIKFDCGRAPGLEKRVKREPEEVERTEEKVPCSPRERPSHHPTPKLKTKSYRRESILSSSPNAGSKRTPELLGSAESQGIFPCRECERVFDKIKSRNAHMKRHRLQDHVEPIIRVKWPVKPFQLKEEELGADIGPLQW

SEQ ID NO: 24400 - protein, 66 aa, Artificial Sequence
  Synthetic polypeptide
GQARWLTPVIPALWEAETGGSPELRSSRPAWTTWSPWRLFCSEGPTSHGHTCSLTIATQVQTSGPL

SEQ ID NO: 24401 - protein, 44 aa, Artificial Sequence
  Synthetic polypeptide
SQHFGRPRRVDHLSSGVRDQPGQHGRPGDSSAPRAPQATDTPAR

SEQ ID NO: 24402 - protein, 222 aa, Artificial Sequence
  Synthetic polypeptide
AQEFETSLDNMVALETLLLRGPHKPRTHLLADYRYTGSDVWTPIEKRLFKKAFYAHKKDFYLIHKMIQTKTVAQCVEYYYIWKKMIKFDCGRAPGLEKRVKREPEEVERTEEKVPCSPRERPSHHPTPKLKTKSYRRESILSSSPNAGSKRTPELLGSAESQGIFPCRECERVFDKIKSRNAHMKRHRLQDHVEPIIRVKWPVKPFQLKEEELGADIGPLQW

SEQ ID NO: 24403 - protein, 408 aa, Artificial Sequence
  Synthetic polypeptide
MGWVLHKSKNLVCVFSAVSQAPRTGLGTHETLSYDFPAVLRWFAERVDLIILLFDAHKLEISDEFSEAIGALRGHEDKIRVVLNKADMVETQQLMRVYGALMWALGKVVGTPEVLRVYIGSFWSQPLLVPDNRRLFELEEQDLFRDIQGLPRHAALRKLNDLVKRARLVRVHAYIISYLKKEMPSVFGKENKKKQLILKLPVIFAKIQLEHHISPGDFPDCQKMQELLMAHDFTKFHSLKPKLLEALDEMLTHDIAKLMPLLRQEELESTEVGVQGGAFEGTHMGPFVERGPDEAMEDGEEGSDDEAEWVVTKDKSKYDEIFYNLAPADGKLSGSKAKTWMVGTKLPNSVLGRIWKLSDVDRDGMLDDEEFALASHLIEAKLEGHGLPANLPRRLVPPSKRRHKGSAE

SEQ ID NO: 24404 - protein, 93 aa, Artificial Sequence
  Synthetic polypeptide
WDGCFIRARILSVCSLRYPRLPGQGLAHMRLSATTSRPCCAGSRSAWTSSSCSLMRTSWRSRTSSQRPSARCGAMRTRSAWCSTRPTWWRRSS

SEQ ID NO: 24405 - protein, 24 aa, Artificial Sequence
  Synthetic polypeptide
DSQLRLPGRAALVRGARGPHHPAL

SEQ ID NO: 24406 - protein, 245 aa, Artificial Sequence
  Synthetic polypeptide
AQEFEAAVHAYIISYLKKEMPSVFGKENKKKQLILKLPVIFAKIQLEHHISPGDFPDCQKMQELLMAHDFTKFHSLKPKLLEALDEMLTHDIAKLMPLLRQEELESTEVGVQGGAFEGTHMGPFVERGPDEAMEDGEEGSDDEAEWVVTKDKSKYDEIFYNLAPADGKLSGSKAKTWMVGTKLPNSVLGRIWKLSDVDRDGMLDDEEFALASHLIEAKLEGHGLPANLPRRLVPPSKRRHKGSAE

SEQ ID NO: 24407 - protein, 24 aa, Artificial Sequence
  Synthetic polypeptide
EAEAGGSLEPRNLRLQFTLTSSAT

SEQ ID NO: 24408 - protein, 51 aa, Artificial Sequence
  Synthetic polypeptide
GCSSRLHHQLPEEGDALCVWEGEQEEAADPQTARHLCEDSAGTSHLPWGLS

SEQ ID NO: 24409 - protein, 43 aa, Artificial Sequence
  Synthetic polypeptide
GQVWWLTPIITALLEASSDESLEIRSSRPAWPTCPHRHIPGWL

SEQ ID NO: 24410 - protein, 247 aa, Artificial Sequence
  Synthetic polypeptide
SQHFWRPVRMNHWRSGVRDQPGQHARIATSLDGFDVASVQQQRQEQSYFVRLGSLSERLRQHAYEHSLGKLRATKQRAQEALLQLSQVLSLMETVKQGVDQKLVEGQEKLHQMWLSWNQKQLQGPEKEPPKPEQVESRALTMFRDIAQQLQATCTSLGSSIQGLPTNVKDQVQQARRQVEDLQATFSSIHSFQDLSSSILAQSRERVASAREALDHMVEYVAQNTPVTWLVGPFAPGITEKAPEEKK

SEQ ID NO: 24411 - protein, 78 aa, Artificial Sequence
  Synthetic polypeptide
ITGDQEFETSLANMPASPHPWMALTSRPCSSSGRNRATSYVWAPCRRGCGSTPMSTRWASFEPPSRGHRRLCCSCRRS

SEQ ID NO: 24412 - protein, 205 aa, Artificial Sequence
  Synthetic polypeptide
SQHFWRPVRMNHWRSGVRDQPGQHARIATSLDGFDVASVQQQRQEQSYFMETVKQGVDQKLVEGQEKLHQMWLSWNQKQLQGPEKEPPKPEQVESRALTMFRDIAQQLQATCTSLGSSIQGLPTNVKDQVQQARRQVEDLQATFSSIHSFQDLSSSILAQSRERVASAREALDHMVEYVAQNTPVTWLVGPFAPGITEKAPEEKK

SEQ ID NO: 24413 - protein, 115 aa, Artificial Sequence
  Synthetic polypeptide
ITGDQEFETSLANMPASPHPWMALTSRPCSSSGRNRATSWKLSSKALIRSWWKARRSCTRCGSAGTRSSSRAPRRSRPSQSRSSPGRSPCSGTLPSNCRPPVPPWGPAFRASPPM

SEQ ID NO: 24414 - protein, 246 aa, Artificial Sequence
  Synthetic polypeptide
SQHFWRPVRMNHWRSGVRDQPGQHARIATSLDGFDVASVQQQRQEQSYFVRLGSLSERLRQHAYEHSLGKLRATKQRAQEALLQLSQVLSLMETVKQGVDQKLVEGQEKLHQMWLSWNQKQLQGPEKEPPKPEVESRALTMFRDIAQQLQATCTSLGSSIQGLPTNVKDQVQQARRQVEDLQATFSSIHSFQDLSSSILAQSRERVASAREALDHMVEYVAQNTPVTWLVGPFAPGITEKAPEEKK

SEQ ID NO: 24415 - protein, 60 aa, Artificial Sequence
  Synthetic polypeptide
DQAWWLTPYSQHFGRPKRADHLRSGVRDQPGQHGETLCLLKIQKSARRDGPGGHQGACVV

SEQ ID NO: 24416 - protein, 327 aa, Artificial Sequence
  Synthetic polypeptide
KFKNQPGVMVLADTKELVSSKVSGAQEMVSSAKDTVATQLSEAVDATRGAVQSGVDKTKSVVTGGVQSVMGSRLGQMVLSGVDTVLGKSEEWADNHLPLTDAELARIATSLDGFDVASVQQQRQEQSYFVRLGSLSERLRQHAYEHSLGKLRATKQRAQEALLQLSQVLSLMETVKQGVDQKLVEGQEKLHQMWLSWNQKQLQGPEKEPPKPEQVESRALTMFRDIAQQLQATCTSLGSSIQGLPTNVKDQVQQARRQVEDLQATFSSIHSFQDLSSSILAQSRERVASAREALDHMVEYVAQNTPVTWLVGPFAPGITEKAPEEKK

SEQ ID NO: 24417 - protein, 285 aa, Artificial Sequence
  Synthetic polypeptide
KFKNQPGVMVLADTKELVSSKVSGAQEMVSSAKDTVATQLSEAVDATRGAVQSGVDKTKSVVTGGVQSVMGSRLGQMVLSGVDTVLGKSEEWADNHLPLTDAELARIATSLDGFDVASVQQQRQEQSYFMETVKQGVDQKLVEGQEKLHQMWLSWNQKQLQGPEKEPPKPEQVESRALTMFRDIAQQLQATCTSLGSSIQGLPTNVKDQVQQARRQVEDLQATFSSIHSFQDLSSSILAQSRERVASAREALDHMVEYVAQNTPVTWLVGPFAPGITEKAPEEKK

SEQ ID NO: 24418 - protein, 326 aa, Artificial Sequence
  Synthetic polypeptide
KFKNQPGVMVLADTKELVSSKVSGAQEMVSSAKDTVATQLSEAVDATRGAVQSGVDKTKSVVTGGVQSVMGSRLGQMVLSGVDTVLGKSEEWADNHLPLTDAELARIATSLDGFDVASVQQQRQEQSYFVRLGSLSERLRQHAYEHSLGKLRATKQRAQEALLQLSQVLSLMETVKQGVDQKLVEGQEKLHQMWLSWNQKQLQGPEKEPPKPEVESRALTMFRDIAQQLQATCTSLGSSIQGLPTNVKDQVQQARRQVEDLQATFSSIHSFQDLSSSILAQSRERVASAREALDHMVEYVAQNTPVTWLVGPFAPGITEKAPEEKK

SEQ ID NO: 24419 - protein, 96 aa, Artificial Sequence
  Synthetic polypeptide
KFKNQPGVMVLADTKELVSSKVSGAQEMVSSAKDTVATQLSEAVDATRGAVQSGVDKTKSVVTGGVQSVMGSRLGQMVLSGVDTVLGKSEEWADNH

SEQ ID NO: 24420 - protein, 40 aa, Artificial Sequence
  Synthetic polypeptide
KFKNQPGVMVLADTKELVSSKVSGAQEMVSSAKDTVATQL

SEQ ID NO: 24421 - protein, 298 aa, Artificial Sequence
  Synthetic polypeptide
EYRLPWKECCSDQLRNLTLKGLWRRAVANAKSIGHLIFARLLRLQESSQGEHPPPEDEGGEPEHTWLTEMLENWTRTSLEKQEQPHEDPERKGSLSNLMDFVKKTGICASKWEWGTTHNFLYKHGGIRDKIMSSRKHLHLVDAGLAINTPFPLVLPPTREVHLILSFDFSAGDPFETIRATTDYCRRHKIPFPQVEEAELDLWSKAPASCYILKGETGPVVMHFPLFNIDACGGDIEAWSDTYDTFKLADTYTLDVVVLLLALAKKNVRENKKKILRELMNVAGLYYPKDSARSCCLA

SEQ ID NO: 24422 - protein, 17 aa, Artificial Sequence
  Synthetic polypeptide
RVDESTDSLGRNVALTS

SEQ ID NO: 24423 - protein, 284 aa, Artificial Sequence
  Synthetic polypeptide
EYRLPWKECCSDQLRNLTLKGLWRRAVANAKSIGHLIFARLLRLQESSQGEHPPPEDEGGEPEHTWLTEMLENWTRTSLEKQEQPHEDPERKGSLSNLMDFVKKTGICASKWEWGTTHNFLYKHGGIRDKIMSSRKHLHLVDAGLAINTPFPLVLPPTREVHLILSFDFSAGDPFETIRATTDYCRRHKIPFPQVEEAELDLWSKAPASCYILKGETGPVVMHFPLFNIDACGGDIEAWSDTYDTFKLADTYTLDVVVLLLALAKKNVRENKKKILRELMNVAG

SEQ ID NO: 24424 - protein, 134 aa, Artificial Sequence
  Synthetic polypeptide
EYRLPWKECCSDQLRNLTLKGLWRRAVANAKSIGHLIFARLLRLQESSQGEHPPPEDEGGEPEHTWLTEMLENWTRTSLEKQEQPHEDPERKGSLSNLMDFVKKTGICASKWEWGTTHNFLYKHGGIRDKIMSS

SEQ ID NO: 24425 - protein, 34 aa, Artificial Sequence
  Synthetic polypeptide
AVIALLHSSWATEDSPETNVGPSHPGHQRGPETL

SEQ ID NO: 24426 - protein, 417 aa, Artificial Sequence
  Synthetic polypeptide
SQLLGRLRWEDRLSPGVQGCSEPSSRYCTPAGRQRIPLKPMLAHPTRGISEVLKRFEEAAFTCEYKYDGQRAQIHALEGGEVKIFSRNQEDNTGKYPDIISRIPKIKLPSVTSFILDTEAVAWDREKKQIQPFQVLTTRKRKEVDASEIQVQVCLYAFDLIYLNGESLVREPLSRRRQLLRENFVETEGEFVFATSLDTKDIEQIAEFLEQSVKDSCEGLMVKTLDVDATYEIAKRSHNWLKLKKDYLDGVGDTLDLVVIGAYLGRGKRAGRYGGFLLASYDEDSEELQAICKLGTGFSDEELEEHHQSLKALVLPSPRPYVRIDGAVIPDHWLDPSAVWEVKCADLSLSPIYPAARGLVDSDKGISLRFPRFIRVREDKQPEQATTSAQVACLYRKQSQIQNQQGEDSGSDPEDTY

SEQ ID NO: 24427 - protein, 24 aa, Artificial Sequence
  Synthetic polypeptide
AQEFKAAVSRHRATALQLGDRGFP

SEQ ID NO: 24428 - protein, 299 aa, Artificial Sequence
  Synthetic polypeptide
SQLLGRLRWEDRLSPGVQGCSEPSSRYCTPAGRQRIPLKPMLAHPTRGISEVLKRFEEAAFTCEYKYDGQRAQIHALEGGEVKIFSRNQEDNTGKYPDIISRIPKIKLPSVTSFILDTEAVAWDREKKQIQPFQVLTTRKRKEVDASEIQVQVCLYAFDLIYLNGESLVREPLSRRRQLLRENFVETEGEFVFATSLDTKDIEQIAEFLEQSVKDSCEGLMVKTLDVDATYEIAKRSHNWLKLKKDYLDGVGDTLDLVVIGAYLGRGKRAGRYGGFLLASYDEDSEELQAICKVLGNWG

SEQ ID NO: 24429 - protein, 56 aa, Artificial Sequence
  Synthetic polypeptide
SQLLGRLRWEDRLSPGVQGCSEPSSRYCTPAGRQRIPLKPMLAHPTRGISEVLKRF

SEQ ID NO: 24430 - protein, 19 aa, Artificial Sequence
  Synthetic polypeptide
WDCSRSSLSNTGYCGNANL

SEQ ID NO: 24431 - protein, 26 aa, Artificial Sequence
  Synthetic polypeptide
GTALDLHYPIRVTVATPTFESPSCAL

SEQ ID NO: 24432 - protein, 21 aa, Artificial Sequence
  Synthetic polypeptide
IFTIQYGLLWQRQPLNPPPAR

SEQ ID NO: 24433 - protein, 9 aa, Artificial Sequence
  Synthetic polypeptide
FYIMWISSL

SEQ ID NO: 24434 - protein, 42 aa, Artificial Sequence
  Synthetic polypeptide
LQENKLRAPTDSTLCGSPACSCISPSSFLRSEDVAWMLPNLA

SEQ ID NO: 24435 - protein, 70 aa, Artificial Sequence
  Synthetic polypeptide
SVTVSHHPEMGPPSCRKTSSGLPLILHYVDLQLVAASAPPPFSGVRMWPGCCPILPRTGCTCLCLNPWLP

SEQ ID NO: 24436 - protein, 45 aa, Artificial Sequence
  Synthetic polypeptide
LQENKLRAPTDSTLCGSPACSCISPSSFLRVTVATPTFESPSCAL

SEQ ID NO: 24437 - protein, 58 aa, Artificial Sequence
  Synthetic polypeptide
SVTVSHHPEMGPPSCRKTSSGLPLILHYVDLQLVAASAPPPFSGLLWQRQPLNPPPAR

SEQ ID NO: 24438 - protein, 53 aa, Artificial Sequence
  Synthetic polypeptide
LQENKLRAPTDSTLCGSPACSCISPSSFLRCSLCEGEPPATPSQDGGPERGAR

SEQ ID NO: 24439 - protein, 131 aa, Artificial Sequence
  Synthetic polypeptide
SVTVSHHPEMGPPSCRKTSSGLPLILHYVDLQLVAASAPPPFSGAAFVKENHRQLQARMGDLKGVLDDLQDNEVLTENEKELVEQEKTRQSKNEALLSMVEKKGDLALDVLFRSISERDPYLVSYLRQQNL

SEQ ID NO: 24440 - protein, 20 aa, Artificial Sequence
  Synthetic polypeptide
LQENKLRAPTDSTLCGSPAC

SEQ ID NO: 24441 - protein, 34 aa, Artificial Sequence
  Synthetic polypeptide
SVTVSHHPEMGPPSCRKTSSGLPLILHYVDLQLV

SEQ ID NO: 24442 - protein, 62 aa, Artificial Sequence
  Synthetic polypeptide
GRVQWLIPVIPAFRRPRQEDRSSPGVPDSSRRHRETPSLQKIQKLVGYGGAGLQSQLLGRLR

SEQ ID NO: 24443 - protein, 302 aa, Artificial Sequence
  Synthetic polypeptide
ATQGDPVSTENTKISWIWWCGPAVPATREAEVTVNLDQYVYIHFWALGQRVGQMPLKSSVGSRRGFFTKLPPAERRYFKRVVLAARTKRGHLVLKSFKDTPLEGLEQLLPELKVRTPTLQRALLNLMLVVSGVAIFVNVGMVVLTDLKVATSLLLLLFAIFMGLRASKMFGQRRSAQALELAHMLYYRSTSNNSELLSALALRAQDEHTKEALLAHSFLARRPGGTQGSPEETSRWLRSEVENWLLAKSGCEVTFNGTRALAHLQALTPSMGLYPPPGFPKLDPVAPITSEPPQATPSSNIS

SEQ ID NO: 24444 - protein, 78 aa, Artificial Sequence
  Synthetic polypeptide
ATQGDPVSTENTKISWIWWCGPAVPATREAEVTVNLDQYVYIHFWALGQRVGQMPLKSSVGSRRGFFTKLPPAERRYF

SEQ ID NO: 24445 - protein, 1204 aa, Artificial Sequence
  Synthetic polypeptide
GWAQWLMPGIPPLWEAKAGGSLEEKGSTFLQLGSSTEQQLQVIFEVLEEYDWTSFVAVTTRAPGHRAFLSYIEVLTDGSLVGWEHRGALTLDPGAGEAVLSAQLRSVSAQIRLLFCAREEAEPVFRAAEEAGLTGSGYVWFMVGPQLAGGGGSGAPGEPPLLPGGAPLPAGLFAVRSAGWRDDLARRVAAGVAVVARGAQALLRDYGFLPELGHDCRAQNRTHRGESLHRYFMNITWDNRDYSFNEDGFLVNPSLVVISLTRDRTWEVVGSWEQQTLRLKYPLWSRYGRFLQPVDDTQHLTVATLEERPFVIVEPADPISGTCIRDSVPCRSQLNRTHSPPPDAPRPEKRCCKGFCIDILKRLAHTIGFSYDLYLVTNGKHGKKIDGVWNGMIGEVFYQRADMAIGSLTINEERSEIVDFSVPFVETGISVMVARSNGTVSPSAFLEPYSPAVWVMMFVMCLTVVAVTVFIFEYLSPVGYNRSLATGKRPGGSTFTIGKSIWLLWALVFNNSVPVENPRGTTSKIMVLVWAFFAVIFLASYTANLAAFMIQEEYVDTVSGLSDRKFQRPQEQYPPLKFGTVPNGSTEKNIRSNYPDMHSYMVRYNQPRVEEALTQLKAGKLDAFIYDAAVLNYMARKDEGCKLVTIGSGKVFATTGYGIALHKGSRWKRPIDLALLQFLGDDEIEMLERLWLSGICHNDKIEVMSSKLDIDNMAGVFYMLLVAMGLSLLVFAWEHLVYWRLRHCLGPTHRMDFLLAFSRGMYSCCSAEAAPPPAKPPPPPQPLPSPAYPAPRPAPGPAPFVPRERASVDRWRRTKGAGPPGGAGLADGFHRYYGPIEPQGLGLGLGEARAAPRGAAGRPLSPPAAQPPQKPPPSYFAIVRDKEPAEPPAGAFPGFPSPPAPPAAAATAVGPPLCRLAFEDESPPAPARWPRSDPESQPLLGPGAGGAGGTGGAGGGAPAAPPPCRAAPPPCPYLDLEPSPSDSEDSESLGGASLGGLEPWWFADFPYPYAERLGPPPGRYWSVDKLGGWRAGSWDYLPPRSGPAAWHCRHCASLELLPPPRHLSCSHDGLDGGWWAPPPPPWAAGPLPRRRARCGCPRSHPHRPRASHRTPAAAAPHHHRHRRAAGGWDLPPPAPTSRSLEDLSSCPRAAPARRLTGPSRHARRCPHAAHWGPPLPTASHRRHRGGDLGTRRGSAHFSSLESEV

SEQ ID NO: 24446 - protein, 55 aa, Artificial Sequence
  Synthetic polypeptide
AGRSGSCLESHHFGRPRRVDHLRRRAPPSCSWALPPSNSFRSSLRCWRSMTGRPL

SEQ ID NO: 24447 - protein, 192 aa, Artificial Sequence
  Synthetic polypeptide
GFGDQAVDIRHNKDRKVRRKEPKSQDIYLRLLVKLYRFLARRTNSTFNQVVLKRLFMSRTNRPPLSLSRMIRKMKLPGRENKTAVVVGTITDDVRVQEVPKLKVCALRVTSRARSRILRAGGKILTFDQLALDSPKGCGTVLLSGPRKGREVYRHFGKAPGTPHSHTKPYVRSKGRKFERARGRRASRGYKN

SEQ ID NO: 24448 - protein, 28 aa, Artificial Sequence
  Synthetic polypeptide
DLGTRQWTSAITRTERFGARSPRARIST

SEQ ID NO: 24449 - protein, 10 aa, Artificial Sequence
  Synthetic polypeptide
IWGPGSGHPP

SEQ ID NO: 24450 - protein, 142 aa, Artificial Sequence
  Synthetic polypeptide
GFGDQAVDIRHNKDRKVRRKEPKSQDIYLRLLVKLYRFLARRTNSTFNQVVLKRLFMSRTNRPPLSLSRMIRKMKLPGRENKTAVVVGTITDDVRVQEVPKLKTLRPLQGPEVRACQRPTGQPRLQKLTLDPTLLLKRFLLT

SEQ ID NO: 24451 - protein, 137 aa, Artificial Sequence
  Synthetic polypeptide
GFGDQAVDIRHNKDRKVRRKEPKSQDIYLRLLVKLYRFLARRTNSTFNQVVLKRLFMSRTNRPPLSLSRMIRKMKLPGRENKTAVVVGTITDDVRVQEVPKLKAPGTPHSHTKPYVRSKGRKFERARGRRASRGYKN

SEQ ID NO: 24452 - protein, 88 aa, Artificial Sequence
  Synthetic polypeptide
GFGDQAVDIRHNKDRKVRRKEPKSQDIYLRLLVKVSGQKNQLHIQPGCVEEVVYESHQPAASVPFPDDPEDEASWPGKQDGRGCGDHN

SEQ ID NO: 24453 - protein, 168 aa, Artificial Sequence
  Synthetic polypeptide
GFGDQAVDIRHNKDRKVRRKEPKSQDIYLRLLVKLYRFLARRTNSTFNQVVLKRLFMSRTNRPPLSLSRMIRKMKLPGRENKTAVVVGTITDDVRVQEVPKLKVCALRVTSRARSRILRAGGKILTFDQLALDSPKGCGTVLLSGPRKGREVYRHFGKAPGTPHSHTK

SEQ ID NO: 24454 - protein, 188 aa, Artificial Sequence
  Synthetic polypeptide
GRRIAGTQEVEVENPLFVEAEEKVSYNCCRQGTVCLQIQMERNTFTPGEKVVFTTEINNQTSKCIKTVVFALYAHIQYEGFTPSAERRSRLDSSELLRQEANTPVTRFNTTKVVSTFNLPLLLSVSSSTQDGEIMHTRYELVTTVHLPWSLTSLKAKVPIIITSASVDSAICQLSEDGVLPVNPDHQN

SEQ ID NO: 24455 - protein, 128 aa, Artificial Sequence
  Synthetic polypeptide
PTWRNPISTKNTKKISCAWWRTPVIPATREAEAEESLEPRRWRLRTPCSWRLRRKSPTTAAARALSVCKSRWKGTPSRQERRSSSQQRSTTRPANASRRSYSPCMPTYSTRASRPVQSGGLGWTAASF

SEQ ID NO: 24456 - protein, 99 aa, Artificial Sequence
  Synthetic polypeptide
FRAPIPGPGWMQPAPATSTPDAAGSTLSCSDCRAAGVGVFVSGAATTQLGGTATTANLGSGGTLASLSSAAGPAEPASATLLGQQEEPATRPVGSAPAS

SEQ ID NO: 24457 - protein, 26 aa, Artificial Sequence
  Synthetic polypeptide
SEHPSQGLAGCSLLLQPARPTLPVQL

SEQ ID NO: 24458 - protein, 290 aa, Artificial Sequence
  Synthetic polypeptide
PSTHPRAWLDAACSCNQHARRCRFNSELFRLSGGRSGGVCERCRHHTAGRHCHYCQPGFWRDPSQPIFSRRACRACQCHPIGATGGTCNQTSGQCTCKLGVTGLTCNRCGPGYQQSRSPRMPCQRIPEATTTLATTPGAYSSDPQCQNYCNMSDTRVHMSLRRYCQQDHVLRAQVLASEAAGPAWQRLAVRVLAVYKQRAQPVRRGDQDAWVPRADLTCGCLRLQPGTDYLLLGSAVGDPDPTRLILDRHGLALPWRPRWARPLKRLQQEERAGGCRGVRAPTPSPRPEH

SEQ ID NO: 24459 - protein, 39 aa, Artificial Sequence
  Synthetic polypeptide
TQEFTISLGNIVRPHLHKKLKNQPGMVAHACRRCISGAG

SEQ ID NO: 24460 - protein, 75 aa, Artificial Sequence
  Synthetic polypeptide
KISLAWWPTPVGGVFRALADRGRPSGGAPGRGCLSLGPGALEGRALGYLQHRSAVVRPRGQRRCPLWLSDHLVPG

SEQ ID NO: 24461 - protein, 638 aa, Artificial Sequence
  Synthetic polypeptide
EVYFGRWLIEGGPLVVLLDVGASAWALERWKGELWDTCNIGVPWYDREANDAVLFGFLTTWFLGEFLAQSEEKPHVVAHFHEWLAGVGLCLCRARRLPVATIFTTHATLLGRYLCAGAVDFYNNLENFNVDKEAGERQIYHRYCMERAAAHCAHVFTTVSQITAIEAQHLLKRKPDIVTPNGLNVKKFSAMHEFQNLHAQSKARIQEFVRGHFYGHLDFNLDKTLYFFIAGRYEFSNKGADVFLEALARLNYLLRVNGSEQTVVAFFIMPARTNNFNVETLKGQAVRKQLWDTANTVKEKFGRKLYESLLVGSLPDMNKMLDKEDFTMMKRAIFATQRQSFPPVCTHNMLDDSSDPILTTIRRIGLFNSSADRVKVIFHPEFLSSTSPLLPVDYEEFVRGCHLGVFPSYYEPWGYTPAECTVMGIPSISTNLSGFGCFMEEHIADPSAYGIYILDRRFRSLDDSCSQLTSFLYSFCQQSRRQRIIQRNRTERLSDLLDWKYLGRYYMSARHMALSKAFPEHFTYEPNEADAAQGYRYPRPASVPPSPSLSRHSSPHQSEDEEDPRNGPLEEDGERYDEDEEAAKDRRNIRAPEWPRRASCTSSTSGSKRNSVDTATSSSLSTPSEPLSPTSSLGEERN

SEQ ID NO: 24462 - protein, 216 aa, Artificial Sequence
  Synthetic polypeptide
EVYFGRWLIEGGPLVVLLDVGASAWALERWKGELWDTCNIGVPWYDREANDAVLFGFLTTWFLGEFLAQSEEKPHVVAHFHEWLAGVGLCLCRARRLPVATIFTTHATLLGRYLCAGAVDFYNNLENFNVDKEAGERQIYHRYCMERAAAHCAHVFTTVSQITAIEAQHLLKRKPGIWTSTWTRPYTSLSPAAMSSPTRVLTSSWRHWLGSTICSE

SEQ ID NO: 24463 - protein, 61 aa, Artificial Sequence
  Synthetic polypeptide
ARHCGSRCNPSTLGGRGRRIMRSGVRDQPGQRGEILSLLKGTLTMIPMLRGMPSRLSSWRE

SEQ ID NO: 24464 - protein, 84 aa, Artificial Sequence
  Synthetic polypeptide
NPVSTKRDPHNDPNAQGDAFKTLFVARVNYDTTESKLRREFEVYGPIKRIHMVYSKRSGKPRGYAFIEYEHERDMHSTTQLACS

SEQ ID NO: 24465 - protein, 78 aa, Artificial Sequence
  Synthetic polypeptide
NPVSTKRDPHNDPNAQGDAFKTLFVARVNYDTTESKLRREFEVYGPIKRIHMVYSKRSGKPRGYAFIEYEHERDMHST

SEQ ID NO: 24466 - protein, 355 aa, Artificial Sequence
  Synthetic polypeptide
NPVSTKRDPHNDPNAQGDAFKTLFVARVNYDTTESKLRREFEVYGPIKRIHMVYSKRSGKPRGYAFIEYEHERDMHSAYKHADGKKIDGRRVLVDVERGRTVKGWRPRRLGGGLGGTRRGGADVNIRHSGRDDTSRYDERPGPSPLPHRDRDRDRERERRERSRERDKERERRRSRSRDRRRRSRSRDKEERRRSRERSKDKDRDRKRRSSRSRERARRERERKEELRGGGGDMAEPSEAGDAPPDDGPPGELGPDGPDGPEEKGRDRDRERRRSHRSERERRRDRDRDRDRDREHKRGERGSERGRDEARGGGGGQDNGLEGLGNDSRDMYMESEGGDGYLAPENGYLMEAAPE

SEQ ID NO: 24467 - protein, 346 aa, Artificial Sequence
  Synthetic polypeptide
NPVSTKRDPHNDPNAQGDAFKTLFVARVNYDTTESKLRREFEVYGPIKRIHMVYSKRSGKPRGYAFIEYEHERDMHSAYKHADGKKIDGRRVLVDVERGRTVKGWRPRRLGGGLGGTRRGGADVNIRHSGRDDTSRYDERDRDRDRERERRERSRERDKERERRRSRSRDRRRRSRSRDKEERRRSRERSKDKDRDRKRRSSRSRERARRERERKEELRGGGGDMAEPSEAGDAPPDDGPPGELGPDGPDGPEEKGRDRDRERRRSHRSERERRRDRDRDRDRDREHKRGERGSERGRDEARGGGGGQDNGLEGLGNDSRDMYMESEGGDGYLAPENGYLMEAAPE

SEQ ID NO: 24468 - protein, 51 aa, Artificial Sequence
  Synthetic polypeptide
ARHCGSRCNPSTLGGRGRRIMRSGVRDQPGQRGEILSLLKGTLTMIPMLRG

SEQ ID NO: 24469 - protein, 17 aa, Artificial Sequence
  Synthetic polypeptide
NPVSTKRDPHNDPNAQG

SEQ ID NO: 24470 - protein, 84 aa, Artificial Sequence
  Synthetic polypeptide
AEIMPLHSSLGNRVRLHLKKKKKSVEGEQHEKAVELLKAAQGSVKLVVRYTPRVLEEMEARFEKMRSARRRQQHQSYSSLESRG

SEQ ID NO: 24471 - protein, 22 aa, Artificial Sequence
  Synthetic polypeptide
DFISKKKKKALRVSSMRRRWSC

SEQ ID NO: 24472 - protein, 33 aa, Artificial Sequence
  Synthetic polypeptide
TQEAEVAVSRDHAIALQPGQQSETSSQKKKKKR

SEQ ID NO: 24473 - protein, 509 aa, Artificial Sequence
  Synthetic polypeptide
TQEAEFANHVPKEEAGAPRGEGPAIPGDTPPPTPRSARLERMTQALALQAGSLEDGGPPRGSEGTPDSLHKAPKKKSIKSSIGRLFGKKEKGRMGPPGRDSSSLAGTPSDETLATDPLGLAKLTGPGDKDRRNKRKHELLEEACRQGLPFAAWDGPTVVSWLELWVGMPAWYVAACRANVKSGAIMANLSDTEIQREIGISNPLHRLKLRLAIQEMVSLTSPSAPASSRTSTGNVWMTHEEMESLTATTKPETKEISWEQILAYGDMNHEWVGNDWLPSLGLPQYRSYFMESLVDARMLDHLNKKELRGQLKMVDSFHRVSLHYGIMCLKRLNYDRKDLERRREESQTQIRDVMVWSNERVMGWVSGLGLKEFATNLTESGVHGALLALDETFDYSDLALLLQIPTQNAQARQLLEKEFSNLISLGTDRRLDEDSAKSFSRSPSWRKMFREKDLRGVTPDSAEMLPPNFRSAAAGALGSPGLPLRKLQPEGQTSGSSRADGVSVRTYSC

SEQ ID NO: 24474 - protein, 100 aa, Artificial Sequence
  Synthetic polypeptide
SQHFGRPRWADHLRSGVRDPPGQHGETPTSTKNTKISLAWWHVPVIPVTREADAGESIEPKRQSLQIMSLRRKLELHEGRGRPSQETPHHPLPALPVLRE

SEQ ID NO: 24475 - protein, 24 aa, Artificial Sequence
  Synthetic polypeptide
FQLLGRLMQENQLNPRGRVCKSCP

SEQ ID NO: 24476 - protein, 42 aa, Artificial Sequence
  Synthetic polypeptide
TQEAEFANHVPKEEAGAPRGEGPAIPGDTPPPTPRSARLERM

SEQ ID NO: 24477 - protein, 500 aa, Artificial Sequence
  Synthetic polypeptide
TQEAEFANHVPKEEAGAPRGEGPAIPGDTPPPTPRSARLERMTQALALQAGSLEDGGPPRGSEGTPDSLHKAPKKKSIKSSIGRLFGKKEKGRMGPPGRDSSSLAGTPSDETLATDPLGLAKLTGPGDKDRRNKRKHELLEEACRQGLPFAAWDGPTVVSWLELWVGMPAWYVAACRANVKSGAIMANLSDTEIQREIGISNPLHRLKLRLAIQEMVSLTSPSAPASSRTSTGNVWMTHEEMESLTATTKPILAYGDMNHEWVGNDWLPSLGLPQYRSYFMESLVDARMLDHLNKKELRGQLKMVDSFHRVSLHYGIMCLKRLNYDRKDLERRREESQTQIRDVMVWSNERVMGWVSGLGLKEFATNLTESGVHGALLALDETFDYSDLALLLQIPTQNAQARQLLEKEFSNLISLGTDRRLDEDSAKSFSRSPSWRKMFREKDLRGVTPDSAEMLPPNFRSAAAGALGSPGLPLRKLQPEGQTSGSSRADGVSVRTYSC

SEQ ID NO: 24478 - protein, 87 aa, Artificial Sequence
  Synthetic polypeptide
NFLPATSTRLGLRASADLVQSPGHLRNLHHGHRPPGLCGGPQGAPLPPGPVFWDAAAPVCHTDHPGNPHLHSAGPERHTDLDQGRQA

SEQ ID NO: 24479 - protein, 126 aa, Artificial Sequence
  Synthetic polypeptide
RDPYKRRAEISCQQPAPGLAFVPLQIWSKVLAISGIFTMGIALLGCVGALKELRCLLGLYFGMLLLLFATQITLGILISTQRAQKDTPTWTKGDRHKQLQRETHGKKREQEKEIDALKEETETYEP

SEQ ID NO: 24480 - protein, 145 aa, Artificial Sequence
  Synthetic polypeptide
KALLFLTCPFPSTDFCKGSQSPYGEDTQAICEEIHIREELKFPASNQHQAWPSCLCRSGPKSWPSQESSPWASPSWVVWGPSRSSAASWACILGCCCSCLPHRSPWESSSPLSGPRKTHRPGPRETGINSSKGKHTGKRENKRKK

SEQ ID NO: 24481 - protein, 84 aa, Artificial Sequence
  Synthetic polypeptide
NFLPATSTRLGLRASADLVQSPGHLRNLHHGHRPPGLCGGPQGAPLPPGPVFWDAAAPVCHTDHPGNPHLHSAGPAGAKLAGRR

SEQ ID NO: 24482 - protein, 93 aa, Artificial Sequence
  Synthetic polypeptide
RDPYKRRAEISCQQPAPGLAFVPLQIWSKVLAISGIFTMGIALLGCVGALKELRCLLGLYFGMLLLLFATQITLGILISTQRAQLERSLRDVV

SEQ ID NO: 24483 - protein, 124 aa, Artificial Sequence
  Synthetic polypeptide
KALLFLTCPFPSTDFCKGSQSPYGEDTQAICEEIHIREELKFPASNQHQAWPSCLCRSGPKSWPSQESSPWASPSWVVWGPSRSSAASWACILGCCCSCLPHRSPWESSSPLSGPSWSEACGTS

SEQ ID NO: 24484 - protein, 130 aa, Artificial Sequence
  Synthetic polypeptide
NFLPATSTRLGLRASADLVQSPGHLRNLHHGHRPPGLCGGPQGAPLPPGPVFWDAAAPVCHTDHPGNPHLHSAGPAGAKLAGRRRENHPKVRHQPRGDRGRGELGLCAVPAALLRLALPAGLVPSPHPER

SEQ ID NO: 24485 - protein, 251 aa, Artificial Sequence
  Synthetic polypeptide
RDPYKRRAEISCQQPAPGLAFVPLQIWSKVLAISGIFTMGIALLGCVGALKELRCLLGLYFGMLLLLFATQITLGILISTQRAQLERSLRDVVEKTIQKYGTNPEETAAEESWDYVQFQLRCCGWHYPQDWFQVLILRGNGSEAHRVPCSCYNLSATNDSTILDKVILPQLSRLGHLARSRHSADICAVPAESHIYREGCAQGLQKWLHNNLISIVGICLGVGLLELGFMTLSIFLCRNLDHVYNRLARYR

SEQ ID NO: 24486 - protein, 240 aa, Artificial Sequence
  Synthetic polypeptide
RDPYKRRAEISCQQPAPGLAFVPLQIWSKVLAISGIFTMGIALLGCVGALKELRCLLGLYFGMLLLLFATQITLGILISTQRAQLERSLRDVVEKTIQKYGTNPEETAAEESWDYVQFQLRCCGWHYPQDWFQVLILRGNGSEAHRVPCSCYNLSATNDSTILDKVILPQLSRLGHLARSRHSADICAVPAESHIYREGCAQGLQKWLHNNLISIVGICLGVGLLEVIWPRPHPRSALNP

SEQ ID NO: 24487 - protein, 74 aa, Artificial Sequence
  Synthetic polypeptide
NFLPATSTRLGLRASADLVQSPGHLRNLHHGHRPPGLCGGPQGAPLPPGPVFWDAAAPVCHTDHPGNPHLHSAG

SEQ ID NO: 24488 - protein, 82 aa, Artificial Sequence
  Synthetic polypeptide
RDPYKRRAEISCQQPAPGLAFVPLQIWSKVLAISGIFTMGIALLGCVGALKELRCLLGLYFGMLLLLFATQITLGILISTQR

SEQ ID NO: 24489 - protein, 114 aa, Artificial Sequence
  Synthetic polypeptide
KALLFLTCPFPSTDFCKGSQSPYGEDTQAICEEIHIREELKFPASNQHQAWPSCLCRSGPKSWPSQESSPWASPSWVVWGPSRSSAASWACILGCCCSCLPHRSPWESSSPLSG

SEQ ID NO: 24490 - protein, 9 aa, Artificial Sequence
  Synthetic polypeptide
FRTFGIQNC

SEQ ID NO: 24491 - protein, 275 aa, Artificial Sequence
  Synthetic polypeptide
HLNFGLLASRTASEGPKFAFLSFVEAMSFLPPSVFWSFIFFLMLLAMGLSSAIGIMQGIITPLQDTFSFFRKHTKLLIVGVFLLMFVCGLFFTRPSGSYFIRLLSDYWIVFPIIVVVVFETMAVSWAYGARRFLADLTILLGHPISPIFGWLWPHLCPVVLLIIFVTMMVHLCMKPITYMSWDSSTSKEVLRPYPPWALLLMITLFAIVILPIPAYFVYCRIHRIPFRPKSGDGPMTASTSLPLSHQLTPSKEVQKEEILQVDETKYPSTCNVTS

SEQ ID NO: 24492 - protein, 47 aa, Artificial Sequence
  Synthetic polypeptide
RKWRADTLISDFWHPELLARAQSLHSCPLLKPCPSFLRLSSGLLSSS

SEQ ID NO: 24493 - protein, 198 aa, Artificial Sequence
  Synthetic polypeptide
HLNFGLLASRTASEGPKFAFLSFVEAMSFLPPSVFWSFIFFLMLLAMGLSSAIGIMQGIITPLQDTFSFFRKHTKLLIVGVFLLMFVCGLFFTRPSGSYFIRLLSDYWIVFPIIVVVVFETMAVSWAYGARRFLADLTILLGHPISPIFGWLWPHLCPVVLLIIFVTMMVHLCMKPITYMSWDSSTVSLPQDPEPLWE

SEQ ID NO: 24494 - protein, 157 aa, Artificial Sequence
  Synthetic polypeptide
HLNFGLLASRTASEGPKFAFLSFVEAMSFLPPSVFWSFIFFLMLLAMGLSSAIGIMQGIITPLQDTFSFFRKHTKLLIVGVFLLMFVCGLFFTRPSGSYFIRLLSDYWIVFPIIVVVVFETMAVSWAYGARRFLADLTILLGHPISPIFGWLWPHLC

SEQ ID NO: 24495 - protein, 13 aa, Artificial Sequence
  Synthetic polypeptide
HLNFGLLASRTEC

SEQ ID NO: 24496 - protein, 343 aa, Artificial Sequence
  Synthetic polypeptide
RKWRADTLISDFWHPELNAEILLKLINLGKLPPDAKPPVNLLYNPTSIYNAWLSGLPQHIKSMVLREVTECNIETQFLKASEGPKFAFLSFVEAMSFLPPSVFWSFIFFLMLLAMGLSSAIGIMQGIITPLQDTFSFFRKHTKLLIVGVFLLMFVCGLFFTRPSGSYFIRLLSDYWIVFPIIVVVVFETMAVSWAYGARRFLADLTILLGHPISPIFGWLWPHLCPVVLLIIFVTMMVHLCMKPITYMSWDSSTSKEVLRPYPPWALLLMITLFAIVILPIPAYFVYCRIHRIPFRPKSGDGPMTASTSLPLSHQLTPSKEVQKEEILQVDETKYPSTCNVTS

SEQ ID NO: 24497 - protein, 266 aa, Artificial Sequence
  Synthetic polypeptide
RKWRADTLISDFWHPELNAEILLKLINLGKLPPDAKPPVNLLYNPTSIYNAWLSGLPQHIKSMVLREVTECNIETQFLKASEGPKFAFLSFVEAMSFLPPSVFWSFIFFLMLLAMGLSSAIGIMQGIITPLQDTFSFFRKHTKLLIVGVFLLMFVCGLFFTRPSGSYFIRLLSDYWIVFPIIVVVVFETMAVSWAYGARRFLADLTILLGHPISPIFGWLWPHLCPVVLLIIFVTMMVHLCMKPITYMSWDSSTVSLPQDPEPLWE

SEQ ID NO: 24498 - protein, 330 aa, Artificial Sequence
  Synthetic polypeptide
MDFMNAEILLKLINLGKLPPDAKPPVNLLYNPTSIYNAWLSGLPQHIKSMVLREVTECNIETQFLKASEGPKFAFLSFVEAMSFLPPSVFWSFIFFLMLLAMGLSSAIGIMQGIITPLQDTFSFFRKHTKLLIVGVFLLMFVCGLFFTRPSGSYFIRLLSDYWIVFPIIVVVVFETMAVSWAYGARRFLADLTILLGHPISPIFGWLWPHLCPVVLLIIFVTMMVHLCMKPITYMSWDSSTSKEVLRPYPPWALLLMITLFAIVILPIPAYFVYCRIHRIPFRPKSGDGPMTASTSLPLSHQLTPSKEVQKEEILQVDETKYPSTCNVTS

SEQ ID NO: 24499 - protein, 5 aa, Artificial Sequence
  Synthetic polypeptide
GLYEC

SEQ ID NO: 24500 - protein, 253 aa, Artificial Sequence
  Synthetic polypeptide
MDFMNAEILLKLINLGKLPPDAKPPVNLLYNPTSIYNAWLSGLPQHIKSMVLREVTECNIETQFLKASEGPKFAFLSFVEAMSFLPPSVFWSFIFFLMLLAMGLSSAIGIMQGIITPLQDTFSFFRKHTKLLIVGVFLLMFVCGLFFTRPSGSYFIRLLSDYWIVFPIIVVVVFETMAVSWAYGARRFLADLTILLGHPISPIFGWLWPHLCPVVLLIIFVTMMVHLCMKPITYMSWDSSTVSLPQDPEPLWE

SEQ ID NO: 24501 - protein, 11 aa, Artificial Sequence
  Synthetic polypeptide
FWTSGLQNHEC

SEQ ID NO: 24502 - protein, 338 aa, Artificial Sequence
  Synthetic polypeptide
HLDFGLLAYRTMNAEILLKLINLGKLPPDAKPPVNLLYNPTSIYNAWLSGLPQHIKSMVLREVTECNIETQFLKASEGPKFAFLSFVEAMSFLPPSVFWSFIFFLMLLAMGLSSAIGIMQGIITPLQDTFSFFRKHTKLLIVGVFLLMFVCGLFFTRPSGSYFIRLLSDYWIVFPIIVVVVFETMAVSWAYGARRFLADLTILLGHPISPIFGWLWPHLCPVVLLIIFVTMMVHLCMKPITYMSWDSSTSKEVLRPYPPWALLLMITLFAIVILPIPAYFVYCRIHRIPFRPKSGDGPMTASTSLPLSHQLTPSKEVQKEEILQVDETKYPSTCNVTS

SEQ ID NO: 24503 - protein, 261 aa, Artificial Sequence
  Synthetic polypeptide
HLDFGLLAYRTMNAEILLKLINLGKLPPDAKPPVNLLYNPTSIYNAWLSGLPQHIKSMVLREVTECNIETQFLKASEGPKFAFLSFVEAMSFLPPSVFWSFIFFLMLLAMGLSSAIGIMQGIITPLQDTFSFFRKHTKLLIVGVFLLMFVCGLFFTRPSGSYFIRLLSDYWIVFPIIVVVVFETMAVSWAYGARRFLADLTILLGHPISPIFGWLWPHLCPVVLLIIFVTMMVHLCMKPITYMSWDSSTVSLPQDPEPLWE

SEQ ID NO: 24504 - protein, 119 aa, Artificial Sequence
  Synthetic polypeptide
GRARWLTPVIPALWEAEAGGSLEAWPSCLCRSGPKSWPSQESSPWASPSWVVWGPSRSSAASWACILGCCCSCLPHRSPWESSSPLSGPRKTHRPGPRETGINSSKGKHTGKRENKRKK

SEQ ID NO: 24505 - protein, 92 aa, Artificial Sequence
  Synthetic polypeptide
FQHFGKPRQVDHLRLGLRASADLVQSPGHLRNLHHGHRPPGLCGGPQGAPLPPGPVFWDAAAPVCHTDHPGNPHLHSAGPERHTDLDQGRQA

SEQ ID NO: 24506 - protein, 98 aa, Artificial Sequence
  Synthetic polypeptide
GRARWLTPVIPALWEAEAGGSLEAWPSCLCRSGPKSWPSQESSPWASPSWVVWGPSRSSAASWACILGCCCSCLPHRSPWESSSPLSGPSWSEACGTS

SEQ ID NO: 24507 - protein, 89 aa, Artificial Sequence
  Synthetic polypeptide
FQHFGKPRQVDHLRLGLRASADLVQSPGHLRNLHHGHRPPGLCGGPQGAPLPPGPVFWDAAAPVCHTDHPGNPHLHSAGPAGAKLAGRR

SEQ ID NO: 24508 - protein, 135 aa, Artificial Sequence
  Synthetic polypeptide
FQHFGKPRQVDHLRLGLRASADLVQSPGHLRNLHHGHRPPGLCGGPQGAPLPPGPVFWDAAAPVCHTDHPGNPHLHSAGPAGAKLAGRRRENHPKVRHQPRGDRGRGELGLCAVPAALLRLALPAGLVPSPHPER

SEQ ID NO: 24509 - protein, 88 aa, Artificial Sequence
  Synthetic polypeptide
GRARWLTPVIPALWEAEAGGSLEAWPSCLCRSGPKSWPSQESSPWASPSWVVWGPSRSSAASWACILGCCCSCLPHRSPWESSSPLSG

SEQ ID NO: 24510 - protein, 79 aa, Artificial Sequence
  Synthetic polypeptide
FQHFGKPRQVDHLRLGLRASADLVQSPGHLRNLHHGHRPPGLCGGPQGAPLPPGPVFWDAAAPVCHTDHPGNPHLHSAG

SEQ ID NO: 24511 - protein, 38 aa, Artificial Sequence
  Synthetic polypeptide
GRVLWLTPAIPTLWEAQPPHLPPQGGICWSCCCSSLPW

SEQ ID NO: 24512 - protein, 47 aa, Artificial Sequence
  Synthetic polypeptide
AGCCGLRLQSQHFGRPSLPTCPRKAASAGPAAAPLYPGDPLRCSSYP

SEQ ID NO: 24513 - protein, 255 aa, Artificial Sequence
  Synthetic polypeptide
PGAVAYACNPNTLGGPASPPAPARRHLLVLLLLLSTLVIPSAAAPIHDADAQESSLGLTGLQSLLQGFSRLFLKGNLLRGIDSLFSAPMDFRGLPGNYHKEENQEHQLGNNTLSSHLQIDKMTDNKTGEVLISENVVASIQPAEGSFEGDLKVPRMEEKEALVPIQKATDSFHTELHPRVAFWIIKLPRRRSHQDALEGGHWLSEKRHRLQAIRDGLRKGTHKDVLEEGTESSSHSRLSPRKTHLLYILRPSRQL

SEQ ID NO: 24514 - protein, 212 aa, Artificial Sequence
  Synthetic polypeptide
PGAVAYACNPNTLGGPASPPAPARRHLLVLLLLLSTLVIPSAAAPIHDADAQESSLGLTGLQSLLQGFSRLFLKGNLLRGIDSLFSAPMDFRGLPGNYHKEENQEHQLGNNTLSSHLQIDKVPRMEEKEALVPIQKATDSFHTELHPRVAFWIIKLPRRRSHQDALEGGHWLSEKRHRLQAIRDGLRKGTHKDVLEEGTESSSHSRLSPRKT

SEQ ID NO: 24515 - protein, 293 aa, Artificial Sequence
  Synthetic polypeptide
GRARWLTPVIPPLWEAEAGGSRGQEIETILANTASKELQQAQTTRPESTQIQPQPGFCIKTNSSEGKVFINICHSPSIPPPADVTEEELLQMLEEDQAGFRIPMSLGEPHAELDAKGQGCTAYDVAVNSDFYRRMQNSDFLRELVITIAREGLEDKYNLQLNPEWRMMKNRPFMGSISQQNIRSEQRPRIQELGDLYTPAPGRAESGPEKPHLNLWLEAPDLLLAEVDLPKLDGALGLSLEIGENRLVMGGPQQLYHLDAYIPLQINSHESKAAFHRKRKQLMVAMPLLPVPS

SEQ ID NO: 24516 - protein, 49 aa, Artificial Sequence
  Synthetic polypeptide
SHHFGRPRRADHEVRRSRPSWLTRPRRSSSKPRQPDQNRHKSSLSLVSA

SEQ ID NO: 24517 - protein, 121 aa, Artificial Sequence
  Synthetic polypeptide
HGLEGAPASPDNQTRIDTNPASAWFLHKDQLLGREGFHQHLPLPLYPSSRRRDRGGAASDARGGPSWVSHPHESGRASCRTGCKRPGMYRLRRSCQQRLLPEDAEQRFLAGARDHHRQGGP

SEQ ID NO: 24518 - protein, 287 aa, Artificial Sequence
  Synthetic polypeptide
GRARWLTPVIPPLWEAEAGGSRGQEIETILANTASKELQQAQTTRPESTQIQPQPGFCIKTNSSEGKVFINICHSPSIPPPADVTEEELLQMLEEDQAGFRIPMSLGEPHAELDAKGQGCTAYDVAVNSDFYRRMQNSDFLRELVITIAREGLEDKYNLQLNPEWRMMKNRPFMGSISQQNIRSEQRPRIQELGDLYTPAPGRAESGPEKPHLNLWLEAPDLLLAEVDLPKLDGALGLSLEIGENRLVMGGPQQLYHLDAYIPLQINSHESKAAFHRKRKQLMVAMP

SEQ ID NO: 24519 - protein, 132 aa, Artificial Sequence
  Synthetic polypeptide
GRARWLTPVIPPLWEAEAGGSRGQEIETILANTASKELQQAQTTRPESTQIQPQPGFCIKTNSSEGKVFINICHSPSIPPPADVTEEELLQMLEEDQAGFRIPMSLGEPHAELDAKQRFLAGARDHHRQGGP

SEQ ID NO: 24520 - protein, 92 aa, Artificial Sequence
  Synthetic polypeptide
HGLEGAPASPDNQTRIDTNPASAWFLHKDQLLGREGFHQHLPLPLYPSSRRRDRGGAASDARGGPSWVSHPHESGRASCRTGCKTAISCGSS

SEQ ID NO: 24521 - protein, 239 aa, Artificial Sequence
  Synthetic polypeptide
GRARWLTPVIPPLWEAEAGGSRGQEIETILANTASKELQQAQTTRPESTQIQPQPGFCIKTNSSEGKVFINICHSPSIPPPADVTEEELLQMLEEDQAGFRIPMSLGEPHAELDASQCPQRTQESGPLGPFFPRTQESWAQDPPPSAPGDLAPRSDSFPYEGQGCTAYDVAVNSDFYRRMQNSDFLRELVITIAREGLEDKYNLQLNPEWRMMKNRPFMGSISQQNIRSEQRPRIQELG

SEQ ID NO: 24522 - protein, 101 aa, Artificial Sequence
  Synthetic polypeptide
HGLEGAPASPDNQTRIDTNPASAWFLHKDQLLGREGFHQHLPLPLYPSSRRRDRGGAASDARGGPSWVSHPHESGRASCRTGCKSVPSEDPGVWPARPLLP

SEQ ID NO: 24523 - protein, 178 aa, Artificial Sequence
  Synthetic polypeptide
GRARWLTPVIPPLWEAEAGGSRGQEIETILANTASKELQQAQTTRPESTQIQPQPGFCIKTNSSEGKVFINICHSPSIPPPADVTEEELLQMLEEDQAGFRIPMSLGEPHAELDAKGQGCTAYDVAVNSDFYRRMQNSDFLRELVITIAREGLEDKYNLQLNPEWRMMKNRPFMGSIS

SEQ ID NO: 24524 - protein, 85 aa, Artificial Sequence
  Synthetic polypeptide
GRARWLTPVIPPLWEAEAGGSRGQEIETILANTASKELQQAQTTRPESTQIQPQPGFCIKTNSSEGKVFINICHSPSIPPPADVT

SEQ ID NO: 24525 - protein, 53 aa, Artificial Sequence
  Synthetic polypeptide
HGLEGAPASPDNQTRIDTNPASAWFLHKDQLLGREGFHQHLPLPLYPSSRRRD

SEQ ID NO: 24526 - protein, 142 aa, Artificial Sequence
  Synthetic polypeptide
GRARWLTPVIPPLWEAEAGGSRGLEGAPASPDNQTRIDTNPASAWFLHKDQLLGREGFHQHLPLPLYPSSRRRDRGGAASDARGGPSWVSHPHESGRASCRTGCKRPGMYRLRRSCQQRLLPEDAEQRFLAGARDHHRQGGP

SEQ ID NO: 24527 - protein, 273 aa, Artificial Sequence
  Synthetic polypeptide
SHHFGRPRRADHEASKELQQAQTTRPESTQIQPQPGFCIKTNSSEGKVFINICHSPSIPPPADVTEEELLQMLEEDQAGFRIPMSLGEPHAELDAKGQGCTAYDVAVNSDFYRRMQNSDFLRELVITIAREGLEDKYNLQLNPEWRMMKNRPFMGSISQQNIRSEQRPRIQELGDLYTPAPGRAESGPEKPHLNLWLEAPDLLLAEVDLPKLDGALGLSLEIGENRLVMGGPQQLYHLDAYIPLQINSHESKAAFHRKRKQLMVAMPLLPVPS

SEQ ID NO: 24528 - protein, 47 aa, Artificial Sequence
  Synthetic polypeptide
PGAVAHTCNPTTLGGRGGRITRPRRSSSKPRQPDQNRHKSSLSLVSA

SEQ ID NO: 24529 - protein, 267 aa, Artificial Sequence
  Synthetic polypeptide
SHHFGRPRRADHEASKELQQAQTTRPESTQIQPQPGFCIKTNSSEGKVFINICHSPSIPPPADVTEEELLQMLEEDQAGFRIPMSLGEPHAELDAKGQGCTAYDVAVNSDFYRRMQNSDFLRELVITIAREGLEDKYNLQLNPEWRMMKNRPFMGSISQQNIRSEQRPRIQELGDLYTPAPGRAESGPEKPHLNLWLEAPDLLLAEVDLPKLDGALGLSLEIGENRLVMGGPQQLYHLDAYIPLQINSHESKAAFHRKRKQLMVAMP

SEQ ID NO: 24530 - protein, 113 aa, Artificial Sequence
  Synthetic polypeptide
GRARWLTPVIPPLWEAEAGGSRGLEGAPASPDNQTRIDTNPASAWFLHKDQLLGREGFHQHLPLPLYPSSRRRDRGGAASDARGGPSWVSHPHESGRASCRTGCKTAISCGSS

SEQ ID NO: 24531 - protein, 112 aa, Artificial Sequence
  Synthetic polypeptide
SHHFGRPRRADHEASKELQQAQTTRPESTQIQPQPGFCIKTNSSEGKVFINICHSPSIPPPADVTEEELLQMLEEDQAGFRIPMSLGEPHAELDAKQRFLAGARDHHRQGGP

SEQ ID NO: 24532 - protein, 122 aa, Artificial Sequence
  Synthetic polypeptide
GRARWLTPVIPPLWEAEAGGSRGLEGAPASPDNQTRIDTNPASAWFLHKDQLLGREGFHQHLPLPLYPSSRRRDRGGAASDARGGPSWVSHPHESGRASCRTGCKSVPSEDPGVWPARPLLP

SEQ ID NO: 24533 - protein, 219 aa, Artificial Sequence
  Synthetic polypeptide
SHHFGRPRRADHEASKELQQAQTTRPESTQIQPQPGFCIKTNSSEGKVFINICHSPSIPPPADVTEEELLQMLEEDQAGFRIPMSLGEPHAELDASQCPQRTQESGPLGPFFPRTQESWAQDPPPSAPGDLAPRSDSFPYEGQGCTAYDVAVNSDFYRRMQNSDFLRELVITIAREGLEDKYNLQLNPEWRMMKNRPFMGSISQQNIRSEQRPRIQELG

SEQ ID NO: 24534 - protein, 158 aa, Artificial Sequence
  Synthetic polypeptide
SHHFGRPRRADHEASKELQQAQTTRPESTQIQPQPGFCIKTNSSEGKVFINICHSPSIPPPADVTEEELLQMLEEDQAGFRIPMSLGEPHAELDAKGQGCTAYDVAVNSDFYRRMQNSDFLRELVITIAREGLEDKYNLQLNPEWRMMKNRPFMGSIS

SEQ ID NO: 24535 - protein, 74 aa, Artificial Sequence
  Synthetic polypeptide
GRARWLTPVIPPLWEAEAGGSRGLEGAPASPDNQTRIDTNPASAWFLHKDQLLGREGFHQHLPLPLYPSSRRRD

SEQ ID NO: 24536 - protein, 65 aa, Artificial Sequence
  Synthetic polypeptide
SHHFGRPRRADHEASKELQQAQTTRPESTQIQPQPGFCIKTNSSEGKVFINICHSPSIPPPADVT

SEQ ID NO: 24537 - protein, 27 aa, Artificial Sequence
  Synthetic polypeptide
DQPGQHGLAGHPGPVLGPLCEWEVVKA

SEQ ID NO: 24538 - protein, 781 aa, Artificial Sequence
  Synthetic polypeptide
EFETSLGNMAWLDTQDRCLGHYVNGKWLKPEHRNSVPCQDPITGENLASCLQAQAEDVAAAVEAARMAFKGWSAHPGVVRAQHLTRLAEVIQKHQRLLWTLESLVTGRAVREVRDGDVQLAQQLLHYHAIQASTQEEALAGWEPMGVIGLILPPTFSFLEMMWRICPALAVGCTVVALVPPASPAPLLLAQLAGELGPFPGILNVLSGPASLVPILASQPGIRKVAFCGAPEEGRALRRSLAGECAELGLALGTESLLLLTDTADVDSAVEGVVDAAWSDRGPGGLRLLIQESVWDEAMRRLQERMGRLRSGRGLDGAVDMGARGAAACDLVQRFVREAQSQGAQVFQAGDVPSERPFYPPTLVSNLPPASPCAQVEVPWPVVVASPFRTAKEALLVANGTPRGGSASVWSERLGQALELGYGLQVGTVWINAHGLRDPSVPTGGCKESGCSWHGGPDGLYEYLRPSGTPARLSCLSKNLNYDTFGLAVPSTLPAGPEIGPSPAPPYGLFVGGRFQAPGARSSRPIRDSSGNLHGYVAEGGAKDIRGAVEAAHQAFPGWAGQSPGARAALLWALAAALERRKSTLASRLERQGAELKAAEAEVELSARRLRAWGARVQAQGHTLQVAGLRGPVLRLREPLGVLAVVCPDEWPLLAFVSLLAPALAYGNTVVMVPSAACPLLALEVCQDMATVFPAGLANVVTGDRDHLTRCLALHQDVQAMWYFGSAQGSQFVEWASAGNLKPVWASRGCPRAWDQEAEGAGPELGLRVARTKALWLPMGD

SEQ ID NO: 24539 - protein, 46 aa, Artificial Sequence
  Synthetic polypeptide
PGKWLTPVIPAVWETEAGGSLAPRSLRPAWATWPGWTPRTGAWATM

SEQ ID NO: 24540 - protein, 730 aa, Artificial Sequence
  Synthetic polypeptide
EFETSLGNMAWLDTQDRCLGHYVNGKWLKPEHRNSVPCQDPITGENLASCLQAQAEDVAAAVEAARMAFKGWSAHPGVVRAQHLTRLAEVIQKHQRLLWTLESLVTGRAVREVRDGDVQLAQQLLHYHAIQASTQEEALAGWEPMGVIGLILPPTFSFLEMMWRICPALAVGCTVVALVPPASPAPLLLAQLAGELGPFPGILNVLSGPASLVPILASQPGIRKVAFCGAPEGGLRLLIQESVWDEAMRRLQERMGRLRSGRGLDGAVDMGARGAAACDLVQRFVREAQSQGAQVFQAGDVPSERPFYPPTLVSNLPPASPCAQVEVPWPVVVASPFRTAKEALLVANGTPRGGSASVWSERLGQALELGYGLQVGTVWINAHGLRDPSVPTGGCKESGCSWHGGPDGLYEYLRPSGTPARLSCLSKNLNYDTFGLAVPSTLPAGPEIGPSPAPPYGLFVGGRFQAPGARSSRPIRDSSGNLHGYVAEGGAKDIRGAVEAAHQAFPGWAGQSPGARAALLWALAAALERRKSTLASRLERQGAELKAAEAEVELSARRLRAWGARVQAQGHTLQVAGLRGPVLRLREPLGVLAVVCPDEWPLLAFVSLLAPALAYGNTVVMVPSAACPLLALEVCQDMATVFPAGLANVVTGDRDHLTRCLALHQDVQAMWYFGSAQGSQFVEWASAGNLKPVWASRGCPRAWDQEAEGAGPELGLRVARTKALWLPMGD

SEQ ID NO: 24541 - protein, 160 aa, Artificial Sequence
  Synthetic polypeptide
IQEADLATERAYQKQPTIFQNKKRVLLGETGKEKLPRYYKNIGLGFKTPKEAIEGTYIDKKCPFTGNVSIRGRILSGVVTKMKMQRTIVIRRDYLHYIRKYNRFEKRHKNMSVHLSPCFRDVQIGDIVTVGECRPLSKTVRFNVLKVTKAAGTKKQFQKF

SEQ ID NO: 24542 - protein, 106 aa, Artificial Sequence
  Synthetic polypeptide
KYKKISQAWWQAHVVPATREPEAGEWRESRRRTLQLSVPTKSSRPSFKTRRGSCWEKLARRSSRGTTRTSVWASRHPRRLLRAPTLTRNAPSLVMCPFEGGSSLAW

SEQ ID NO: 24543 - protein, 21 aa, Artificial Sequence
  Synthetic polypeptide
SQLLGSLRQENGVNPGGGPCN

SEQ ID NO: 24544 - protein, 120 aa, Artificial Sequence
  Synthetic polypeptide
IQEADLATERAYQKQPTIFQNKKRVLLGETGKEKLPRYYKNIGLGFKTPKEAIEGTYIDKKCPFTGNVSIRGRILSGVVTKMKMQRTIVIRRDYLHYIRKYNRFEKRHKNMSVHLSPCFR

SEQ ID NO: 24545 - protein, 90 aa, Artificial Sequence
  Synthetic polypeptide
IQEADLATERAYQKQPTIFQNKKRVLLGETGKEKLPRADPLWRGDQDEDAEDHCHPPRLSALHPQVQPLREAPQEHVCTPVPLLQGRPDR

SEQ ID NO: 24546 - protein, 118 aa, Artificial Sequence
  Synthetic polypeptide
KYKKISQAWWQAHVVPATREPEAGEWRESRRRTLQLSVPTKSSRPSFKTRRGSCWEKLARRSSRGRILSGVVTKMKMQRTIVIRRDYLHYIRKYNRFEKRHKNMSVHLSPCFRDVQIG

SEQ ID NO: 24547 - protein, 79 aa, Artificial Sequence
  Synthetic polypeptide
IQEADLATERAYQKQPTIFQNKKRVLLGETGKEKLPRYYKNIGLGFKTPKEAIEGTYIDKKCPFTGNVSIRGRILSGVV

SEQ ID NO: 24548 - protein, 42 aa, Artificial Sequence
  Synthetic polypeptide
KSSGTRIEKATSPSCTTLPRCPRLPRGLLPSGCPAGWARSST

SEQ ID NO: 24549 - protein, 385 aa, Artificial Sequence
  Synthetic polypeptide
NVQNRQIYQDRKQMNGCQGSGSSGCLTGTDLLFGVIKKLWNSDRESHLSLLYHLTAVSSPAPGTPAFWVSGWLGPQQYLSYNSLRGEAEPCGAWVWENQVSWYWEKETTDLRIKEKLFLEAFKALGGKGPYTLQGLLGCELGPDNTSVPTAKFALNGEEFMNFDLKQGTWGGDWPEALAISQRWQQQDKAANKELTFLLFSCPHRLREHLERGRGNLEWKEPPSMRLKARPSSPGFSVLTCSAFSFYPPELQLRFLRNGLAAGTGQGDFGPNSDGSFHASSSLTVKSGDEHHYCCIVQHAGLAQPLRVELESPAKSSVLVVGIVIGVLLLTAAAVGGALLWRRMRSGLPAPWISLRGDDTGVLLPTPGEAQDADLKDVNVIPATA

SEQ ID NO: 24550 - protein, 161 aa, Artificial Sequence
  Synthetic polypeptide
NVQNRQIYQDRKQMNGCQGSGSSGCLTGTDLLFGVIKKLWNSDRESHLSLLYHLTAVSSPAPGTPAFWVSGWLGPQQYLSYNSLRGEAEPCGAWVWENQVSWYWEKETTDLRIKEKLFLEAFKALGGKGPYTLQGLLGCELGPDNTSVPTAKFALNGEEFM

SEQ ID NO: 24551 - protein, 245 aa, Artificial Sequence
  Synthetic polypeptide
NVQNRQIYQDRKQMNGCQGSGSSGCLTGTDLLFGVIKKLWNSDRESHLSLLYHLTAVSSPAPGTPAFWVSGWLGPQQYLSYNSLRGEAEPCGAWVWENQVSWYWEKETTDLRIKEKLFLEAFKALGGKGPYTLQGLLGCELGPDNTSVPTAKFALNGEEFMNFDLKQGTWGGDWPEALAISQRWQQQDKAANKELTFLLFSCPHRLREHLERGRGNLEWKDTVSHYVAQAGLELLGSSDSPALVS

SEQ ID NO: 24552 - protein, 187 aa, Artificial Sequence
  Synthetic polypeptide
NVQNRQIYQDRKQMNGCQGSGSSGCLTGTDLLFGVIKKLWNSDRESHLSLLYHLTAVSSPAPGTPAFWVSGWLGPQQYLSYNSLRGEAEPCGAWVWENQVSWYWEKETTDLRIKEKLFLEAFKALGGKGPYTLQGLLGCELGPDNTSVPTAKFALNGEEFMNFDLKQGTWGGDWPEALAISQRWQQQ

SEQ ID NO: 24553 - protein, 293 aa, Artificial Sequence
  Synthetic polypeptide
NVQNRQIYQDRKQMNGCQGSGSSGCLTGTDLLFGVIKKLWNSDRESHLSLLYHLTAVSSPAPGTPAFWVSGWLGPQQYLSYNSLRGEAEPCGAWVWENQVSWYWEKETTDLRIKEKLFLEAFKALGGKEPPSMRLKARPSSPGFSVLTCSAFSFYPPELQLRFLRNGLAAGTGQGDFGPNSDGSFHASSSLTVKSGDEHHYCCIVQHAGLAQPLRVELESPAKSSVLVVGIVIGVLLLTAAAVGGALLWRRMRSGLPAPWISLRGDDTGVLLPTPGEAQDADLKDVNVIPATA

SEQ ID NO: 24554 - protein, 232 aa, Artificial Sequence
  Synthetic polypeptide
NVQNRQIYQDRKQMNGCQGSGSSGCLTGTDLLFGVIKKLWNSDRESHLSLLYHLTAVSSPAPGTPAFWVSGWLGPQQYLSYNSLRGEAEPCGAWVWENQVSWYWEKETTDLRIKEKLFLEAFKALGGKGPYTLQGLLGCELGPDNTSVPTAKFALNGEEFMNFDLKQGTWGGDWPEALAISQRWQQQDKAANKELTFLLFSCPHRLREHLERGRGNLEWKEPKARQIFCAWI

SEQ ID NO: 24555 - protein, 18 aa, Artificial Sequence
  Synthetic polypeptide
GRARWLTPVVPALWEAEI

SEQ ID NO: 24556 - protein, 108 aa, Artificial Sequence
  Synthetic polypeptide
SQHFGRLRSDYLHGRKRTLTTLCPLVLCGGVMAPGPAVDQEARDGQGCAHVPQGLGRNGPGRGCLLPGEYCGPAHFQQPPTLPHLRPVQGLPAGLGGGHGFPGPWGEL

SEQ ID NO: 24557 - protein, 127 aa, Artificial Sequence
  Synthetic polypeptide
SQHFGRLRSDYLHGRKRTLTTLCPLVLCGGVMAPGPAVDQEARDGQGCAHVPQGLGRNGPGRGCLLPGEYCGPAHFQQPPTLPHLRPVQGLPAGLGGGHGFPGPWGELSPRSSWCASNPPVPHHLNQ

SEQ ID NO: 24558 - protein, 71 aa, Artificial Sequence
  Synthetic polypeptide
SQHFGRLRSDYLHGRKRTLTTLCPLVLCGGVMAPGPAVDQEARDGQGCAHVPQGLGRNGPGRGCLLPGEYC

SEQ ID NO: 24559 - protein, 65 aa, Artificial Sequence
  Synthetic polypeptide
LMPVIPALWEAEEDGSPEVRSSRPAWPTWPGPRPLVHMFPGGISQTCQPGRGISALPSTAKKGCV

SEQ ID NO: 24560 - protein, 38 aa, Artificial Sequence
  Synthetic polypeptide
SQHFGRPRRTDHLRSGVQDQPGQHGLGRGHWCICSREG

SEQ ID NO: 24561 - protein, 383 aa, Artificial Sequence
  Synthetic polypeptide
GQEFKTSLANMAWAEATGAYVPGRDKPDLPTWKRNFRSALNRKEGLRLAEDRSKDPHDPHKIYEFVNSGVGDFSQPDTSPDTNGGGSTSDTQEDILDELLGNMVLAPLPDPGPPSLAVAPEPCPQPLRSPSLDNPTPFPNLGPSENPLKRLLVPGEEWEFEVTAFYRGRQVFQQTISCPEGLRLVGSEVGDRTLPGWPVTLPDPGMSLTDRGVMSYVRHVLSCLGGGLALWRAGQWLWAQRLGHCHTYWAVSEELLPNSGHGPDGEVPKDKEGGVFDLGPFIVDLITFTEGSGRSPRYALWFCVGESWPQDQPWTKRLVMVKVVPTCLRALVEMARVGGASSLENTVDLHISNSHPLSLTSDQYKAYLQDLVEGMDFQGPGES

SEQ ID NO: 24562 - protein, 364 aa, Artificial Sequence
  Synthetic polypeptide
GQEFKTSLANMAWAEATGAYVPGRDKPDLPTWKRNFRSALNRKEGLRLAEDRSKDPHDPHKIYEFVNSGVGDFSQPDTSPDTNGGGSTSDTQEDILDELLGNMVLAPLPDPGPPSLAVAPEPCPQPLRSPSLDNPTPFPNLGPSENPLKRLLVPGEEWEFEVTAFYRGRQVFQQTISCPEGLRLVGSEVGDRTLPGWPVTLPDPGMSLTDRGVMSYVRHVLSCLGGGLALWRAGQWLWAQRLGHCHTYWAVSEELLPNSGHGPDGEVPKDKEGGVFDLGPFIVGCAHVPQGLGRNGPGRGCLLPGEYCGPAHFQQPPTLPHLRPVQGLPAGLGGGHGFPGPWGELSPRSSWCASNPPVPHHLNQ

SEQ ID NO: 24563 - protein, 408 aa, Artificial Sequence
  Synthetic polypeptide
GQEFKTSLANMAWAEATGAYVPGRDKPDLPTWKRNFRSALNRKEGLRLAEDRSKDPHDPHKIYEFVNSGVGDFSQPDTSPDTNGGGSTSDTQEDILDELLGNMVLAPLPDPGPPSLAVAPEPCPQPLRSPSLDNPTPFPNLGPSENPLKRLLVPGEEWEFEVTAFYRGRQVFQQTISCPEGLRLVGSEVGDRTLPGWPVTLPDPGMSLTDRGVMSYVRHVLSCLGGGLALWRAGQWLWAQRLGHCHTYWAVSEELLPNSGHGPDGEVPKDKEGGVFDLGPFIVGSWAPRSDYLHGRKRTLTTLCPLVLCGGVMAPGPAVDQEARDGQGCAHVPQGLGRNGPGRGCLLPGEYCGPAHFQQPPTLPHLRPVQGLPAGLGGGHGFPGPWGELSPRSSWCASNPPVPHHLNQ

SEQ ID NO: 24564 - protein, 285 aa, Artificial Sequence
  Synthetic polypeptide
GQEFKTSLANMAWAEATGAYVPGRDKPDLPTWKRNFRSALNRKEGLRLAEDRSKDPHDPHKIYEFVNSGVGDFSQPDTSPDTNGGGSTSDTQEDILDELLGNMVLAPLPDPGPPSLAVAPEPCPQPLRSPSLDNPTPFPNLGPSENPLKRLLVPGEEWEFEVTAFYRGRQVFQQTISCPEGLRLVGSEVGDRTLPGWPVTLPDPGMSLTDRGVMSYVRHVLSCLGGGLALWRAGQWLWAQRLGHCHTYWAVSEELLPNSGHGPDGEVPKDKEGGVFDLGPFIVGE

SEQ ID NO: 24565 - protein, 256 aa, Artificial Sequence
  Synthetic polypeptide
GQEFKTSLANMAWAEATGAYVPGRDKPDLPTWKRNFRSALNRKEGLRLAEDRSKDPHDPHKIYEFVNSGVGDFSQPDTSPDTNGGGSTSDTQEDILDELLGNMVLAPLPDPGPPSLAVAPEPCPQPLRSPSLDNPTPFPNLGPSENPLKRLLVPGEDLITFTEGSGRSPRYALWFCVGESWPQDQPWTKRLVMVKVVPTCLRALVEMARVGGASSLENTVDLHISNSHPLSLTSDQYKAYLQDLVEGMDFQGPGES

SEQ ID NO: 24566 - protein, 220 aa, Artificial Sequence
  Synthetic polypeptide
GQEFKTSLANMAWAEATGAYVPGRDKPDLPTWKRNFRSALNRKEGLRLAEDRSKDPHDPHKIYEFVNSGVGDFSQPDTSPDTNGGGSTSDTQEDILDELLGNMVLAPLPDPGPPSLAVAPEPCPQPLRSPSLDNPTPFPNLGPSENPLKRLLVPGEDLITFTEGSGRSPRYALWFCVGESWPQDQPWTKRLVMVKVVPTCLRALVEMARVGGASSLENTV

SEQ ID NO: 24567 - protein, 243 aa, Artificial Sequence
  Synthetic polypeptide
GQEFKTSLANMAWAEATGAYVPGRDKPDLPTWKRNFRSALNRKEGLRLAEDRSKDPHDPHKIYEFVNSGVGDFSQPDTSPDTNGGGSTSDTQEDILDELLGNMVLAPLPDPGPPSLAVAPEPCPQPLRSPSLDNPTPFPNLGPSENPLKRLLVPGEEWEFEVTAFYRGRQVFQQTISCPEGLRLVGSEVGDRTLPGWPVTLPDPGMSLTDRGVMSYVRHVLSCLGGGLALWRAGQWLWAQRLG

SEQ ID NO: 24568 - protein, 109 aa, Artificial Sequence
  Synthetic polypeptide
GQEFKTSLANMAWAEATGAYVPGRDKPDLPTWKRNFRSALNRKEGLRLAEDRSKDPHDPHKIYEFVNSGVGDFSQPDTSPDTNGGGSTSDTQEDILDELLEWEFEVTAF

SEQ ID NO: 24569 - protein, 146 aa, Artificial Sequence
  Synthetic polypeptide
GQEFKTSLANMAWAEATGAYVPGRDKPDLPTWKRNFRSALNRKEGLRLAEDRSKDPHDPHKIYEFVNSGVGDFSQPDTSPDTNGGGSTSDTQEDILDELLGNMVLAPLPDPGPPSLAVAPEPCPQPLRSPSLDNPTPFPNLGPSEN

SEQ ID NO: 24570 - protein, 43 aa, Artificial Sequence
  Synthetic polypeptide
LMPVIPALWEAEEDGSPEVRSSRPAWPTWPGPRPLVHMFPGGI

SEQ ID NO: 24571 - protein, 25 aa, Artificial Sequence
  Synthetic polypeptide
GQEFKTSLANMAWAEATGAYVPGRD

SEQ ID NO: 24572 - protein, 58 aa, Artificial Sequence
  Synthetic polypeptide
GQEFKTSLANMAWAEATGAYVPGRDKPDLPTWKRNFRSALNRKEGLRLAEDRSKDPHD

SEQ ID NO: 24573 - protein, 39 aa, Artificial Sequence
  Synthetic polypeptide
ITLILCSPPTAAFISQSGQHGQCQAECGPVPPSTVQGLA

SEQ ID NO: 24574 - protein, 811 aa, Artificial Sequence
  Synthetic polypeptide
FSAHHPQRLSSPNRDSMDSVKQSAALCLLRLYKASPDLVPMGEWTARVVHLLNDQHMGVVTAAVSLITCLCKKNPDDFKTCVSLAVSRLSRIVSSASTDLQDYTYYFVPAPWLSVKLLRLLQCYPPPEDAAVKGRLVECLETVLNKAQEPPKSKKVQHSNAKNAILFETISLIIHYDSEPNLLVRACNQLGQFLQHRETNLRYLALESMCTLASSEFSHEAVKTHIDTVINALKTERDVSVRQRAADLLYAMCDRSNAKQIVSEMLRYLETADYAIREEIVLKVAILAEKYAVDYSWYVDTILNLIRIAGDYVSEEVWYRVLQIVTNRDDVQGYAAKTVFEALQAPACHENMVKVGGYILGEFGNLIAGDPRSSPPVQFSLLHSKFHLCSVATRALLLSTYIKFINLFPETKATIQGVLRAGSQLRNADVELQQRAVEYLTLSSVASTDVLATVLEEMPPFPERESSILAKLKRKKGPGAGSALDDGRRDPSSNDINGGMEPTPSTVSTPSPSADLLGLRAAPPPAAPPASAGAGNLLVDVFDGPAAQPSLGPTPEEAFLSPGPEDIGPPIPEADELLNKFVCKNNGVLFENQLLQIGVKSEFRQNLGRMYLFYGNKTSVQFQNFSPTVVHPGDLQTQLAVQTKRVAAQVDGGAQVQQVLNIECLRDFLTPPLLSVRFRYGGAPQALTLKLPVTINKFFQPTEMAAQDFFQRWKQLSLPQQEAQKIFKANHPMDAEVTKAKLLGFGSALLDNVDPNPENFVGAGIIQTKALQVGCLLRLEPNAQAQMYRLTLRTSKEPVSRHLCELLAQQF

SEQ ID NO: 24575 - protein, 91 aa, Artificial Sequence
  Synthetic polypeptide
HADSLLTTHSGFHLPIGTAWTVSSRVRPCASFDCTRPRLTWCPWASGRRVWYTCSMTSTWVWSRPPSASSPVSARRTQMTSRRASLWLCRA

SEQ ID NO: 24576 - protein, 833 aa, Artificial Sequence
  Synthetic polypeptide
FSAHHPQRLSSPNRDSMDSVKQSAALCLLRLYKASPDLVPMGEWTARVVHLLNDQHMGVVTAAVSLITCLCKKNPDDFKTCVSLAVSRLSRIVSSASTDLQDYTYYFVPAPWLSVKLLRLLQCYPPPEDAAVKGRLVECLETVLNKAQEPPKSKKVQHSNAKNAILFETISLIIHYDSEPNLLVRACNQLGQFLQHRETNLRYLALESMCTLASSEFSHEAVKTHIDTVINALKTERDVSVRQRAADLLYAMCDRSNAKQIVSEMLRYLETADYAIREEIVLKVAILAEKYAVDYSWYVDTILNLIRIAGDYVSEEVWYRVLQIVTNRDDVQGYAAKTVFEALQAPACHENMVKVGGYILGEFGNLIAGDPRSSPPVQFSLLHSKFHLCSVATRALLLSTYIKFINLFPETKATIQGVLRAGSQLRNADVELQQRAVEYLTLSSVASTDVLATVLEEMPPFPERESSILAKLKRKKGPGAGSALDDGRRDPSSNDINGGMEPTPSTVSTPSPSADLLGLRAAPPPAAPPASAGAGNLLVDVFDGPAAQPSLGPTPEEAFLSELEPPAPESPMALLADPAPAADPGPEDIGPPIPEADELLNKFVCKNNGVLFENQLLQIGVKSEFRQNLGRMYLFYGNKTSVQFQNFSPTVVHPGDLQTQLAVQTKRVAAQVDGGAQVQQVLNIECLRDFLTPPLLSVRFRYGGAPQALTLKLPVTINKFFQPTEMAAQDFFQRWKQLSLPQQEAQKIFKANHPMDAEVTKAKLLGFGSALLDNVDPNPENFVGAGIIQTKALQVGCLLRLEPNAQAQMYRLTLRTSKEPVSRHLCELLAQQF

SEQ ID NO: 24577 - protein, 34 aa, Artificial Sequence
  Synthetic polypeptide
AVNLAMGSLASQLPSLIPDVLYKKGRSFLWDLKN

SEQ ID NO: 24578 - protein, 15 aa, Artificial Sequence
  Synthetic polypeptide
SLMFSIRKAGPSCGT

SEQ ID NO: 24579 - protein, 12 aa, Artificial Sequence
  Synthetic polypeptide
ERQVLLVGLEEL

SEQ ID NO: 24580 - protein, 315 aa, Artificial Sequence
  Synthetic polypeptide
ERQVLLVGLEELTNIRNVERLKKDLRASYCLIDSFLGDSELIGDLTQCVDCVIPPEGSLLQEALSGFAEAAGTTFVSLVVSGRVVAATEGWWRLGTPEAVLLPWLVGSLPPQTARDYPVYLPHGSPTVPHRLLTLTLLPSLELCLLCGPSPPLSQLYPQLLERWWQPLLDPLRACLPLGPRALPSGFPLHTDILGLLLLHLELKRCLFTVEPLGDKEPSPEQRRRLLRNFYTLVTSTHFPPEPGPPEKTEDEVYQAQLPRACYLVLGTEEPGTGVRLVALQLGLRRLLLLLSPQSPTHGLRSLATHTLHALTPLL

SEQ ID NO: 24581 - protein, 284 aa, Artificial Sequence
  Synthetic polypeptide
ERQVLLVGLEELTNIRNVERLKKDLRASYCLIDSFLGDSELIGDLTQCVDCVIPPEGSLLQEALSGFAEAAGTTFVSLVVSGRVVAATEGWWRLGTPEAVLLPWLVGSLPPQTARDYPVYLPHGSPTVPHRLLTLTLLPSLELCLLCGPSPPLSQLYPQLLERWWQPLLDPLRACLPLGPRALPSGFPLHTDILGLLLLHLELKRCLFTVEPLGDKEPSPEQRRRLLRNFYTLVTSTHFPPEPGPPEKTEDEVYQAQLPRACYLVMGDGHRHGAVSVSLFIRSQ

SEQ ID NO: 24582 - protein, 33 aa, Artificial Sequence
  Synthetic polypeptide
ERQVLLVGLEELTNIRNVERLKKDLRAGPFFLS

SEQ ID NO: 24583 - protein, 55 aa, Artificial Sequence
  Synthetic polypeptide
ERQVLLVGLEELTNIRNVERLKKDLRASYCLIDSFLGDSELIGDLTQCVDCVIPP

SEQ ID NO: 24584 - protein, 405 aa, Artificial Sequence
  Synthetic polypeptide
PCYFWPCLPGRMISFPWASVSSLVELGPRPTVERGPPVTEEEWARHVGPEGRLQQVPELKNRIFSGGLSPSLRREAWKFLLGYLSWEGTAEEHKAHIRKKTDEYFRMKLQWKSVSPEQERRNSLLHGYRSLIERDVSRTDRTNKFYEGPENPGLGLLNDILLTYCMYHFDLGYVQGMSDLLSPILYVIQNEVDAFWCFCGFMELVQGNFEESQETMKRQLGRLLLLLRVLDPLLCDFLDSQDSGSLCFCFRWLLIWFKREFPFPDVLRLWEVLWTGLPGPNLHLLVACAILDMERDTLMLSGFGSNEILKHINELTMKLSVEDVLTRAEALHRQLTACPELPHNVQEILGLAPPAEPHSPSPTASPLPLSPTRAPPTPPPSTDTAPQPDSSLEILPEEEDEGADS

SEQ ID NO: 24585 - protein, 46 aa, Artificial Sequence
  Synthetic polypeptide
FHFPGPQFPLWWSWGLGQPWSGALQLQRRSGHATWALKVACSRSLS

SEQ ID NO: 24586 - protein, 48 aa, Artificial Sequence
  Synthetic polypeptide
MLFLAVSPWAHDFISLGLSFLFGGAGASANRGAGPSSYRGGVGTPRGP

SEQ ID NO: 24587 - protein, 258 aa, Artificial Sequence
  Synthetic polypeptide
PCYFWPCLPGRMISFPWASVSSLVELGPRPTVERGPPVTEEEWARHVGPEGRLQQVPELKNRIFSGGLSPSLRREAWKFLLGYLSWEGTAEEHKAHIRKKTDEYFRMKLQWKSVSPEQERRNSLLHGYRSLIERDVSRTDRTNKFYEGPENPGLGLLNDILLTYCMYHFDLGYVQGMSDLLSPILYVIQNEVDAFWCFCGFMELVQGNFEESQETMKRQLGRLLLLLRVLDPLLCDFLGTVAHTCNPSTLGGQGGRIT

SEQ ID NO: 24588 - protein, 322 aa, Artificial Sequence
  Synthetic polypeptide
PCYFWPCLPGRMISFPWASVSSLVELGPRPTVERGPPVTEEEWARHVGPEGRLQQVPELKNRIFSGGLSPSLRREAWKFLLGYLSWEGTAEEHKAHIRKKTDEYFRMKLQWKSVSPEQERRNSLLHGYRSLIERDVSRTDRTNKFYEGPENPGLGLLNDILLTYCMYHFDLGYVQGMSDLLSPILYVIQNEVDAFWCFCGFMELVQGNFEESQETMKRQLGRLLLLLRVLDPLLCDFLDSQDSGSLCFCFRWLLIWFKREFPFPDVLRLWEVLWTGLPGPNLHLLVACAILDMERDTLMLSGFGSNEILKHEAQSGRSGGGG

SEQ ID NO: 24589 - protein, 99 aa, Artificial Sequence
  Synthetic polypeptide
DQAQWLTPVIPALWEAKAGGSLEIPRTPALSASVSGGCSSGSRGNSPSRMSFGCGRCCGQGSLAPICTCWWPAPSWTWRGTPSCCPASAPMRSSSTSTS

SEQ ID NO: 24590 - protein, 81 aa, Artificial Sequence
  Synthetic polypeptide
SQHFGRPRRADHLRFPGLRLSLLLFPVAAHLVQEGIPLPGCPSAVGGAVDRAPWPQSAPAGGLRHPGHGEGHPHAVRLRLQ

SEQ ID NO: 24591 - protein, 107 aa, Artificial Sequence
  Synthetic polypeptide
DQAQWLTPVIPALWEAKAGGSLEIPRTPALSASVSGGCSSGSRGNSPSRMSFGCGRCCGQGSLAPICTCWWPAPSWTWRGTPSCCPASAPMRSSSTKHRVGARAEVV

SEQ ID NO: 24592 - protein, 50 aa, Artificial Sequence
  Synthetic polypeptide
GRARGLMPGIPALWEAETPSPTESHGPIGPAPPRPRPHPPQPGGLPGLEG

SEQ ID NO: 24593 - protein, 73 aa, Artificial Sequence
  Synthetic polypeptide
AGRGGSCLESQHFGRPRHHLPPRVMAPLALHLLVLVPILLSLVASQDWKAERSQDPFEKCMQDPDYEQLLKVV

SEQ ID NO: 24594 - protein, 72 aa, Artificial Sequence
  Synthetic polypeptide
PGAGAHAWNPSTLGGRDTISHRESWPHWPCTSSSSSPSSSAWWPPRTGRLNAAKTPSRNACRILTMSSCSRW

SEQ ID NO: 24595 - protein, 960 aa, Artificial Sequence
  Synthetic polypeptide
DFISTQKKDVAQWNIGSLRTILDMVERECGTIIEGVNTPYLYFGMWKTTFAWHTEDMDLYSINYLHFGEPKSWYAIPPEHGKRLERLAIGFFPGSSQGCDAFLRHKMTLISPIILKKYGIPFSRITQEAGEFMITFPYGYHAGFNHGFNCAESTNFATLRWIDYGKVATQCTCRKDMVKISMDVFVRILQPERYELWKQGKDLTVLDHTRPTALTSPELSSWSASRASLKAKLLRRSHRKRSQPKKPKPEDPKFPGEGTAGAALLEEAGGSVKEEAGPEVDPEEEEEEPQPLPHGREAEGAEEDGRGKLRPTKAKSERKKKSFGLLPPQLPPPPAHFPSEEALWLPSPLEPPVLGPGPAAMEESPLPAPLNVVPPEVPSEELEAKPRPIIPMLYVVPRPGKAAFNQEHVSCQQAFEHFAQKGPTWKEPVSPMELTGPEDGAASSGAGRMETKARAGEGQAPSTFSKLKMEIKKSRRHPLGRPPTRSPLSVVKQEASSDEEASPFSGEEDVSDPDALRPLLSLQWKNRAASFQAERKFNAAAARTEPYCAICTLFYPYCQALQTEKEAPIASLGKGCPATLPSKSRQKTRPLIPEMCFTSGGENTEPLPANSYIGDDGTSPLIACGKCCLQVHASCYGIRPELVNEGWTCSRCAAHAWTAECCLCNLRGGALQMTTDRRWIHVICAIAVPEARFLNVIERHPVDISAIPEQRWKLKCVYCRKRMKKVSGACIQCSYEHCSTSFHVTCAHAAGVLMEPDDWPYVVSITCLKHKSGGHAVQLLRAVSLGQVVITKNRNGLYYRCRVIGAASQTCYEVNFDDGSYSDNLYPESITSRDCVQLGPPSEGELVELRWTDGNLYKAKFISSVTSHIYQVEFEDGSQLTVKRGDIFTLEEELPKRVRSRLSLSTGAPQEPAFSGEEAKAAKRPRVGTPLATEDSGRSQDYVAFVESLLQVQGRPGAPF

SEQ ID NO: 24596 - protein, 70 aa, Artificial Sequence
  Synthetic polypeptide
AGYGGSCLQPQRLEGPKWEGPLSPGVRDQPGQQSETSSLHRKKTWPSGTSGASGPSWTWWSASAAPSSRA

SEQ ID NO: 24597 - protein, 82 aa, Artificial Sequence
  Synthetic polypeptide
AQEFETSLGNRVRLHLYTEKRRGPVEHREPPDHPGHGGARVRHHHRGREHALPVLRHVEDHLRLAHRGHGPVQHQLPALWGA

SEQ ID NO: 24598 - protein, 312 aa, Artificial Sequence
  Synthetic polypeptide
DFISTQKKDVAQWNIGSLRTILDMVERECGTIIEGVNTPYLYFGMWKTTFAWHTEDMDLYSINYLHFGEPKSWYAIPPEHGKRLERLAIGFFPGSSQGCDAFLRHKMTLISPIILKKYGIPFSRITQEAGEFMITFPYGYHAGFNHGFNCAESTNFATLRWIDYGKVATQCTCRKDMVKISMDVFVRILQPERYELWKQGKDLTVLDHTRPTALTSPELSSWSASRASLKAKLLRRTPPCVSPHRPSQPGIWCPPGGEAKASAASWLLTTRGHGDTEAGPGLGGDPLHAQSEGQASCVSTSRLRMATQDPCR

SEQ ID NO: 24599 - protein, 994 aa, Artificial Sequence
  Synthetic polypeptide
DFISTQKKDVAQWNIGSLRTILDMVERECGTIIEGVNTPYLYFGMWKTTFAWHTEDMDLYSINYLHFGEPKSWYAIPPEHGKRLERLAIGFFPGSSQGCDAFLRHKMTLISPIILKKYGIPFSRITQEAGEFMITFPYGYHAGFNHGFNCAESTNFATLRWIDYGKVATQCTCRKDMVKISMDVFVRILQPERYELWKQGKDLTVLDHTRPTALTSPELSSWSASRASLKAKLLRRQISLKENRHWRKTEEERKPSLERKKEQTKRPGLSSHRKRSQPKKPKPEDPKFPGEGTAGAALLEEAGGSVKEEAGPEVDPEEEEEEPQPLPHGREAEGAEEDGRGKLRPTKAKSERKKKSFGLLPPQLPPPPAHFPSEEALWLPSPLEPPVLGPGPAAMEESPLPAPLNVVPPEVPSEELEAKPRPIIPMLYVVPRPGKAAFNQEHVSCQQAFEHFAQKGPTWKEPVSPMELTGPEDGAASSGAGRMETKARAGEGQAPSTFSKLKMEIKKSRRHPLGRPPTRSPLSVVKQEASSDEEASPFSGEEDVSDPDALRPLLSLQWKNRAASFQAERKFNAAAARTEPYCAICTLFYPYCQALQTEKEAPIASLGKGCPATLPSKSRQKTRPLIPEMCFTSGGENTEPLPANSYIGDDGTSPLIACGKCCLQVHASCYGIRPELVNEGWTCSRCAAHAWTAECCLCNLRGGALQMTTDRRWIHVICAIAVPEARFLNVIERHPVDISAIPEQRWKLKCVYCRKRMKKVSGACIQCSYEHCSTSFHVTCAHAAGVLMEPDDWPYVVSITCLKHKSGGHAVQLLRAVSLGQVVITKNRNGLYYRCRVIGAASQTCYEVNFDDGSYSDNLYPESITSRDCVQLGPPSEGELVELRWTDGNLYKAKFISSVTSHIYQVEFEDGSQLTVKRGDIFTLEEELPKRVRSRLSLSTGAPQEPAFSGEEAKAAKRPRVGTPLATEDSGRSQDYVAFVESLLQVQGRPGAPF

SEQ ID NO: 24600 - protein, 55 aa, Artificial Sequence
  Synthetic polypeptide
PDVLRPFLCGHQPVQAASHLHRSHCGDVPGQEAPRGATPRVRSDRGGLSEHAAGS

SEQ ID NO: 24601 - protein, 1869 aa, Artificial Sequence
  Synthetic polypeptide
QTYSGLFCVVINPYKQLPIYTEAIVEMYRGKKRHEVPPHVYAVTEGAYRSMLQDREDQSILCTGESGAGKTENTKKVIQYLAHVASSPKGRKEPGVPASVSTVSYGELERQLLQANPILEAFGNAKTVKNDNSSRFGKFIRINFDVAGYIVGANIETYLLEKSRAIRQAKDECSFHIFYQLLGGAGEQLKADLLLEPCSHYRFLTNGPSSSPGQERELFQETLESLRVLGFSHEEIISMLRMVSAVLQFGNIALKRERNTDQATMPDNTAAQKLCRLLGLGVTDFSRALLTPRIKVGRDYVQKAQTKEQADFALEALAKATYERLFRWLVLRLNRALDRSPRQGASFLGILDIAGFEIFQLNSFEQLCINYTNEKLQQLFNHTMFVLEQEEYQREGIPWTFLDFGLDLQPCIDLIERPANPPGLLALLDEECWFPKATDKSFVEKVAQEQGGHPKFQRPRHLRDQADFSVLHYAGKVDYKANEWLMKNMDPLNDNVAALLHQSTDRLTAEIWKDVEGIVGLEQVSSLGDGPPGGRPRRGMFRTVGQLYKESLSRLMATLSNTNPSFVRCIVPNHEKRAGKLEPRLVLDQLRCNGVLEGIRICRQGFPNRILFQEFRQRYEILTPNAIPKGFMDGKQACEKMIQALELDPNLYRVGQSKIFFRAGVLAQLEEERDLKVTDIIVSFQAAARGYLARRAFQKRQQQQSALRVMQRNCAAYLKLRHWQWWRLFTKVKPLLQVTRQDEVLQARAQELQKVQELQQQSAREVGELQGRVAQLEEERARLAEQLRAEAELCAEAEETRGRLAARKQELELVVSELEARVGEEEECSRQMQTEKKRLQQHIQELEAHLEAEEGARQKLQLEKVTTEAKMKKFEEDLLLLEDQNSKLSKERKLLEDRLAEFSSQAAEEEEKVKSLNKLRLKYEATIADMEDRLRKEEKGRQELEKLKRRLDGESSELQEQMVEQQQRAEELRAQLGRKEEELQAALARAEDEGGARAQLLKSLREAQAALAEAQEDLESERVARTKAEKQRRDLGEELEALRGELEDTLDSTNAQQELRSKREQEVTELKKTLEEETRIHEAAVQELRQRHGQALGELAEQLEQARRGKGAWEKTRLALEAEVSELRAELSSLQTARQEGEQRRRRLELQLQEVQGRAGDGERARAEAAEKLQRAQAELENVSGALNEAESKTIRLSKELSSTEAQLHDAQELLQEETRAKLALGSRVRAMEAEAAGLREQLEEEAAARERAGRELQTAQAQLSEWRRRQEEEAGALEAGEEARRRAAREAEALTQRLAEKTETVDRLERGRRRLQQELDDATMDLEQQRQLVSTLEKKQRKFDQLLAEEKAAVLRAVEERERAEAEGREREARALSLTRALEEEQEAREELERQNRALRAELEALLSSKDDVGKSVHELERACRVAEQAANDLRAQVTELEDELTAAEDAKLRLEVTVQALKTQHERDLQGRDEAGEERRRQLAKQLRDAEVERDEERKQRTLAVAARKKLEGELEELKAQMASAGQGKEEAVKQLRKMQAQMKELWREVEETRTSREEIFSQNRESEKRLKGLEAEVLRLQEELAASDRARRQAQQDRDEMADEVANGNLSKAAILEEKRQLEGRLGQLEEELEEEQSNSELLNDRYRKLLLQVESLTTELSAERSFSAKAESGRQQLERQIQELRGRLGEEDAGARARHKMTIAALESKLAQAEEQLEQETRERILSGKLVRRAEKRLKEVVLQVEEERRVADQLRDQLEKGNLRVKQLKRQLEEAEEEASRAQAGRRRLQRELEDVTESAESMNREVTTLRNRLRRGPLTFTTRTVRQVFRLEEGVASDEEAEEAQPGSGPSPEPEGSPPAHPQ

SEQ ID NO: 24602 - protein, 1894 aa, Artificial Sequence
  Synthetic polypeptide
QTYSGLFCVVINPYKQLPIYTEAIVEMYRGKKRHEVPPHVYAVTEGAYRSMLQDREDQSILCTGESGAGKTENTKKVIQYLAHVASSPKGRKEPGVPGELERQLLQANPILEAFGNAKTVKNDNSSRFGKFIRINFDVAGYIVGANIETYLLEKSRAIRQAKDECSFHIFYQLLGGAGEQLKADLLLEPCSHYRFLTNGPSSSPGQERELFQETLESLRVLGFSHEEIISMLRMVSAVLQFGNIALKRERNTDQATMPDNTAAQKLCRLLGLGVTDFSRALLTPRIKVGRDYVQKAQTKEQADFALEALAKATYERLFRWLVLRLNRALDRSPRQGASFLGILDIAGFEIFQLNSFEQLCINYTNEKLQQLFNHTMFVLEQEEYQREGIPWTFLDFGLDLQPCIDLIERPANPPGLLALLDEECWFPKATDKSFVEKVAQEQGGHPKFQRPRHLRDQADFSVLHYAGKVDYKANEWLMKNMDPLNDNVAALLHQSTDRLTAEIWKDEHGGFQQFSFLGSFPPSPPGSAERCSSAISPPGVEGIVGLEQVSSLGDGPPGGRPRRGMFRTVGQLYKESLSRLMATLSNTNPSFVRCIVPNHEKRAGKLEPRLVLDQLRCNGVLEGIRICRQGFPNRILFQEFRQRYEILTPNAIPKGFMDGKQACEKMIQALELDPNLYRVGQSKIFFRAGVLAQLEEERDLKVTDIIVSFQAAARGYLARRAFQKRQQQQSALRVMQRNCAAYLKLRHWQWWRLFTKVKPLLQVTRQDEVLQARAQELQKVQELQQQSAREVGELQGRVAQLEEERARLAEQLRAEAELCAEAEETRGRLAARKQELELVVSELEARVGEEEECSRQMQTEKKRLQQHIQELEAHLEAEEGARQKLQLEKVTTEAKMKKFEEDLLLLEDQNSKLSKERKLLEDRLAEFSSQAAEEEEKVKSLNKLRLKYEATIADMEDRLRKEEKGRQELEKLKRRLDGESSELQEQMVEQQQRAEELRAQLGRKEEELQAALARAEDEGGARAQLLKSLREAQAALAEAQEDLESERVARTKAEKQRRDLGEELEALRGELEDTLDSTNAQQELRSKREQEVTELKKTLEEETRIHEAAVQELRQRHGQALGELAEQLEQARRGKGAWEKTRLALEAEVSELRAELSSLQTARQEGEQRRRRLELQLQEVQGRAGDGERARAEAAEKLQRAQAELENVSGALNEAESKTIRLSKELSSTEAQLHDAQELLQEETRAKLALGSRVRAMEAEAAGLREQLEEEAAARERAGRELQTAQAQLSEWRRRQEEEAGALEAGEEARRRAAREAEALTQRLAEKTETVDRLERGRRRLQQELDDATMDLEQQRQLVSTLEKKQRKFDQLLAEEKAAVLRAVEERERAEAEGREREARALSLTRALEEEQEAREELERQNRALRAELEALLSSKDDVGKSVHELERACRVAEQAANDLRAQVTELEDELTAAEDAKLRLEVTVQALKTQHERDLQGRDEAGEERRRQLAKQLRDAEVERDEERKQRTLAVAARKKLEGELEELKAQMASAGQGKEEAVKQLRKMQAQMKELWREVEETRTSREEIFSQNRESEKRLKGLEAEVLRLQEELAASDRARRQAQQDRDEMADEVANGNLSKAAILEEKRQLEGRLGQLEEELEEEQSNSELLNDRYRKLLLQVESLTTELSAERSFSAKAESGRQQLERQIQELRGRLGEEDAGARARHKMTIAALESKLAQAEEQLEQETRERILSGKLVRRAEKRLKEVVLQVEEERRVADQLRDQLEKGNLRVKQLKRQLEEAEEEASRAQAGRRRLQRELEDVTESAESMNREVTTLRNRLRRGPLTFTTRTVRQVFRLEEGVASDEEAEEAQPGSGPSPEPEGSPPAHPQ

SEQ ID NO: 24603 - protein, 1902 aa, Artificial Sequence
  Synthetic polypeptide
QTYSGLFCVVINPYKQLPIYTEAIVEMYRGKKRHEVPPHVYAVTEGAYRSMLQDREDQSILCTGESGAGKTENTKKVIQYLAHVASSPKGRKEPGVPVSNPALGWGELERQLLQANPILEAFGNAKTVKNDNSSRFGKFIRINFDVAGYIVGANIETYLLEKSRAIRQAKDECSFHIFYQLLGGAGEQLKADLLLEPCSHYRFLTNGPSSSPGQERELFQETLESLRVLGFSHEEIISMLRMVSAVLQFGNIALKRERNTDQATMPDNTAAQKLCRLLGLGVTDFSRALLTPRIKVGRDYVQKAQTKEQADFALEALAKATYERLFRWLVLRLNRALDRSPRQGASFLGILDIAGFEIFQLNSFEQLCINYTNEKLQQLFNHTMFVLEQEEYQREGIPWTFLDFGLDLQPCIDLIERPANPPGLLALLDEECWFPKATDKSFVEKVAQEQGGHPKFQRPRHLRDQADFSVLHYAGKVDYKANEWLMKNMDPLNDNVAALLHQSTDRLTAEIWKDEHGGFQQFSFLGSFPPSPPGSAERCSSAISPPGVEGIVGLEQVSSLGDGPPGGRPRRGMFRTVGQLYKESLSRLMATLSNTNPSFVRCIVPNHEKRAGKLEPRLVLDQLRCNGVLEGIRICRQGFPNRILFQEFRQRYEILTPNAIPKGFMDGKQACEKMIQALELDPNLYRVGQSKIFFRAGVLAQLEEERDLKVTDIIVSFQAAARGYLARRAFQKRQQQQSALRVMQRNCAAYLKLRHWQWWRLFTKVKPLLQVTRQDEVLQARAQELQKVQELQQQSAREVGELQGRVAQLEEERARLAEQLRAEAELCAEAEETRGRLAARKQELELVVSELEARVGEEEECSRQMQTEKKRLQQHIQELEAHLEAEEGARQKLQLEKVTTEAKMKKFEEDLLLLEDQNSKLSKERKLLEDRLAEFSSQAAEEEEKVKSLNKLRLKYEATIADMEDRLRKEEKGRQELEKLKRRLDGESSELQEQMVEQQQRAEELRAQLGRKEEELQAALARAEDEGGARAQLLKSLREAQAALAEAQEDLESERVARTKAEKQRRDLGEELEALRGELEDTLDSTNAQQELRSKREQEVTELKKTLEEETRIHEAAVQELRQRHGQALGELAEQLEQARRGKGAWEKTRLALEAEVSELRAELSSLQTARQEGEQRRRRLELQLQEVQGRAGDGERARAEAAEKLQRAQAELENVSGALNEAESKTIRLSKELSSTEAQLHDAQELLQEETRAKLALGSRVRAMEAEAAGLREQLEEEAAARERAGRELQTAQAQLSEWRRRQEEEAGALEAGEEARRRAAREAEALTQRLAEKTETVDRLERGRRRLQQELDDATMDLEQQRQLVSTLEKKQRKFDQLLAEEKAAVLRAVEERERAEAEGREREARALSLTRALEEEQEAREELERQNRALRAELEALLSSKDDVGKSVHELERACRVAEQAANDLRAQVTELEDELTAAEDAKLRLEVTVQALKTQHERDLQGRDEAGEERRRQLAKQLRDAEVERDEERKQRTLAVAARKKLEGELEELKAQMASAGQGKEEAVKQLRKMQAQMKELWREVEETRTSREEIFSQNRESEKRLKGLEAEVLRLQEELAASDRARRQAQQDRDEMADEVANGNLSKAAILEEKRQLEGRLGQLEEELEEEQSNSELLNDRYRKLLLQVESLTTELSAERSFSAKAESGRQQLERQIQELRGRLGEEDAGARARHKMTIAALESKLAQAEEQLEQETRERILSGKLVRRAEKRLKEVVLQVEEERRVADQLRDQLEKGNLRVKQLKRQLEEAEEEASRAQAGRRRLQRELEDVTESAESMNREVTTLRNRLRRGPLTFTTRTVRQVFRLEEGVASDEEAEEAQPGSGPSPEPEGSPPAHPQ

SEQ ID NO: 24604 - protein, 868 aa, Artificial Sequence
  Synthetic polypeptide
QTYSGLFCVVINPYKQLPIYTEAIVEMYRGKKRHEVPPHVYAVTEGAYRSMLQDREDQSILCTGESGAGKTENTKKVIQYLAHVASSPKGRKEPGVPASVSTVSYGELERQLLQANPILEAFGNAKTVKNDNSSRFGKFIRINFDVAGYIVGANIETYLLEKSRAIRQAKDECSFHIFYQLLGGAGEQLKADLLLEPCSHYRFLTNGPSSSPGQERELFQETLESLRVLGFSHEEIISMLRMVSAVLQFGNIALKRERNTDQATMPDNTAAQKLCRLLGLGVTDFSRALLTPRIKVGRDYVQKAQTKEQADFALEALAKATYERLFRWLVLRLNRALDRSPRQGASFLGILDIAGFEIFQLNSFEQLCINYTNEKLQQLFNHTMFVLEQEEYQREGIPWTFLDFGLDLQPCIDLIERPANPPGLLALLDEECWFPKATDKSFVEKVAQEQGGHPKFQRPRHLRDQADFSVLHYAGKVDYKANEWLMKNMDPLNDNVAALLHQSTDRLTAEIWKDVEGIVGLEQVSSLGDGPPGGRPRRGMFRTVGQLYKESLSRLMATLSNTNPSFVRCIVPNHEKRAGKLEPRLVLDQLRCNGVLEGIRICRQGFPNRILFQEFRQRYEILTPNAIPKGFMDGKQACEKMIQALELDPNLYRVGQSKIFFRAGVLAQLEEERDLKVTDIIVSFQAAARGYLARRAFQKRQQQQSALRVMQRNCAAYLKLRHWQWWRLFTKVKPLLQVTRQDEVLQARAQELQKVQELQQQSAREVGELQGRVAQLEEERARLAEQLRAEAELCAEAEETRGRLAARKQELELVVSELEARVGEEEECSRQMQTEKKRLQQHIQELEAHLEAEEGARQKLQLEKVTTE

SEQ ID NO: 24605 - protein, 1902 aa, Artificial Sequence
  Synthetic polypeptide
QTYSGLFCVVINPYKQLPIYTEAIVEMYRGKKRHEVPPHVYAVTEGAYRSMLQDREDQSILCTGESGAGKTENTKKVIQYLAHVASSPKGRKEPGVPASVSTVSYGELERQLLQANPILEAFGNAKTVKNDNSSRFGKFIRINFDVAGYIVGANIETYLLEKSRAIRQAKDECSFHIFYQLLGGAGEQLKADLLLEPCSHYRFLTNGPSSSPGQERELFQETLESLRVLGFSHEEIISMLRMVSAVLQFGNIALKRERNTDQATMPDNTAAQKLCRLLGLGVTDFSRALLTPRIKVGRDYVQKAQTKEQADFALEALAKATYERLFRWLVLRLNRALDRSPRQGASFLGILDIAGFEIFQLNSFEQLCINYTNEKLQQLFNHTMFVLEQEEYQREGIPWTFLDFGLDLQPCIDLIERPANPPGLLALLDEECWFPKATDKSFVEKVAQEQGGHPKFQRPRHLRDQADFSVLHYAGKVDYKANEWLMKNMDPLNDNVAALLHQSTDRLTAEIWKDEHGGFQQFSFLGSFPPSPPGSAERCSSAISPPGVEGIVGLEQVSSLGDGPPGGRPRRGMFRTVGQLYKESLSRLMATLSNTNPSFVRCIVPNHEKRAGKLEPRLVLDQLRCNGVLEGIRICRQGFPNRILFQEFRQRYEILTPNAIPKGFMDGKQACEKMIQALELDPNLYRVGQSKIFFRAGVLAQLEEERDLKVTDIIVSFQAAARGYLARRAFQKRQQQQSALRVMQRNCAAYLKLRHWQWWRLFTKVKPLLQVTRQDEVLQARAQELQKVQELQQQSAREVGELQGRVAQLEEERARLAEQLRAEAELCAEAEETRGRLAARKQELELVVSELEARVGEEEECSRQMQTEKKRLQQHIQELEAHLEAEEGARQKLQLEKVTTEAKMKKFEEDLLLLEDQNSKLSKERKLLEDRLAEFSSQAAEEEEKVKSLNKLRLKYEATIADMEDRLRKEEKGRQELEKLKRRLDGESSELQEQMVEQQQRAEELRAQLGRKEEELQAALARAEDEGGARAQLLKSLREAQAALAEAQEDLESERVARTKAEKQRRDLGEELEALRGELEDTLDSTNAQQELRSKREQEVTELKKTLEEETRIHEAAVQELRQRHGQALGELAEQLEQARRGKGAWEKTRLALEAEVSELRAELSSLQTARQEGEQRRRRLELQLQEVQGRAGDGERARAEAAEKLQRAQAELENVSGALNEAESKTIRLSKELSSTEAQLHDAQELLQEETRAKLALGSRVRAMEAEAAGLREQLEEEAAARERAGRELQTAQAQLSEWRRRQEEEAGALEAGEEARRRAAREAEALTQRLAEKTETVDRLERGRRRLQQELDDATMDLEQQRQLVSTLEKKQRKFDQLLAEEKAAVLRAVEERERAEAEGREREARALSLTRALEEEQEAREELERQNRALRAELEALLSSKDDVGKSVHELERACRVAEQAANDLRAQVTELEDELTAAEDAKLRLEVTVQALKTQHERDLQGRDEAGEERRRQLAKQLRDAEVERDEERKQRTLAVAARKKLEGELEELKAQMASAGQGKEEAVKQLRKMQAQMKELWREVEETRTSREEIFSQNRESEKRLKGLEAEVLRLQEELAASDRARRQAQQDRDEMADEVANGNLSKAAILEEKRQLEGRLGQLEEELEEEQSNSELLNDRYRKLLLQVESLTTELSAERSFSAKAESGRQQLERQIQELRGRLGEEDAGARARHKMTIAALESKLAQAEEQLEQETRERILSGKLVRRAEKRLKEVVLQVEEERRVADQLRDQLEKGNLRVKQLKRQLEEAEEEASRAQAGRRRLQRELEDVTESAESMNREVTTLRNRLRRGPLTFTTRTVRQVFRLEEGVASDEEAEEAQPGSGPSPEPEGSPPAHPQ

SEQ ID NO: 24606 - protein, 1861 aa, Artificial Sequence
  Synthetic polypeptide
QTYSGLFCVVINPYKQLPIYTEAIVEMYRGKKRHEVPPHVYAVTEGAYRSMLQDREDQSILCTGESGAGKTENTKKVIQYLAHVASSPKGRKEPGVPGELERQLLQANPILEAFGNAKTVKNDNSSRFGKFIRINFDVAGYIVGANIETYLLEKSRAIRQAKDECSFHIFYQLLGGAGEQLKADLLLEPCSHYRFLTNGPSSSPGQERELFQETLESLRVLGFSHEEIISMLRMVSAVLQFGNIALKRERNTDQATMPDNTAAQKLCRLLGLGVTDFSRALLTPRIKVGRDYVQKAQTKEQADFALEALAKATYERLFRWLVLRLNRALDRSPRQGASFLGILDIAGFEIFQLNSFEQLCINYTNEKLQQLFNHTMFVLEQEEYQREGIPWTFLDFGLDLQPCIDLIERPANPPGLLALLDEECWFPKATDKSFVEKVAQEQGGHPKFQRPRHLRDQADFSVLHYAGKVDYKANEWLMKNMDPLNDNVAALLHQSTDRLTAEIWKDVEGIVGLEQVSSLGDGPPGGRPRRGMFRTVGQLYKESLSRLMATLSNTNPSFVRCIVPNHEKRAGKLEPRLVLDQLRCNGVLEGIRICRQGFPNRILFQEFRQRYEILTPNAIPKGFMDGKQACEKMIQALELDPNLYRVGQSKIFFRAGVLAQLEEERDLKVTDIIVSFQAAARGYLARRAFQKRQQQQSALRVMQRNCAAYLKLRHWQWWRLFTKVKPLLQVTRQDEVLQARAQELQKVQELQQQSAREVGELQGRVAQLEEERARLAEQLRAEAELCAEAEETRGRLAARKQELELVVSELEARVGEEEECSRQMQTEKKRLQQHIQELEAHLEAEEGARQKLQLEKVTTEAKMKKFEEDLLLLEDQNSKLSKERKLLEDRLAEFSSQAAEEEEKVKSLNKLRLKYEATIADMEDRLRKEEKGRQELEKLKRRLDGESSELQEQMVEQQQRAEELRAQLGRKEEELQAALARAEDEGGARAQLLKSLREAQAALAEAQEDLESERVARTKAEKQRRDLGEELEALRGELEDTLDSTNAQQELRSKREQEVTELKKTLEEETRIHEAAVQELRQRHGQALGELAEQLEQARRGKGAWEKTRLALEAEVSELRAELSSLQTARQEGEQRRRRLELQLQEVQGRAGDGERARAEAAEKLQRAQAELENVSGALNEAESKTIRLSKELSSTEAQLHDAQELLQEETRAKLALGSRVRAMEAEAAGLREQLEEEAAARERAGRELQTAQAQLSEWRRRQEEEAGALEAGEEARRRAAREAEALTQRLAEKTETVDRLERGRRRLQQELDDATMDLEQQRQLVSTLEKKQRKFDQLLAEEKAAVLRAVEERERAEAEGREREARALSLTRALEEEQEAREELERQNRALRAELEALLSSKDDVGKSVHELERACRVAEQAANDLRAQVTELEDELTAAEDAKLRLEVTVQALKTQHERDLQGRDEAGEERRRQLAKQLRDAEVERDEERKQRTLAVAARKKLEGELEELKAQMASAGQGKEEAVKQLRKMQAQMKELWREVEETRTSREEIFSQNRESEKRLKGLEAEVLRLQEELAASDRARRQAQQDRDEMADEVANGNLSKAAILEEKRQLEGRLGQLEEELEEEQSNSELLNDRYRKLLLQVESLTTELSAERSFSAKAESGRQQLERQIQELRGRLGEEDAGARARHKMTIAALESKLAQAEEQLEQETRERILSGKLVRRAEKRLKEVVLQVEEERRVADQLRDQLEKGNLRVKQLKRQLEEAEEEASRAQAGRRRLQRELEDVTESAESMNREVTTLRNRLRRGPLTFTTRTVRQVFRLEEGVASDEEAEEAQPGSGPSPEPEGSPPAHPQ

SEQ ID NO: 24607 - protein, 26 aa, Artificial Sequence
  Synthetic polypeptide
VKQWKESAWAAVGSGPASATLQPMRP

SEQ ID NO: 24608 - protein, 55 aa, Artificial Sequence
  Synthetic polypeptide
EAVERVGLGSCGFRPCLCHSAAYETLRARWLTHRTSSRTCCATASISPSWSSPRS

SEQ ID NO: 24609 - protein, 37 aa, Artificial Sequence
  Synthetic polypeptide
MGSSQIRTTCWLCDLGDSQEAAPVPVPAGATDARGHA

SEQ ID NO: 24610 - protein, 114 aa, Artificial Sequence
  Synthetic polypeptide
WAAPRSAPPAGCVTLGTRKKLRLYQFLLGLLTRGDMRECVWWVEPGAGVFQFSSKHKELLARRWGQQKGNRKRMTYQKLARALRNYAKTGEIRKVKRKLTYQFDSALLPAVRRA

SEQ ID NO: 24611 - protein, 17 aa, Artificial Sequence
  Synthetic polypeptide
PWGLARSCACTSSCWGY

SEQ ID NO: 24612 - protein, 31 aa, Artificial Sequence
  Synthetic polypeptide
MGSSQIRTTCWLCDLGDSQEAAPVPVPAGAT

SEQ ID NO: 24613 - protein, 31 aa, Artificial Sequence
  Synthetic polypeptide
WAAPRSAPPAGCVTLGTRKKLRLYQFLLGLL

SEQ ID NO: 24614 - protein, 260 aa, Artificial Sequence
  Synthetic polypeptide
PGSATSCVSLGKLFNLSVLIIIVTCIRAVVGIKLRCNHVKHLEQCLAHVSINSPTTPSPHSSPSLSAACFRTGPNHLCRHSPPEQGSPLQPLRPQGPPHPQPPPPPRPPATSRAWSSRCGPLCSAGPPAPRCCPPRSTRSALRPGPRPCPSCLPDPSTQASLTSVAPQLEGQEARLTPSPQSLCRHTRGYPGGSGEPCQGPRAPSHRPACSRCPRTSRLALNLWGSGPSSTWLIGWSGWVWRSTEPSSWTTRSMAPTCPP

SEQ ID NO: 24615 - protein, 112 aa, Artificial Sequence
  Synthetic polypeptide
ASTLRRLPVLTPLQACQQPVSELAQTTSAATPHRNRGLPYSRCGPRGHLTLSLLLLHVHPPPPGRGVRDAAPSAPPGPQPLAAARLGAQGQPCAQALVPAHPAFRTPLPRPL

SEQ ID NO: 24616 - protein, 257 aa, Artificial Sequence
  Synthetic polypeptide
TEMQSCKALRTMPGTREHQLSDDSQSSLLSKPVSSLFQNWPKPPLPPLPTGTGVSPTAAAAPGATSPSASSSSTSTRHLQGVEFEMRPPLLRRAPSPSLLPASEHKVSPAPRPSSLPILPSGPLYPGLFDIRGSPTGGAGGSADPFAPVFVPPHPGISGGLGGALSGASRSLSPTRLLSLPPDKPFGAKPLGFWTKFDVADWLEWLGLAEHRAQFLDHEIDGSHLPALTKEDYVDLGVTRVGHRMNIDRALKFFLER

SEQ ID NO: 24617 - protein, 25 aa, Artificial Sequence
  Synthetic polypeptide
SQHLGRPKQEDHLGSGVRDQPDQHG

SEQ ID NO: 24618 - protein, 82 aa, Artificial Sequence
  Synthetic polypeptide
GTVAHACNPSTLGGRSRRITWGQEFETSLINMGDSGGPLVCGDHLRGLVSWGNIPCGSKEKPGVYTNVCRYTNWIQKTIQAK

SEQ ID NO: 24619 - protein, 53 aa, Artificial Sequence
  Synthetic polypeptide
STWVILGVRWYVETTSEALCHGVTSPVDQRRSQESTPTSADTRTGSKKPFRPS

SEQ ID NO: 24620 - protein, 57 aa, Artificial Sequence
  Synthetic polypeptide
STWVILGVRWYVETTSEALCHGVTSPVDQRRSQESTPTSADTRTGSKKPFRPSDPDM

SEQ ID NO: 24621 - protein, 25 aa, Artificial Sequence
  Synthetic polypeptide
SQHLGRPKQEDHLGSGVRDQPDQHG

SEQ ID NO: 24622 - protein, 53 aa, Artificial Sequence; identical to SEQ ID NO: 24619
  Synthetic polypeptide

SEQ ID NO: 24623 - protein, 57 aa, Artificial Sequence; identical to SEQ ID NO: 24620
  Synthetic polypeptide

SEQ ID NO: 24624 - protein, 94 aa, Artificial Sequence
  Synthetic polypeptide
NPISTKNTKIRMGTVAHACNPSTLGGRSRRITWGQEFETSLINMGDSGGPLVCGDHLRGLVSWGNIPCGSKEKPGVYTNVCRYTNWIQKTIQAK

SEQ ID NO: 24625 - protein, 89 aa, Artificial Sequence
  Synthetic polypeptide
GRAQCFTPAIPAPLEAKAGGSRGQEIETILANMKHQKKSKLHGPTETSSCSGAAPTVEMDEELHYASLNFHGMNPSKDTSTEYSEVRTQ

SEQ ID NO: 24626 - protein, 13 aa, Artificial Sequence
  Synthetic polypeptide
HETPEEVQVTWPH

SEQ ID NO: 24627 - protein, 102 aa, Artificial Sequence
  Synthetic polypeptide
AVISPLHSRLGNRCWAAQPCRCSRPPRAACWHAGSPRLAPRRTRCWATACSLAVRTRRPWPPWSSRPPRTATRHQACTRGPRMCSGLRPGAAAAWARRQPRS

SEQ ID NO: 24628 - protein, 51 aa, Artificial Sequence
  Synthetic polypeptide
SHHCTPGWATDAGPPNPVGAADPRGQPAGTLGAPGWHRGGPGAGLPPAVWP

SEQ ID NO: 24629 - protein, 1122 aa, Artificial Sequence
  Synthetic polypeptide
AQEFEAAVSRDLTIALQAGQQMLGRPTLSVQQTPEGSLLARWEPPAGTAEDQVLGYRLQFGREDSTPLATLEFPPSEDRYTASGVHKGATYVFRLAARSRGGLGEEAAEVLSIPEDTPRGHPQILEAAGNASAGTVLLRWLPPVPAERNGAIVKYTVAVREAGALGPARETELPAAAEPGAENALTLQGLKPDTAYDLQVRAHTRRGPGPFSPPVRYRTFLRDQVSPKNFKVKMIMKTSVLLSWEFPDNYNSPTPYKIQYNGLTLDVDGRTTKKLITHLKPHTFYNFVLTNRGSSLGGLQQTVTAWTAFNLLNGKPSVAPKPDADGFIMVYLPDGQSPVPVQSYFIVMVPLRKSRGGQFLTPLGSPEDMDLEELIQDISRLQRRSLRHSRQLEVPRPYIAARFSVLPPTFHPGDQKQYGGFDNRGLEPGHRYVLFVLAVLQKSEPTFAASPFSDPFQLDNPDPQPIVDGEEGLIWVIGPVLAVVFIICIVIAILLYKNKPDSKRKDSEPRTKCLLNNADLAPHHPKDPVEMRRINFQTPGMLSHPPIPIADMAEHTERLKANDSLKLSQEYESIDPGQQFTWEHSNLEVNKPKNRYANVIAYDHSRVILQPIEGIMGSDYINANYVDGYRCQNAYIATQGPLPETFGDFWRMVWEQRSATIVMMTRLEEKSRIKCDQYWPNRGTETYGFIQVTLLDTIELATFCVRTFSLHKNGSSEKREVRQFQFTAWPDHGVPEYPTPFLAFLRRVKTCNPPDAGPIVVHCSAGVGRTGCFIVIDAMLERIKPEKTVDVYGHVTLMRSQRNYMVQTEDQYSFIHEALLEAVGCGNTEVPARSLYAYIQKLAQVEPGEHVTGMELEFKRLANSKAHTSRFISANLPCNKFKNRLVNIMPYESTRVCLQPIRGVEGSDYINASFIDGYRQQKAYIATQGPLAETTEDFWRMLWENNSTIVVMLTKLREMGREKCHQYWPAERSARYQYFVVDPMAEYNMPQYILREFKVTDARDGQSRTVRQFQFTDWPEQGVPKSGEGFIDFIGQVHKTKEQFGQDGPISVHCSAGVGRTGVFITLSIVLERMRYEGVVDIFQTVKMLRTQRPAMVQTEDEYQFCYQAALEYLGSFDHYAT

SEQ ID NO: 24630 - protein, 1138 aa, Artificial Sequence
  Synthetic polypeptide
AQEFEAAVSRDLTIALQAGQQMLGRPTLSVQQTPEGSLLARWEPPAGTAEDQVLGYRLQFGREDSTPLATLEFPPSEDRYTASGVHKGATYVFRLAARSRGGLGEEAAEVLSIPEDTPRGHPQILEAAGNASAGTVLLRWLPPVPAERNGAIVKYTVAVREAGALGPARETELPAAAEPGAENALTLQGLKPDTAYDLQVRAHTRRGPGPFSPPVRYRTFLRDQVSPKNFKVKMIMKTSVLLSWEFPDNYNSPTPYKIQYNGLTLDVDGRTTKKLITHLKPHTFYNFVLTNRGSSLGGLQQTVTAWTAFNLLNGKPSVAPKPDADGFIMVYLPDGQSPVPVQSYFIVMVPLRKSRGGQFLTPLGSPEDMDLEELIQDISRLQRRSLRHSRQLEVPRPYIAARFSVLPPTFHPGDQKQYGGFDNRGLEPGHRYVLFVLAVLQKSEPTFAASPFSDPFQLDNPDPQPIVDGEEGLIWVIGPVLAVVFIICIVIAILLYKNKPDSKRKDSEPRTKCLLNNADLAPHHPKDPVEMRRINFQTPDSGLRSPLREPGFHFESMLSHPPIPIADMAEHTERLKANDSLKLSQEYESIDPGQQFTWEHSNLEVNKPKNRYANVIAYDHSRVILQPIEGIMGSDYINANYVDGYRCQNAYIATQGPLPETFGDFWRMVWEQRSATIVMMTRLEEKSRIKCDQYWPNRGTETYGFIQVTLLDTIELATFCVRTFSLHKNGSSEKREVRQFQFTAWPDHGVPEYPTPFLAFLRRVKTCNPPDAGPIVVHCSAGVGRTGCFIVIDAMLERIKPEKTVDVYGHVTLMRSQRNYMVQTEDQYSFIHEALLEAVGCGNTEVPARSLYAYIQKLAQVEPGEHVTGMELEFKRLANSKAHTSRFISANLPCNKFKNRLVNIMPYESTRVCLQPIRGVEGSDYINASFIDGYRQQKAYIATQGPLAETTEDFWRMLWENNSTIVVMLTKLREMGREKCHQYWPAERSARYQYFVVDPMAEYNMPQYILREFKVTDARDGQSRTVRQFQFTDWPEQGVPKSGEGFIDFIGQVHKTKEQFGQDGPISVHCSAGVGRTGVFITLSIVLERMRYEGVVDIFQTVKMLRTQRPAMVQTEDEYQFCYQAALEYLGSFDHYAT

SEQ ID NO: 24631 - protein, 1138 aa, Artificial Sequence
  Synthetic polypeptide
AQEFEAAVSRDLTIALQAGQQMLGRPTLSVQQTPEGSLLARWEPPAGTAEDQVLGYRLQFGREDSTPLATLEFPPSEDRYTASGVHKGATYVFRLAARSRGGLGEEAAEVLSIPEDTPRGHPQILEAAGNASAGTVLLRWLPPVPAERNGAIVKYTVAVREAGALGPARETELPAAAEPGAENALTLQGLKPDTAYDLQVRAHTRRGPGPFSPPVRYRTFLRDQVSPKNFKVKMIMKTSVLLSWEFPDNYNSPTPYKIQYNGLTLDVDGRTTKKLITHLKPHTFYNFVLTNRGSSLGGLQQTVTAWTAFNLLNGKPSVAPKPDADGFIMVYLPDGQSPVPVQSYFIVMVPLRKSRGGQFLTPLGSPEDMDLEELIQDISRLQRRSLRHSRQLEVPRPYIAARFSVLPPTFHPGDQKQYGGFDNRGLEPGHRYVLFVLAVLQKSEPTFAASPFSDPFQLDNPDPQPIVDGEEGLIWVIGPVLAVVFIICIVIAILLYKKKPHSKRKDSEPRTKCLLNNADLAPHHPKDPVEMRRINFQTPDSGLRSPLREPGFHFESMLSHPPIPIADMAEHTERLKANDSLKLSQEYESIDPGQQFTWEHSNLEVNKPKNRYANVIAYDHSRVILQPIEGIMGSDYINANYVDGYRCQNAYIATQGPLPETFGDFWRMVWEQRSATIVMMTRLEEKSRIKCDQYWPNRGTETYGFIQVTLLDTIELATFCVRTFSLHKNGSSEKREVRQFQFTAWPDHGVPEYPTPFLAFLRRVKTCNPPDAGPIVVHCSAGVGRTGCFIVIDAMLERIKPEKTVDVYGHVTLMRSQRNYMVQTEDQYSFIHEALLEAVGCGNTEVPARSLYAYIQKLAQVEPGEHVTGMELEFKRLANSKAHTSRFISANLPCNKFKNRLVNIMPYESTRVCLQPIRGVEGSDYINASFIDGYRQQKAYIATQGPLAETTEDFWRMLWENNSTIVVMLTKLREMGREKCHQYWPAERSARYQYFVVDPMAEYNMPQYILREFKVTDARDGQSRTVRQFQFTDWPEQGVPKSGEGFIDFIGQVHKTKEQFGQDGPISVHCSAGVGRTGVFITLSIVLERMRYEGVVDIFQTVKMLRTQRPAMVQTEDEYQFCYQAALEYLGSFDHYAT

SEQ ID NO: 24632 - protein, 622 aa, Artificial Sequence
  Synthetic polypeptide
AKTHTFGVRNESLTLEDVAVEFTWEEWQLLGPAQKDLYRDVMLENYSNLVSVGYQASKPDALFKLEQGEPWTVENEIHSQICPEIKKVDNHLQMHSQKQRCLKRVEQCHKHNAFGNIIHQRKSDFPLRQNHDTFDLHGKILKSNLSLVNQNKRYEIKNSVGVNGDGKSFLHAKHEQFHNEMNFPEGGNSVNTNSQFIKHQRTQNIDKPHVCTECGKAFLKKSRLIYHQRVHTGEKPHGCSICGKAFSRKSGLTEHQRNHTGEKPYECTECDKAFRWKSQLNAHQKIHTGEKSYICSDCGKGFIKKSRLINHQRVHTGEKPHGCSLCGKAFSKRSRLTEHQRTHTGEKPYECTECDKAFRWKSQLNAHQKAHTGEKSYICRDCGKGFIQKGNLIVHQRIHTGEKPYICNECGKGFIQKGNLLIHRRTHTGEKPYVCNECGKGFSQKTCLISHQRFHTGKTPFVCTECGKSCSHKSGLINHQRIHTGEKPYTCSDCGKAFRDKSCLNRHRRTHTGERPYGCSDCGKAFSHLSCLVYHKGMLHAREKCVGSVKLENPCSESHSLSHTRDLIQDKDSVNMVTLQMPSVAAQTSLTNSAFQAESKVAIVSQPVARSSVSADSRICTE

SEQ ID NO: 24633 - protein, 14 aa, Artificial Sequence
  Synthetic polypeptide
CEQKPTHLVSEMNH

SEQ ID NO: 24634 - protein, 99 aa, Artificial Sequence
  Synthetic polypeptide
AKTHTFGVRNESLTLEDVAVEFTWEEWQLLGPAQKDLYRDVMLENYSNLVSVGYQASKPDALFKLEQGEPWTVENEIHSQICPEIKKVDNHLQMHSQKQ

SEQ ID NO: 24635 - protein, 31 aa, Artificial Sequence
  Synthetic polypeptide
SPTPAPYLAHGDHSTYGKLIMCWSACRVKAW

SEQ ID NO: 24636 - protein, 18 aa, Artificial Sequence
  Synthetic polypeptide
PQHQHHTWHTVIIQHMES

SEQ ID NO: 24637 - protein, 455 aa, Artificial Sequence
  Synthetic polypeptide
SFNIWKVDHVLERLQSESLVNRRKPCHEHDAFENIVHCSKSQFLLGQNHDIFDLRGKSLKSNLTLVNQSKGYEIKNSVEFTGNGDSFLHANHERLHTAIKFPASQKLISTKSQFISPKHQKTRKLEKHHVCSECGKAFIKKSWLTDHQVMHTGEKPHRCSLCEKAFSRKFMLTEHQRTHTGEKPYECPECGKAFLKKSRLNIHQKTHTGEKPYICSECGKGFIQKGNLIVHQRIHTGEKPYICNECGKGFIQKTCLIAHQRFHTGKTPFVCSECGKSCSQKSGLIKHQRIHTGEKPFECSECGKAFSTKQKLIVHQRTHTGERPYGCNECGKAFAYMSCLVKHKRIHTREKQEAAKVENPPAERHSSLHTSDVMQEKNSANGATTQVPSVAPQTSLNISGLLANRNVVLVGQPVVRCAASGDNRGFAQDRNLVNAVNVVVPSVINYVLFYVTENP

SEQ ID NO: 24638 - protein, 122 aa, Artificial Sequence
  Synthetic polypeptide
SFNIWKVDHVLERLQSESLVNRRKPCHEHDAFENIVHCSKSQFLLGQNHDIFDLRGKSLKSNLTLVNQSKGYEIKNSVEFTGNGDSFLHANHERLHTAIKFPASQKLISTKSQFISPKHQKT

SEQ ID NO: 24639 - protein, 463 aa, Artificial Sequence
  Synthetic polypeptide
SPTPAPYLAHDIWKVDHVLERLQSESLVNRRKPCHEHDAFENIVHCSKSQFLLGQNHDIFDLRGKSLKSNLTLVNQSKGYEIKNSVEFTGNGDSFLHANHERLHTAIKFPASQKLISTKSQFISPKHQKTRKLEKHHVCSECGKAFIKKSWLTDHQVMHTGEKPHRCSLCEKAFSRKFMLTEHQRTHTGEKPYECPECGKAFLKKSRLNIHQKTHTGEKPYICSECGKGFIQKGNLIVHQRIHTGEKPYICNECGKGFIQKTCLIAHQRFHTGKTPFVCSECGKSCSQKSGLIKHQRIHTGEKPFECSECGKAFSTKQKLIVHQRTHTGERPYGCNECGKAFAYMSCLVKHKRIHTREKQEAAKVENPPAERHSSLHTSDVMQEKNSANGATTQVPSVAPQTSLNISGLLANRNVVLVGQPVVRCAASGDNRGFAQDRNLVNAVNVVVPSVINYVLFYVTENP

SEQ ID NO: 24640 - protein, 27 aa, Artificial Sequence
  Synthetic polypeptide
PQHQHHTWHTTYGKLIMCWSACRVKAW

SEQ ID NO: 24641 - protein, 14 aa, Artificial Sequence
  Synthetic polypeptide
PNTSTIPGTRHMES

SEQ ID NO: 24642 - protein, 130 aa, Artificial Sequence
  Synthetic polypeptide
SPTPAPYLAHDIWKVDHVLERLQSESLVNRRKPCHEHDAFENIVHCSKSQFLLGQNHDIFDLRGKSLKSNLTLVNQSKGYEIKNSVEFTGNGDSFLHANHERLHTAIKFPASQKLISTKSQFISPKHQKT

SEQ ID NO: 24643 - protein, 226 aa, Artificial Sequence
  Synthetic polypeptide
SQHFGRPRQEDLLRPGLQDQPGQHNKTLSLQKLESLTLEDVAVEFSWEEWQLLDTAQKNLYRDVMVENYNHLVSLGYQTSKPDVLSKLAHGQEPWTTDAKIQNKNCPGIGKVDSHLQEHSPNQRLLKSVQQCNGQNTLRNIVHLSKTHFPIVQNHDTFDLYRKNLKSSLSLINQKRRHGINNPVEFIGETGSLERPRQADHLRSEVQDQPGQRGETLCLLKIHTKN

SEQ ID NO: 24644 - protein, 22 aa, Artificial Sequence
  Synthetic polypeptide
GQDFKTSLVNITRPCHYKNWNH

SEQ ID NO: 24645 - protein, 44 aa, Artificial Sequence
  Synthetic polypeptide
QDPVTTKIGITDPGGCGCGIQLGGVAAPGHCSEEPVPGCDGGEL

SEQ ID NO: 24646 - protein, 613 aa, Artificial Sequence
  Synthetic polypeptide
SQHFGRPRQEDLLRPGLQDQPGQHNKTLSLQKLESLTLEDVAVEFSWEEWQLLDTAQKNLYRDVMVENYNHLVSLGYQTSKPDVLSKLAHGQEPWTTDAKIQNKNCPGIGKVDSHLQEHSPNQRLLKSVQQCNGQNTLRNIVHLSKTHFPIVQNHDTFDLYRKNLKSSLSLINQKRRHGINNPVEFIGGEKTLLHGKHERTHTKTRFSENAKCIHTKFQVFKHQRTQKIEKPHACIECEQTFLRKSQLIYHENICIQENPGSGQCEKLSRSVLFTKHLKTNTTDKICIPNEYRKGSTVKSSLITHQQTHTEEKSYMCSECGKGFTMKRYLIAHQRTHSGEKPYVCKECGKGFTVKSNLIVHQRTHTGEKPYICSECGKGFTMKRYLVVHQRTHTGEKPYMCSECGKGFTVKSNLIVHQRSHTGEKSYICSECGKGFTVKRTLVIHQRTHTGEKSYICNECGKGFTTKRTLIIHQRTHTGEKPYECNECGKAFSQKICLIQHERCHTGKTPFVCTECGKSYSHKYGLITHQRIHTGEKPYECNECGKAFTTKSVLNVHQRTHTGERPYGCSDCEKAFSHLSNLVKHKKMHTREMGRISQVENSCNGESQLLPYK

SEQ ID NO: 24647 - protein, 108 aa, Artificial Sequence
  Synthetic polypeptide
SQHFGRPRQEDLLRPGLQDQPGQHNKTLSLQKLESLTLEDVAVEFSWEEWQLLDTAQKNLYRDVMVENYNHLVSLGYQTSKPDVLSKLAHGQEPWTTDAKIQNKNCPD

SEQ ID NO: 24648 - protein, 67 aa, Artificial Sequence
  Synthetic polypeptide
SQHFGRPRQEDLLRPGLQDQPGQHNKTLSLQKLESLTLEDVAVEFSWEEWQLLDTAQKNLYRDVMVE

SEQ ID NO: 24649 - protein, 42 aa, Artificial Sequence
  Synthetic polypeptide
QDPVTTKIGITDPGGCGCGIQLGGVAAPGHCSEEPVPGCDGG

SEQ ID NO: 24650 - protein, 206 aa, Artificial Sequence
  Synthetic polypeptide
AMFAPPHSNLGDKESLTLEDVAVEFSWEEWQLLDTAQKNLYRDVMVENYNHLVSLGYQTSKPDVLSKLAHGQEPWTTDAKIQNKNCPGIGKVDSHLQEHSPNQRLLKSVQQCNGQNTLRNIVHLSKTHFPIVQNHDTFDLYRKNLKSSLSLINQKRRHGINNPVEFIGETGSLERPRQADHLRSEVQDQPGQRGETLCLLKIHTKN

SEQ ID NO: 24651 - protein, 24 aa, Artificial Sequence
  Synthetic polypeptide
SSGGRGYSEPCLHHRTPTWVTKNH

SEQ ID NO: 24652 - protein, 37 aa, Artificial Sequence
  Synthetic polypeptide
QRITDPGGCGCGIQLGGVAAPGHCSEEPVPGCDGGEL

SEQ ID NO: 24653 - protein, 593 aa, Artificial Sequence
  Synthetic polypeptide
AMFAPPHSNLGDKESLTLEDVAVEFSWEEWQLLDTAQKNLYRDVMVENYNHLVSLGYQTSKPDVLSKLAHGQEPWTTDAKIQNKNCPGIGKVDSHLQEHSPNQRLLKSVQQCNGQNTLRNIVHLSKTHFPIVQNHDTFDLYRKNLKSSLSLINQKRRHGINNPVEFIGGEKTLLHGKHERTHTKTRFSENAKCIHTKFQVFKHQRTQKIEKPHACIECEQTFLRKSQLIYHENICIQENPGSGQCEKLSRSVLFTKHLKTNTTDKICIPNEYRKGSTVKSSLITHQQTHTEEKSYMCSECGKGFTMKRYLIAHQRTHSGEKPYVCKECGKGFTVKSNLIVHQRTHTGEKPYICSECGKGFTMKRYLVVHQRTHTGEKPYMCSECGKGFTVKSNLIVHQRSHTGEKSYICSECGKGFTVKRTLVIHQRTHTGEKSYICNECGKGFTTKRTLIIHQRTHTGEKPYECNECGKAFSQKICLIQHERCHTGKTPFVCTECGKSYSHKYGLITHQRIHTGEKPYECNECGKAFTTKSVLNVHQRTHTGERPYGCSDCEKAFSHLSNLVKHKKMHTREMGRISQVENSCNGESQLLPYK

SEQ ID NO: 24654 - protein, 88 aa, Artificial Sequence
  Synthetic polypeptide
AMFAPPHSNLGDKESLTLEDVAVEFSWEEWQLLDTAQKNLYRDVMVENYNHLVSLGYQTSKPDVLSKLAHGQEPWTTDAKIQNKNCPD

SEQ ID NO: 24655 - protein, 47 aa, Artificial Sequence
  Synthetic polypeptide
AMFAPPHSNLGDKESLTLEDVAVEFSWEEWQLLDTAQKNLYRDVMVE

SEQ ID NO: 24656 - protein, 35 aa, Artificial Sequence
  Synthetic polypeptide
QRITDPGGCGCGIQLGGVAAPGHCSEEPVPGCDGG

SEQ ID NO: 24657 - protein, 55 aa, Artificial Sequence
  Synthetic polypeptide
WGRDPQDTGDLTPTPGCLEGAFDIQGCSHRILSGGVEMPGACAESFVQGCDVGEL

SEQ ID NO: 24658 - protein, 778 aa, Artificial Sequence
  Synthetic polypeptide
KGHLTFKDVAIEFSQEEWKCLEPVQKALYKDVMLENYRNLVFLGISPKCVIKELPPTENSNTGERFQTVALERHQSYDIENLYFREIQKHLHDLEFQWKDGETNDKEVPVPHENNLTGKRDQHSQGDVENNHIENQLTSNFESRLAELQKVQTEGRLYECNETEKTGNNGCLVSPHIREKTYVCNECGKAFKASSSLINHQRIHTTEKPYKCNECGKAFHRASLLTVHKVVHTRGKSYQCDVCGKIFRKNSYFVRHQRSHTGQKPYICNECGKSFSKSSHLAVHQRIHTGEKPYKCNLCGKSFSQRVHLRLHQTVHTGERPFKCNECGKTFKRSSNLTVHQVIHAGKKPYKCDVCGKAFRHRSNLVCHRRIHSGEKQYKCNECGKVFSKRSSLAVHRRIHTVEKPCKCNECGKVFSKRSSLAVHQRIHTGQKTYKCNKCGKVYSKHSHLAVHWRIHTGEKAYKCNECGKVFSIHSRLAAHQRIHTGEKPYKCNECGKVFSQHSRLAVHRRIHTGEKPYKCKECGKVFSDRSAFARHRRIHTGEKPYKCKECGKVFSQCSRLTVHRRIHSGEKPYKCNECGKVYSQYSHLVGHRRVHTGEKPYKCHECGKAFNQGSTLNRHQRIHTGEKPYKCNQCGNSFSQRVHLRLHQTVHTGDRPYKCNECGKTFKRSSNLTAHQIIHAGKKPYKCDECGKVFRHSSHLVSHQRIHTGEKRYKCIECGKAFGRLFSLSKHQRIHSGKKPYKCNECGKSFICRSGLTKHRIRHTGESLTTKLNVTRP

SEQ ID NO: 24659 - protein, 42 aa, Artificial Sequence
  Synthetic polypeptide
SQLGKPQPVRSSMWVIPTKLMGQGSPGHWGPNSYSRMSRRGI

SEQ ID NO: 24660 - protein, 71 aa, Artificial Sequence
  Synthetic polypeptide
KGHLTFKDVAIEFSQEEWKCLEPVQKALYKDVMLENYRNLVFLGWRIMARSHLTATSVSQVQAILLPQPPE

SEQ ID NO: 24661 - protein, 66 aa, Artificial Sequence
  Synthetic polypeptide
KGHLTFKDVAIEFSQEEWKCLEPVQKALYKDVMLENYRNLVFLGWRIMARSHLTATSVSQVSLLNV

SEQ ID NO: 24662 - protein, 54 aa, Artificial Sequence
  Synthetic polypeptide
WGRDPQDTGDLTPTPGCLEGAFDIQGCSHRILSGGVEMPGACAESFVQGCDVGE

SEQ ID NO: 24663 - protein, 36 aa, Artificial Sequence
  Synthetic polypeptide
KGHLTFKDVAIEFSQEEWKCLEPVQKALYKDVMLEN

SEQ ID NO: 24664 - protein, 53 aa, Artificial Sequence
  Synthetic polypeptide
DHSGQHRTLGIQGRGHRIPSGGVEMSGPCSEDFIQGSDGGELQEPGLSGNLSS

SEQ ID NO: 24665 - protein, 132 aa, Artificial Sequence
  Synthetic polypeptide
AQEFETTLDNIGHLAFRDVAIEFPQEEWKCLDPAQRTLYREVMVENYRNLVFLGICLPDLSVISMLEQRRDPRNLQSEVKIANNPGGRECIKGVNAESRSVTQAGVQCRDLGSLQPSLPGFKQFFCIGLPKC

SEQ ID NO: 24666 - protein, 105 aa, Artificial Sequence
  Synthetic polypeptide
AQEFETTLDNIGHLAFRDVAIEFPQEEWKCLDPAQRTLYREVMVENYRNLVFLGICLPDLSVISMLEQRRDPRNLQSEVKIANNPGSCSVTQAVVEWQSSVAIVA

SEQ ID NO: 24667 - protein, 124 aa, Artificial Sequence
  Synthetic polypeptide
AQEFETTLDNIGHLAFRDVAIEFPQEEWKCLDPAQRTLYREVMVENYRNLVFLGICLPDLSVISMLEQRRDPRNLQSEVKIANNPGGRECIKGVNAGKSLDGQSGGPIIFFFFKQGLALSPRLS

SEQ ID NO: 24668 - protein, 584 aa, Artificial Sequence
  Synthetic polypeptide
AQEFETTLDNIGHLAFRDVAIEFPQEEWKCLDPAQRTLYREVMVENYRNLVFLGICLPDLSVISMLEQRRDPRNLQSEVKIANNPGGRECIKGVNAESSSKLGSNAGNKSLKNQLGLTFQLHLSELQLFQAERNISGCKHVEKPINNSLVSPLQKIYSSVKSHILNKYRNDFDDSPFLPQEQKAQIREKPCECNEHGKAFRVSSRLANNQVIHTADNPYKCNECDKVFSNSSNLVQHQRIHTGEKPYKCHECGKLFNRISLLARHQRIHTGEKPYKCHECGKVFTQNSHLANHHRIHTGEKPYKCNECGKVFNRNAHLARHQKIHSGEKPYKCKECGKAFSGGSGLTAHLVIHTGEKLYKCNKCGKVFNRNAHLTRHQRIHTGEKPYECKECGKVFRHKFCLTNHHRMHTGEQPYKCNECGKAFRDCSGLTAHLLIHTGEKPYKCKECAKVFRHRLSLSNHQRFHTGEKPYRCDECGKDFTRNSNLANHHRIHTGEKPYKCSECHKVFSHNSHLARHRQIHTGEKSYKCNECGKVFSHKLYLKKHERIHTGEKPYRCHECGKDFTRNSNLANHHRIHTGEKPYR

SEQ ID NO: 24669 - protein, 26 aa, Artificial Sequence
  Synthetic polypeptide
LMPVIPALWEAKACGSLQDGFLRTQP

SEQ ID NO: 24670 - protein, 22 aa, Artificial Sequence
  Synthetic polypeptide
SQHFGRPKLVDHFRTAFSEHSL

SEQ ID NO: 24671 - protein, 30 aa, Artificial Sequence
  Synthetic polypeptide
QGVVTHACNPSTLGGQSLWITSGRLSQNTA

SEQ ID NO: 24672 - protein, 57 aa, Artificial Sequence
  Synthetic polypeptide
LLSRVSVKCVKPNCSLNTMDTRHQDLLRIDFQRLMLLEEDTKKAKKRSQGWLFLRDT

SEQ ID NO: 24673 - protein, 66 aa, Artificial Sequence
  Synthetic polypeptide
KADQRFKECYLLSTCDPEGPQFQLFHLSRPDQCIYVLIAVSCVCKMCETKLQPQHHGHTSSGPPED

SEQ ID NO: 24674 - protein, 74 aa, Artificial Sequence
  Synthetic polypeptide
EAKTGLISRDLCYLRKTPRRQRKGARDGSSSGILDFQRCGYRVLFAGVETPGPCTERFIQGCDVGELQEPGVCG

SEQ ID NO: 24675 - protein, 10 aa, Artificial Sequence
  Synthetic polypeptide
SQHFERPRQD

SEQ ID NO: 24676 - protein, 47 aa, Artificial Sequence
  Synthetic polypeptide
PGVVSHTCNPSTLRGQDRIDFQRLMLLEEDTKKAKKRSQGWLFLRDT

SEQ ID NO: 24677 - protein, 466 aa, Artificial Sequence
  Synthetic polypeptide
PGQHDISSKCMMNTLSSTGQGNTEVIHTGTLQRQASYHIGAFCSQEIEKDIHDFVFQWQEDETNDHEAPMTEIKKLTSSTDRYDQRHAGNKPIKGQLESRFHLHLRRHRRIHTGEKPYKCEECEKVFSCKSHLEIHRIIHTGEKPYKCKVCDKAFKHDSHLAKHTRIHRGDKHYTCNECGKVFDQKATLACHHRSHTGEKPYKCNECGKTFSQTSHLVYHHRLHTGEKPYKCNECGKTFARNSVLVIHKAVHTAEKPYKCNECGKVFKQRATLAGHRRVHTGEKPYRCEECDKVFSRKSHLERHRRIHTGEKPYKCKVCDKAFRSDSRLAEHQRVHTGERPYTCNECGKVFSTKAYLACHQKLHTGEKLYECEECDKVYIRKSHLERHRRIHTGEKPHKCGDCGKAFNSPSHLIRHQRIHTGQKSYKCHQCGKVFSLRSLLAEHQKIPFGDNCFKCNEYSKPSSIN

SEQ ID NO: 24678 - protein, 45 aa, Artificial Sequence
  Synthetic polypeptide
MGTVAHACNPRTLGGREVWITRVRDHRSSQEFETSLANMISLPNA

SEQ ID NO: 24679 - protein, 80 aa, Artificial Sequence
  Synthetic polypeptide
PGQHDISSKCMMNTLSSTGQGNTEVIHTGTLQRQASYHIGAFCSQEIEKDIHDFVFQWQEDETNDHEAPMTEIKKLTSST

SEQ ID NO: 24680 - protein, 43 aa, Artificial Sequence
  Synthetic polypeptide
PGQHDISSKCMMNTLSSTGQGNTEVIHTGTLQRQASYHIGAFC

SEQ ID NO: 24681 - protein, 14 aa, Artificial Sequence
  Synthetic polypeptide
PGQHDISSKCMMNT

SEQ ID NO: 24682 - protein, 909 aa, Artificial Sequence
  Synthetic polypeptide
RLTPVRMAIIKKSGNNRCWRGCGEIGTLLHCWWDCKLVQPLWKSVWRFLRDLELEIPLDPAIPLLGIYPKDYKSCCYKDTCTRMFIVALFTMAKTWNQPKCPTMIDWIKKTWHIYTMEYYAAIKNDEFMSFLGTWMKLETIILSKLSQGQKTKHRMFSLTALSSEFVMKDLLHKGKSNTGEVFQTVMLERQESQDIEGCSFREVQKNTHGLEYQCRDAEGNYKGVLLTQEGNLTHGRDEHDKRDARNKLIKNQLGLSLQSHLPELQLFQYEGKIYECNQVEKSFNNNSSVSPPQQMPYNVKTHISKKYLKDFISSLLLTQGQKANNWGSPYKSNGCGMVFPQNSHLASHQRSHTKEKPYKCYECGKAFRTRSNLTTHQVIHTGEKRYKCNECGKVFSRNSQLSQHQKIHTGEKPYKCNECGKVFTQNSHLVRHRGIHTGEKPYKCNECGKAFRARSSLAIHQATHSGEKPYKCNECGKVFTQNSHLTNHWRIHTGEKPYKCNECGKAFGVRSSLAIHLVIHTGEKPYKCHECGKVFRRNSHLARHQLIHTGEKPYKCNECGKAFRAHSNLTTHQVIHTGEKPYKCNECGKVFTQNSHLANHQRIHTGVKPYMCNECGKAFSVYSSLTTHQVIHTGEKPYKCNECGKVFTQNSHLARHRGIHTGEKPYKCNECGKVFRHNSYLSRHQRIHTGEKPYKYNEYGKAFSEHSNLTTHQVIHTGEKPYKCNECGKVFTQNSHLARHRRVHTGGKPYQCNECGKAFSQTSKLARHQRVHTGEKPYECNQCGKAFSVRSSLTTHQAIHTGKKPYKCNECGKVFTQNSHLARHRGIHTGEKPYKCNECGKAFSQTSKLARHQRIHTGEKPYECGKPFSICSSLTTHQTIHTGGKPYKCNVWKVLKSEFKPCKPSQNS

SEQ ID NO: 24683 - protein, 30 aa, Artificial Sequence
  Synthetic polypeptide
SWKPSFSANYRKDKKPNTACSHSQLSLPNL

SEQ ID NO: 24684 - protein, 50 aa, Artificial Sequence
  Synthetic polypeptide
VHVLFRDMDEAGNHHSQQTIARTKNQTPHVLTHSSLFRICNERFTTQREE

SEQ ID NO: 24685 - protein, 253 aa, Artificial Sequence
  Synthetic polypeptide
RLTPVRMAIIKKSGNNRCWRGCGEIGTLLHCWWDCKLVQPLWKSVWRFLRDLELEIPLDPAIPLLGIYPKDYKSCCYKDTCTRMFIVALFTMAKTWNQPKCPTMIDWIKKTWHIYTMEYYAAIKNDEFMSFLGTWMKLETIILSKLSQGQKTKHRMFSLTALSSEFVMKDLLHKGKSNTGEVFQTVMLERQESQDIEGCSFREVQKNTHGLEYQCRDAEGNYKGVLLTQEGNLTHGRDEHDKRDARNKLIKNQ

SEQ ID NO: 24686 - protein, 208 aa, Artificial Sequence
  Synthetic polypeptide
RLTPVRMAIIKKSGNNRCWRGCGEIGTLLHCWWDCKLVQPLWKSVWRFLRDLELEIPLDPAIPLLGIYPKDYKSCCYKDTCTRMFIVALFTMAKTWNQPKCPTMIDWIKKTWHIYTMEYYAAIKNDEFMSFLGTWMKLETIILSKLSQGQKTKHRMFSLTALSSEFVMKDLLHKGKSNTGEVFQTVMLERQESQDIEGCSFREVQKNT

SEQ ID NO: 24687 - protein, 353 aa, Artificial Sequence
  Synthetic polypeptide
NPISTKNTKMSQAWWHTSVSPATQEAKAGGLLQPRRQRLWLKRCRISSSACEDLSAALIANKNLTRMDLSGNGVGFPGMMLLCEGLRHPQCRLQMIQLRKCQLESGACQEMASVLGTNPHLVELDLTGNALEDLGLRLLCQGLRHPVCRLRTLWLKICRLTAAACDELASTLSVNQSLRELDLSLNELGDLGVLLLCEGLRHPTCKLQTLRLGICRLGSAACEGLSVVLQANHNLRELDLSFNDLGDWGLWLLAEGLQHPACRLQKLWLDSCGLTAKACENLYFTLGINQTLTDLYLTNNALGDTGVRLLCKRLSHPGCKLRVLWLFGMDLNKMTHSRLAALRVTKPYLDIGC

SEQ ID NO: 24688 - protein, 21 aa, Artificial Sequence
  Synthetic polypeptide
AQLLRRPRQEDCFNPGGRGCG

SEQ ID NO: 24689 - protein, 55 aa, Artificial Sequence
  Synthetic polypeptide
KYQNEPGMVAHVCKPSYSGGQGRRIASTQEAEVVAEEVPHLQLSLRGPLCSSHSQ

SEQ ID NO: 24690 - protein, 241 aa, Artificial Sequence
  Synthetic polypeptide
NPISTKNTKMSQAWWHTSVSPATQEAKAGGLLQPRRQRLWLKRCRISSSACEDLSAALIANKNLTRMDLSGNGVGFPGMMLLCEGLRHPQCRLQMIQLRKCQLESGACQEMASVLGTNPHLVELDLTGNALEDLGLRLLCQGLRHPVCRLRTLWLQLDSCGLTAKACENLYFTLGINQTLTDLYLTNNALGDTGVRLLCKRLSHPGCKLRVLWLFGMDLNKMTHSRLAALRVTKPYLDIGC

SEQ ID NO: 24691 - protein, 184 aa, Artificial Sequence
  Synthetic polypeptide
NPISTKNTKMSQAWWHTSVSPATQEAKAGGLLQPRRQRLWLKRCRISSSACEDLSAALIANKNLTRMDLSGNGVGFPGMMLLCEGLRHPQCRLQMIQLRKCQLESGACQEMASVLGTNPHLVELDLTGNALEDLGLRLLCQGLRHPVCRLRTLCWMLFGMDLNKMTHSRLAALRVTKPYLDIGC

SEQ ID NO: 24692 - protein, 296 aa, Artificial Sequence
  Synthetic polypeptide
NPISTKNTKMSQAWWHTSVSPATQEAKAGGLLQPRRQRLWLKRCRISSSACEDLSAALIANKNLTRMDLSGNGVGFPGMMLLCEGLRHPQCRLQMIQLRKCQLESGACQEMASVLGTNPHLVELDLTGNALEDLGLRLLCQGLRHPVCRLRTLWLKICRLTAAACDELASTLSVNQSLRELDLSLNELGDLGVLLLCEGLRHPTCKLQTLRLGICRLGSAACEGLSVVLQANHNLRELDLSFNDLGDWGLWLLAEGLQHPACRLQKLWLFGMDLNKMTHSRLAALRVTKPYLDIGC

SEQ ID NO: 24693 - protein, 296 aa, Artificial Sequence
  Synthetic polypeptide
NPISTKNTKMSQAWWHTSVSPATQEAKAGGLLQPRRQRLWLKRCRISSSACEDLSAALIANKNLTRMDLSGNGVGFPGMMLLCEGLRHPQCRLQMIQLRKCQLESGACQEMASVLGTNPHLVELDLTGNALEDLGLRLLCQGLRHPVCRLRTLWLKICRLTAAACDELASTLSVNQSLRELDLSLNELGDLGVLLLCEGLRHPTCKLQTLRLDSCGLTAKACENLYFTLGINQTLTDLYLTNNALGDTGVRLLCKRLSHPGCKLRVLWLFGMDLNKMTHSRLAALRVTKPYLDIGC

SEQ ID NO: 24694 - protein, 297 aa, Artificial Sequence
  Synthetic polypeptide
NPISTKNTKMSQAWWHTSVSPATQEAKAGGLLQPRRQRLWLKRCRISSSACEDLSAALIANKNLTRMDLSGNGVGFPGMMLLCEGLRHPQCRLQMIQLRKCQLESGACQEMASVLGTNPHLVELDLTGNALEDLGLRLLCQGLRHPVCRLRTLWLKICRLTAAACDELASTLSVNQSLRELDLSLNELGDLGVLLLCEGLRHPTCKLQTLRLGICRLGSAACEGLSVVLQANHNLRELDLSFNDLGDWGLWLLAEGLQHPACRLQKLWWLFGMDLNKMTHSRLAALRVTKPYLDIGC

SEQ ID NO: 24695 - protein, 183 aa, Artificial Sequence
  Synthetic polypeptide
NPISTKNTKMSQAWWHTSVSPATQEAKAGGLLQPRRQRLWLKRCRISSSACEDLSAALIANKNLTRMDLSGNGVGFPGMMLLCEGLRHPQCRLQMIQLRKCQLESGACQEMASVLGTNPHLVELDLTGNALEDLGLRLLCQGLRHPVCRLRTLWWLFGMDLNKMTHSRLAALRVTKPYLDIGC

SEQ ID NO: 24696 - protein, 108 aa, Artificial Sequence
  Synthetic polypeptide
SQHFGRLKRADHLRYPTWWPVLTWEPVNMPSGSLSCHSKKRSPGNLQGLCPQEIPAHGRPQCAPRGMCQPQPPVHPAPAGEGALKPHAGPAAASGHRPGTREDRGTPG

SEQ ID NO: 24697 - protein, 68 aa, Artificial Sequence
  Synthetic polypeptide
LIPVISALWEAEEGRSLEIPHLVARPHLGTSQHAFWKSLLSLQEKIPRKPTGTMSAGNSGSWKTAMRA

SEQ ID NO: 24698 - protein, 15 aa, Artificial Sequence
  Synthetic polypeptide
PFLSLNSFNSACCSW

SEQ ID NO: 24699 - protein, 86 aa, Artificial Sequence
  Synthetic polypeptide
VLIPSTVPAALGEPGGVPAFREGPAAESQPGASPGPTPHLRVLLVPGLRRGGRPDPAVGGRLLSAAHTAFLALGVPLSQAGAPGHL

SEQ ID NO: 24700 - protein, 83 aa, Artificial Sequence
  Synthetic polypeptide
FLQQCLLLLVSLEVFRHSVRALLQRVSPEPPPAPRLTYEYSWSLGCGVGAGLILLLGAGCFLLLTLPSWPWGSLCPKRGHRAT

SEQ ID NO: 24701 - protein, 129 aa, Artificial Sequence
  Synthetic polypeptide
YQDFGKMRQEDHLSPGVQDQPGQLDTRTIFVAIFSCISILLLFLSVFIIYRCSQHSSSSEESTKRTSHSKLPEQEAAEADLSNMERVSLSTADPQGVTYAELSTSALSEAASDTTQEPPGSHEYAALKV

SEQ ID NO: 24702 - protein, 83 aa, Artificial Sequence
  Synthetic polypeptide
AQGFKTSLDNLTPEPSLSPSSAASPSFSSSSQSSSSTDAASTVHHLRNPPREPAIPNFRSRRLPRQIYPIWKGYLSRRQTPKE

SEQ ID NO: 24703 - protein, 67 aa, Artificial Sequence
  Synthetic polypeptide
YQDFGKMRQEDHLSPGVQDQPGQLDTRTIFVAIFSCISILLLFLSVFIIYRCSQHSELRERKGREGE

SEQ ID NO: 24704 - protein, 54 aa, Artificial Sequence
  Synthetic polypeptide
AQGFKTSLDNLTPEPSLSPSSAASPSFSSSSQSSSSTDAASTVSSENAKGERGS

SEQ ID NO: 24705 - protein, 81 aa, Artificial Sequence
  Synthetic polypeptide
AGCGSSRLESQHFGRPKQERLDHAAERLLARPPPGLLPELPDHPAVPGCRGPAGVSPAGAAEPRGPEGLGLGALVPEDARL

SEQ ID NO: 24706 - protein, 146 aa, Artificial Sequence
  Synthetic polypeptide
PGAAAHAWNPSTLGGPSRSAWTMLLSAYWHGLHPGYYLSFLTIPLCLAAEGRLESALRGRLSPGGQKAWDWVHWFLKMRAYDYMCMGFVLLSLADTLRYWASIYFCIHFLALAALGLGLALGGGSPSRRKAASQPTSLAPEKLREE

SEQ ID NO: 24707 - protein, 24 aa, Artificial Sequence
  Synthetic polypeptide
RVRQLTPGIPALWEAQAGAPGPCC

SEQ ID NO: 24708 - protein, 25 aa, Artificial Sequence
  Synthetic polypeptide
AGCGSSRLESQHFGRPKQERLDHAA

SEQ ID NO: 24709 - protein, 25 aa, Artificial Sequence
  Synthetic polypeptide
PGAAAHAWNPSTLGGPSRSAWTMLL

SEQ ID NO: 24710 - protein, 15 aa, Artificial Sequence
  Synthetic polypeptide
WGRRKRCTCFPRPES

SEQ ID NO: 24711 - protein, 141 aa, Artificial Sequence
  Synthetic polypeptide
GEGERDAPASQGLKAEHLYILIGVSVVFLFCLLLLVLFCLHRQNQIKQGPPRSKDEEQKPQQRPDLAVDVLERTADKATVNGLPEKDRETDTSALAAGSSQEVTYAQLDHWALTQRTARAVSPQSTKPMAESITYAAVARH

SEQ ID NO: 24712 - protein, 12 aa, Artificial Sequence
  Synthetic polypeptide
GKEKEMHLLPKA

SEQ ID NO: 24713 - protein, 13 aa, Artificial Sequence
  Synthetic polypeptide
WGRRKRCTCFPRP

SEQ ID NO: 24714 - protein, 13 aa, Artificial Sequence
  Synthetic polypeptide
GEGERDAPASQGL

SEQ ID NO: 24715 - protein, 41 aa, Artificial Sequence
  Synthetic polypeptide
SMNIRGTWMKGIWELSVPLQLFCKFKFIPRTHAEAVGQQSQ

SEQ ID NO: 24716 - protein, 169 aa, Artificial Sequence
  Synthetic polypeptide
RAYGNSLYLCNSFASLNLFPGPTQRPSDNSHNEHAPASQGLKAEHLYILIGVSVVFLFCLLLLVLFCLHRQNQIKQGPPRSKDEEQKPQQRPDLAVDVLERTADKATVNGLPEKDRETDTSALAAGSSQEVTYAQLDHWALTQRTARAVSPQSTKPMAESITYAAVARH

SEQ ID NO: 24717 - protein, 24 aa, Artificial Sequence
  Synthetic polypeptide
IYSQDPRRGRRTTVTMSMHLLPKA

SEQ ID NO: 24718 - protein, 41 aa, Artificial Sequence
  Synthetic polypeptide
RAYGNSLYLCNSFASLNLFPGPTQRPSDNSHNEHAPASQGL

SEQ ID NO: 24719 - protein, 35 aa, Artificial Sequence
  Synthetic polypeptide
RAYGNSLYLCNSFASLNLFPGPTQRPSDNSHNERE

SEQ ID NO: 24720 - protein, 19 aa, Artificial Sequence
  Synthetic polypeptide
IYSQDPRRGRRTTVTMSVS

SEQ ID NO: 24721 - protein, 39 aa, Artificial Sequence
  Synthetic polypeptide
SMNIRGTWMKGIWELSVPLQLFCKFKFIPRRSAQTLHLG

SEQ ID NO: 24722 - protein, 284 aa, Artificial Sequence
  Synthetic polypeptide
RAYGNSLYLCNSFASLNLFPEDLPRPSISAEPGTVIPLGSHVTFVCRGPVGVQTFRLERESRSTYNDTEDVSQASPSESEARFRIDSVSEGNAGPYRCIYYKPPKWSEQSDYLELLVKETSGGPDSPDTEPGSSAGPTQRPSDNSHNEHAPASQGLKAEHLYILIGVSVVFLFCLLLLVLFCLHRQNQIKQGPPRSKDEEQKPQQRPDLAVDVLERTADKATVNGLPEKDRETDTSALAAGSSQEVTYAQLDHWALTQRTARAVSPQSTKPMAESITYAAVARH

SEQ ID NO: 24723 - protein, 18 aa, Artificial Sequence
  Synthetic polypeptide
IYSQKICPDPPSRLSQAP

SEQ ID NO: 24724 - protein, 267 aa, Artificial Sequence
  Synthetic polypeptide
RAYGNSLYLCNSFASLNLFPEDLPRPSISAEPGTVIPLGSHVTFVCRGPVGVQTFRLERESRSTYNDTEDVSQASPSESEARFRIDSVSEGNAGPYRCIYYKPPKWSEQSDYLELLVKGPTQRPSDNSHNEHAPASQGLKAEHLYILIGVSVVFLFCLLLLVLFCLHRQNQIKQGPPRSKDEEQKPQQRPDLAVDVLERTADKATVNGLPEKDRETDTSALAAGSSQEVTYAQLDHWALTQRTARAVSPQSTKPMAESITYAAVARH

SEQ ID NO: 24725 - protein, 124 aa, Artificial Sequence
  Synthetic polypeptide
RAYGNSLYLCNSFASLNLFPEDLPRPSISAEPGTVIPLGSHVTFVCRGPVGVQTFRLERESRSTYNDTEDVSQASPSESEARFRIDSKPLEARTPRTQSPAPQLDPRRGRRTTVTMSMHLLPKA

SEQ ID NO: 24726 - protein, 150 aa, Artificial Sequence
  Synthetic polypeptide
RAYGNSLYLCNSFASLNLFPEDLPRPSISAEPGTVIPLGSHVTFVCRGPVGVQTFRLERESRSTYNDTEDVSQASPSESEARFRIDSVSEGNAGPYRCIYYKPPKWSEQSDYLELLVKETSGGPDSPDTEPGSSAGPTQRPSDNSHNERE

SEQ ID NO: 24727 - protein, 30 aa, Artificial Sequence
  Synthetic polypeptide
RAYGNSLYLCNSFASLNLFPEDLPRPSISA

SEQ ID NO: 24728 - protein, 14 aa, Artificial Sequence
  Synthetic polypeptide
IYSQKICPDPPSRL

SEQ ID NO: 24729 - protein, 96 aa, Artificial Sequence
  Synthetic polypeptide
RAYGNSLYLCNSFASLNLFPEDLPRPSISAEPGTVIPLGSHVTFVCRGPVGVQTFRLERESRSTYNDTEDVSQASPSESEARFRIDSVSEGNAGPY

SEQ ID NO: 24730 - protein, 51 aa, Artificial Sequence
  Synthetic polypeptide
SMNIRGTWMKGIWELSVPLQLFCKFKFIPSALPGPDHPHAGGRSAQTLHLG

SEQ ID NO: 24731 - protein, 279 aa, Artificial Sequence
  Synthetic polypeptide
RAYGNSLYLCNSFASLNLFPVLCLAQTIHTQEEDLPRPSISAEPGTVIPLGSHVTFVCRGPVGVQTFRLERESRSTYNDTEDVSQASPSESEARFRIDSVSEGNAGPYRCIYYKPPKWSEQSDYLELLVKGPTQRPSDNSHNEHAPASQGLKAEHLYILIGVSVVFLFCLLLLVLFCLHRQNQIKQGPPRSKDEEQKPQQRPDLAVDVLERTADKATVNGLPEKDRETDTSALAAGSSQEVTYAQLDHWALTQRTARAVSPQSTKPMAESITYAAVARH

SEQ ID NO: 24732 - protein, 30 aa, Artificial Sequence
  Synthetic polypeptide
IYSQCSAWPRPSTRRRKICPDPPSRLSQAP

SEQ ID NO: 24733 - protein, 296 aa, Artificial Sequence
  Synthetic polypeptide
RAYGNSLYLCNSFASLNLFPVLCLAQTIHTQEEDLPRPSISAEPGTVIPLGSHVTFVCRGPVGVQTFRLERESRSTYNDTEDVSQASPSESEARFRIDSVSEGNAGPYRCIYYKPPKWSEQSDYLELLVKETSGGPDSPDTEPGSSAGPTQRPSDNSHNEHAPASQGLKAEHLYILIGVSVVFLFCLLLLVLFCLHRQNQIKQGPPRSKDEEQKPQQRPDLAVDVLERTADKATVNGLPEKDRETDTSALAAGSSQEVTYAQLDHWALTQRTARAVSPQSTKPMAESITYAAVARH

SEQ ID NO: 24734 - protein, 50 aa, Artificial Sequence
  Synthetic polypeptide
SMNIRGTWMKGIWELSVPLQLFCKFKFIPSALPGPDHPHAGGSAQTLHLG

SEQ ID NO: 24735 - protein, 295 aa, Artificial Sequence
  Synthetic polypeptide
RAYGNSLYLCNSFASLNLFPVLCLAQTIHTQEDLPRPSISAEPGTVIPLGSHVTFVCRGPVGVQTFRLERESRSTYNDTEDVSQASPSESEARFRIDSVSEGNAGPYRCIYYKPPKWSEQSDYLELLVKETSGGPDSPDTEPGSSAGPTQRPSDNSHNEHAPASQGLKAEHLYILIGVSVVFLFCLLLLVLFCLHRQNQIKQGPPRSKDEEQKPQQRPDLAVDVLERTADKATVNGLPEKDRETDTSALAAGSSQEVTYAQLDHWALTQRTARAVSPQSTKPMAESITYAAVARH

SEQ ID NO: 24736 - protein, 29 aa, Artificial Sequence
  Synthetic polypeptide
IYSQCSAWPRPSTRRRICPDPPSRLSQAP

SEQ ID NO: 24737 - protein, 136 aa, Artificial Sequence
  Synthetic polypeptide
RAYGNSLYLCNSFASLNLFPVLCLAQTIHTQEEDLPRPSISAEPGTVIPLGSHVTFVCRGPVGVQTFRLERESRSTYNDTEDVSQASPSESEARFRIDSKPLEARTPRTQSPAPQLDPRRGRRTTVTMSMHLLPKA

SEQ ID NO: 24738 - protein, 278 aa, Artificial Sequence
  Synthetic polypeptide
RAYGNSLYLCNSFASLNLFPVLCLAQTIHTQEDLPRPSISAEPGTVIPLGSHVTFVCRGPVGVQTFRLERESRSTYNDTEDVSQASPSESEARFRIDSVSEGNAGPYRCIYYKPPKWSEQSDYLELLVKGPTQRPSDNSHNEHAPASQGLKAEHLYILIGVSVVFLFCLLLLVLFCLHRQNQIKQGPPRSKDEEQKPQQRPDLAVDVLERTADKATVNGLPEKDRETDTSALAAGSSQEVTYAQLDHWALTQRTARAVSPQSTKPMAESITYAAVARH

SEQ ID NO: 24739 - protein, 162 aa, Artificial Sequence
  Synthetic polypeptide
RAYGNSLYLCNSFASLNLFPVLCLAQTIHTQEEDLPRPSISAEPGTVIPLGSHVTFVCRGPVGVQTFRLERESRSTYNDTEDVSQASPSESEARFRIDSVSEGNAGPYRCIYYKPPKWSEQSDYLELLVKETSGGPDSPDTEPGSSAGPTQRPSDNSHNERE

SEQ ID NO: 24740 - protein, 44 aa, Artificial Sequence
  Synthetic polypeptide
SMNIRGTWMKGIWELSVPLQLFCKFKFIPSALPGPDHPHAGGGR

SEQ ID NO: 24741 - protein, 53 aa, Artificial Sequence
  Synthetic polypeptide
RAYGNSLYLCNSFASLNLFPVLCLAQTIHTQEVDAEILLCFPPRRSAQTLHLG

SEQ ID NO: 24742 - protein, 37 aa, Artificial Sequence
  Synthetic polypeptide
IYSQCSAWPRPSTRRRWTLRSCSASLLEDLPRPSISA

SEQ ID NO: 24743 - protein, 108 aa, Artificial Sequence
  Synthetic polypeptide
RAYGNSLYLCNSFASLNLFPVLCLAQTIHTQEEDLPRPSISAEPGTVIPLGSHVTFVCRGPVGVQTFRLERESRSTYNDTEDVSQASPSESEARFRIDSVSEGNAGPY

SEQ ID NO: 24744 - protein, 50 aa, Artificial Sequence
  Synthetic polypeptide
WRSSNCQPGAPIWTCHPVRSEPSIVTNCSALPGPDHPHAGGRSAQTLHLG

SEQ ID NO: 24745 - protein, 262 aa, Artificial Sequence
  Synthetic polypeptide
QTAVLCLAQTIHTQEEDLPRPSISAEPGTVIPLGSHVTFVCRGPVGVQTFRLERESRSTYNDTEDVSQASPSESEARFRIDSVSEGNAGPYRCIYYKPPKWSEQSDYLELLVKGPTQRPSDNSHNEHAPASQGLKAEHLYILIGVSVVFLFCLLLLVLFCLHRQNQIKQGPPRSKDEEQKPQQRPDLAVDVLERTADKATVNGLPEKDRETDTSALAAGSSQEVTYAQLDHWALTQRTARAVSPQSTKPMAESITYAAVARH

SEQ ID NO: 24746 - protein, 34 aa, Artificial Sequence
  Synthetic polypeptide
AFHCDKLQCSAWPRPSTRRRKICPDPPSRLSQAP

SEQ ID NO: 24747 - protein, 279 aa, Artificial Sequence
  Synthetic polypeptide
QTAVLCLAQTIHTQEEDLPRPSISAEPGTVIPLGSHVTFVCRGPVGVQTFRLERESRSTYNDTEDVSQASPSESEARFRIDSVSEGNAGPYRCIYYKPPKWSEQSDYLELLVKETSGGPDSPDTEPGSSAGPTQRPSDNSHNEHAPASQGLKAEHLYILIGVSVVFLFCLLLLVLFCLHRQNQIKQGPPRSKDEEQKPQQRPDLAVDVLERTADKATVNGLPEKDRETDTSALAAGSSQEVTYAQLDHWALTQRTARAVSPQSTKPMAESITYAAVARH

SEQ ID NO: 24748 - protein, 49 aa, Artificial Sequence
  Synthetic polypeptide
WRSSNCQPGAPIWTCHPVRSEPSIVTNCSALPGPDHPHAGGSAQTLHLG

SEQ ID NO: 24749 - protein, 278 aa, Artificial Sequence
  Synthetic polypeptide
QTAVLCLAQTIHTQEDLPRPSISAEPGTVIPLGSHVTFVCRGPVGVQTFRLERESRSTYNDTEDVSQASPSESEARFRIDSVSEGNAGPYRCIYYKPPKWSEQSDYLELLVKETSGGPDSPDTEPGSSAGPTQRPSDNSHNEHAPASQGLKAEHLYILIGVSVVFLFCLLLLVLFCLHRQNQIKQGPPRSKDEEQKPQQRPDLAVDVLERTADKATVNGLPEKDRETDTSALAAGSSQEVTYAQLDHWALTQRTARAVSPQSTKPMAESITYAAVARH

SEQ ID NO: 24750 - protein, 33 aa, Artificial Sequence
  Synthetic polypeptide
AFHCDKLQCSAWPRPSTRRRICPDPPSRLSQAP

SEQ ID NO: 24751 - protein, 119 aa, Artificial Sequence
  Synthetic polypeptide
QTAVLCLAQTIHTQEEDLPRPSISAEPGTVIPLGSHVTFVCRGPVGVQTFRLERESRSTYNDTEDVSQASPSESEARFRIDSKPLEARTPRTQSPAPQLDPRRGRRTTVTMSMHLLPKA

SEQ ID NO: 24752 - protein, 261 aa, Artificial Sequence
  Synthetic polypeptide
QTAVLCLAQTIHTQEDLPRPSISAEPGTVIPLGSHVTFVCRGPVGVQTFRLERESRSTYNDTEDVSQASPSESEARFRIDSVSEGNAGPYRCIYYKPPKWSEQSDYLELLVKGPTQRPSDNSHNEHAPASQGLKAEHLYILIGVSVVFLFCLLLLVLFCLHRQNQIKQGPPRSKDEEQKPQQRPDLAVDVLERTADKATVNGLPEKDRETDTSALAAGSSQEVTYAQLDHWALTQRTARAVSPQSTKPMAESITYAAVARH

SEQ ID NO: 24753 - protein, 145 aa, Artificial Sequence
  Synthetic polypeptide
QTAVLCLAQTIHTQEEDLPRPSISAEPGTVIPLGSHVTFVCRGPVGVQTFRLERESRSTYNDTEDVSQASPSESEARFRIDSVSEGNAGPYRCIYYKPPKWSEQSDYLELLVKETSGGPDSPDTEPGSSAGPTQRPSDNSHNERE

SEQ ID NO: 24754 - protein, 43 aa, Artificial Sequence
  Synthetic polypeptide
WRSSNCQPGAPIWTCHPVRSEPSIVTNCSALPGPDHPHAGGGR

SEQ ID NO: 24755 - protein, 36 aa, Artificial Sequence
  Synthetic polypeptide
QTAVLCLAQTIHTQEVDAEILLCFPPRRSAQTLHLG

SEQ ID NO: 24756 - protein, 41 aa, Artificial Sequence
  Synthetic polypeptide
AFHCDKLQCSAWPRPSTRRRWTLRSCSASLLEDLPRPSISA

SEQ ID NO: 24757 - protein, 91 aa, Artificial Sequence
  Synthetic polypeptide
QTAVLCLAQTIHTQEEDLPRPSISAEPGTVIPLGSHVTFVCRGPVGVQTFRLERESRSTYNDTEDVSQASPSESEARFRIDSVSEGNAGPY

SEQ ID NO: 24758 - protein, 59 aa, Artificial Sequence
  Synthetic polypeptide
RTADCGWGAQVQRPPSSLPSGGSLGKLLNFAVTLFLRCALPGPDHPHAGGRSAQTLHLG

SEQ ID NO: 24759 - protein, 264 aa, Artificial Sequence
  Synthetic polypeptide
RCFCVVLCLAQTIHTQEEDLPRPSISAEPGTVIPLGSHVTFVCRGPVGVQTFRLERESRSTYNDTEDVSQASPSESEARFRIDSVSEGNAGPYRCIYYKPPKWSEQSDYLELLVKGPTQRPSDNSHNEHAPASQGLKAEHLYILIGVSVVFLFCLLLLVLFCLHRQNQIKQGPPRSKDEEQKPQQRPDLAVDVLERTADKATVNGLPEKDRETDTSALAAGSSQEVTYAQLDHWALTQRTARAVSPQSTKPMAESITYAAVARH

SEQ ID NO: 24760 - protein, 35 aa, Artificial Sequence
  Synthetic polypeptide
LCCDAVSALCSAWPRPSTRRRKICPDPPSRLSQAP

SEQ ID NO: 24761 - protein, 281 aa, Artificial Sequence
  Synthetic polypeptide
RCFCVVLCLAQTIHTQEEDLPRPSISAEPGTVIPLGSHVTFVCRGPVGVQTFRLERESRSTYNDTEDVSQASPSESEARFRIDSVSEGNAGPYRCIYYKPPKWSEQSDYLELLVKETSGGPDSPDTEPGSSAGPTQRPSDNSHNEHAPASQGLKAEHLYILIGVSVVFLFCLLLLVLFCLHRQNQIKQGPPRSKDEEQKPQQRPDLAVDVLERTADKATVNGLPEKDRETDTSALAAGSSQEVTYAQLDHWALTQRTARAVSPQSTKPMAESITYAAVARH

SEQ ID NO: 24762 - protein, 58 aa, Artificial Sequence
  Synthetic polypeptide
RTADCGWGAQVQRPPSSLPSGGSLGKLLNFAVTLFLRCALPGPDHPHAGGSAQTLHLG

SEQ ID NO: 24763 - protein, 280 aa, Artificial Sequence
  Synthetic polypeptide
RCFCVVLCLAQTIHTQEDLPRPSISAEPGTVIPLGSHVTFVCRGPVGVQTFRLERESRSTYNDTEDVSQASPSESEARFRIDSVSEGNAGPYRCIYYKPPKWSEQSDYLELLVKETSGGPDSPDTEPGSSAGPTQRPSDNSHNEHAPASQGLKAEHLYILIGVSVVFLFCLLLLVLFCLHRQNQIKQGPPRSKDEEQKPQQRPDLAVDVLERTADKATVNGLPEKDRETDTSALAAGSSQEVTYAQLDHWALTQRTARAVSPQSTKPMAESITYAAVARH

SEQ ID NO: 24764 - protein, 34 aa, Artificial Sequence
  Synthetic polypeptide
LCCDAVSALCSAWPRPSTRRRICPDPPSRLSQAP

SEQ ID NO: 24765 - protein, 121 aa, Artificial Sequence
  Synthetic polypeptide
RCFCVVLCLAQTIHTQEEDLPRPSISAEPGTVIPLGSHVTFVCRGPVGVQTFRLERESRSTYNDTEDVSQASPSESEARFRIDSKPLEARTPRTQSPAPQLDPRRGRRTTVTMSMHLLPKA

SEQ ID NO: 24766 - protein, 263 aa, Artificial Sequence
  Synthetic polypeptide
RCFCVVLCLAQTIHTQEDLPRPSISAEPGTVIPLGSHVTFVCRGPVGVQTFRLERESRSTYNDTEDVSQASPSESEARFRIDSVSEGNAGPYRCIYYKPPKWSEQSDYLELLVKGPTQRPSDNSHNEHAPASQGLKAEHLYILIGVSVVFLFCLLLLVLFCLHRQNQIKQGPPRSKDEEQKPQQRPDLAVDVLERTADKATVNGLPEKDRETDTSALAAGSSQEVTYAQLDHWALTQRTARAVSPQSTKPMAESITYAAVARH

SEQ ID NO: 24767 - protein, 147 aa, Artificial Sequence
  Synthetic polypeptide
RCFCVVLCLAQTIHTQEEDLPRPSISAEPGTVIPLGSHVTFVCRGPVGVQTFRLERESRSTYNDTEDVSQASPSESEARFRIDSVSEGNAGPYRCIYYKPPKWSEQSDYLELLVKETSGGPDSPDTEPGSSAGPTQRPSDNSHNERE

SEQ ID NO: 24768 - protein, 52 aa, Artificial Sequence
  Synthetic polypeptide
RTADCGWGAQVQRPPSSLPSGGSLGKLLNFAVTLFLRCALPGPDHPHAGGGR

SEQ ID NO: 24769 - protein, 38 aa, Artificial Sequence
  Synthetic polypeptide
RCFCVVLCLAQTIHTQEVDAEILLCFPPRRSAQTLHLG

SEQ ID NO: 24770 - protein, 42 aa, Artificial Sequence
  Synthetic polypeptide
LCCDAVSALCSAWPRPSTRRRWTLRSCSASLLEDLPRPSISA

SEQ ID NO: 24771 - protein, 93 aa, Artificial Sequence
  Synthetic polypeptide
RCFCVVLCLAQTIHTQEEDLPRPSISAEPGTVIPLGSHVTFVCRGPVGVQTFRLERESRSTYNDTEDVSQASPSESEARFRIDSVSEGNAGPY

SEQ ID NO: 24772 - protein, 25 aa, Artificial Sequence
  Synthetic polypeptide
PPGRAESGPQDPHAGRAPPQTHPLG

SEQ ID NO: 24773 - protein, 489 aa, Artificial Sequence
  Synthetic polypeptide
GWREWRGRNAGACRGLNRRGNRFSLEPPGGHGSDSSFILAQGDPFWTCDLRDGLSLGPRTHMQAGPLPKPTLWAEPGSVISWGNSVTIWCQGTLEAREYRLDKEESPAPWDRQNPLEPKNKARFSIPSMTEDYAGRYRCYYRSPVGWSQPSDPLELVMTGAYSKPTLSALPSPLVTSGKSVTLLCQSRSPMDTFLLIKERAAHPLLHLRSEHGAQQHQAEFPMSPVTSVHGGTYRCFSSHGFSHYLLSHPSDPLELIVSGSLEDPRPSPTRSVSTAAGPEDQPLMPTGSVPHSGLRRHWEVLIGVLVVSILLLSLLLFLLLQHWRQGKHRTLAQRQADFQRPPGAAEPEPKDGGLQRRSSPAADVQGENFCAAVKNTQPEDGVEMDTRQSPHDEDPQAVTYAKVKHSRPRREMASPPSPLSGEFLDTKDRQAEEDRQMDTEAAASEAPQDVTYAQLHSFTLRQKATEPPPSQEGASPAEPSVYATLAIH

SEQ ID NO: 24774 - protein, 14 aa, Artificial Sequence
  Synthetic polypeptide
PRETHFGLVTSGTG

SEQ ID NO: 24775 - protein, 488 aa, Artificial Sequence
  Synthetic polypeptide
GWREWRGRNAGACRGLNRRGNRFSLEPPGGHGSDSSFILAQGDPFWTCDLRDGLSLGPRTHMQAGPLPKPTLWAEPGSVISWGNSVTIWCQGTLEAREYRLDKEESPAPWDRQNPLEPKNKARFSIPSMTEDYAGRYRCYYRSPVGWSQPSDPLELVMTGAYSKPTLSALPSPLVTSGKSVTLLCQSRSPMDTFLLIKERAAHPLLHLRSEHGAQQHQAEFPMSPVTSVHGGTYRCFSSHGFSHYLLSHPSDPLELIVSGSLEDPRPSPTRSVSTAAGPEDQPLMPTGSVPHSGLRRHWEVLIGVLVVSILLLSLLLFLLLQHWRQGKHRTLAQRQADFQRPPGAAEPEPKDGGLQRRSSPAADVQGENFCAAVKNTQPEDGVEMDTRSPHDEDPQAVTYAKVKHSRPRREMASPPSPLSGEFLDTKDRQAEEDRQMDTEAAASEAPQDVTYAQLHSFTLRQKATEPPPSQEGASPAEPSVYATLAIH

SEQ ID NO: 24776 - protein, 436 aa, Artificial Sequence
  Synthetic polypeptide
GWREWRGRNAGACRGLNRRGNRFSLEPPGGHGSDSSFILAQGDPFWTCDLRDGLSLGPRTHMQAGPLPKPTLWAEPGSVISWGNSVTIWCQGTLEAREYRLDKEESPAPWDRQNPLEPKNKARFSIPSMTEDYAGRYRCYYRSPVGWSQPSDPLELVMTGAYSKPTLSALPSPLVTSGKSVTLLCQSRSPMDTFLLIKERAAHPLLHLRSEHGAQQHQAEFPMSPVTSVHGGTYRCFSSHGFSHYLLSHPSDPLELIVSGSLEDPRPSPTRSVSTAAGPEDQPLMPTGSVPHSGLRRHWEVLIGVLVVSILLLSLLLFLLLQHWRQGKHRTLAQRQADFQRPPGAAEPEPKDGGLQRRSSPAADVQGENFCAAVKNTQPEDGVEMDTRAAASEAPQDVTYAQLHSFTLRQKATEPPPSQEGASPAEPSVYATLAIH

SEQ ID NO: 24777 - protein, 490 aa, Artificial Sequence
  Synthetic polypeptide
GWREWRGRNAGACRGLNRRGNRFSLEPPGGHGSDSSFILAQGDPFWTCDLRDGLSLGPRTHMQAGPLPKPTLWAEPGSVISWGNSVTIWCQGTLEAREYRLDKEESPAPWDRQNPLEPKNKARFSIPSMTEDYAGRYRCYYRSPVGWSQPSDPLELVMTGAYSKPTLSALPSPLVTSGKSVTLLCQSRSPMDTFLLIKERAAHPLLHLRSEHGAQQHQAEFPMSPVTSVHGGTYRCFSSHGFSHYLLSHPSDPLELIVSGSLEDPRPSPTRSVSTAAGPEDQPLMPTGSVPHSGLRRHWEVLIGVLVVSILLLSLLLFLLLQHWRQGKHRTLAQRQADFQRPPGAAEPEPKDGGLQRRSSPAADVQGENFSGAAVKNTQPEDGVEMDTRQSPHDEDPQAVTYAKVKHSRPRREMASPPSPLSGEFLDTKDRQAEEDRQMDTEAAASEAPQDVTYAQLHSFTLRQKATEPPPSQEGASPAEPSVYATLAIH

SEQ ID NO: 24778 - protein, 440 aa, Artificial Sequence
  Synthetic polypeptide
GWREWRGRNAGACRGLNRRGNRFSLEPPGGHGSDSSFILAQGDPFWTCDLRDGLSLGPRTHMQAGPLPKPTLWAEPGSVISWGNSVTIWCQGTLEAREYRLDKEESPAPWDRQNPLEPKNKARFSIPSMTEDYAGRYRCYYRSPVGWSQPSDPLELVMTGAYSKPTLSALPSPLVTSGKSVTLLCQSRSPMDTFLLIKERAAHPLLHLRSEHGAQQHQAEFPMSPVTSVHGGTYRCFSSHGFSHYLLSHPSDPLELIVSGSLEDPRPSPTRSVSTAGPEDQPLMPTGSVPHSGLRRHWEVLIGVLVVSILLLSLLLFLLLQHWRQGKHRTLAQRQADFQRPPGAAEPEPKDGGLQRRSSPAADVQGENFCAAVKNTQPEDGVEMDTRQSPHDEDPQAVTYAKVKHSRPRREMASPPSPLSGEFLDTKDRQAEEDRQMDTE

SEQ ID NO: 24779 - protein, 16 aa, Artificial Sequence
  Synthetic polypeptide
SQHFGRPRWADHKKQL

SEQ ID NO: 24780 - protein, 28 aa, Artificial Sequence
  Synthetic polypeptide
PSAVAHACNPNTLGGRGGRITRSSFEIL

SEQ ID NO: 24781 - protein, 68 aa, Artificial Sequence
  Synthetic polypeptide
QARWLTPVIPTLWEAEVGGSQEAALKSFNKRKPLSLGITRKERPPLDVDEMLERFKTEAQAFTETKGN

SEQ ID NO: 24782 - protein, 52 aa, Artificial Sequence
  Synthetic polypeptide
QARWLTPVIPTLWEAEVGGSQEAALKSFNKRKPLSLGITRKERPPLDVDEML

SEQ ID NO: 24783 - protein, 82 aa, Artificial Sequence
  Synthetic polypeptide
QARWLTPVIPTLWEAEVGGSQEAALKSFNKRKPLSLGITRKERPPLDVDEMLERFKTEAQAFTETKGNVICLGKEVFKGKKP

SEQ ID NO: 24784 - protein, 990 aa, Artificial Sequence
  Synthetic polypeptide
QARWLTPVIPTLWEAEVGGSQEAALKSFNKRKPLSLGITRKERPPLDVDEMLERFKTEAQAFTETKGNVICLGKEVFKGKKPDKDNRCRYILKTKFREMWKSWPGDSKEVQVMAERYKMLIPFSNPRVLPGPFSYTVVLYGPAGLGKTTLAQKLMLDWAEDNLIHKFKYAFYLSCRELSRLGPCSFAELVFRDWPELQDDIPHILAQARKILFVIDGFDELGAAPGALIEDICGDWEKKKPVPVLLGSLLNRVMLPKAALLVTTRPRALRDLRILAEEPIYIRVEGFLEEDRRAYFLRHFGDEDQAMRAFELMRSNAALFQLGSAPAVCWIVCTTLKLQMEKGEDPVPTCLTRTGLFLRFLCSRFPQGAQLRGALRTLSLLAAQGLWAQTSVLHREDLERLGVQESDLRLFLDGDILRQDRVSKGCYSFIHLSFQQFLTALFYTLEKEEEEDRDGHTWDIGDVQKLLSGVERLRNPDLIQAGYYSFGLANEKRAKELEATFGCRMSPDIKQELLRCDISCKGGHSTVTDLQELLGCLYESQEEELVKEVMAQFKEISLHLNAVDVVPSSFCVKHCRNLQKMSLQVIKENLPENVTASESDAEVERSQDDQHMLPFWTDLCSIFGSNKDLMGLAINDSFLSASLVRILCEQIASDTCHLQRVVFKNISPADAHRNLCLALRGHKTVTYLTLQGNDQDDMFPALCEVLRHPECNLRYLGLVSCSATTQQWADLSLALEVNQSLTCVNLSDNELLDEGAKLLYTTLRHPKCFLQRLSLENCHLTEANCKDLAAVLVVSRELTHLCLAKNPIGNTGVKFLCEGLRYPECKLQTLVLWNCDITSDGCCDLTKLLQEKSSLLCLDLGLNHIGVKGMKFLCEALRKPLCNLRCLWLWGCSIPPFSCEDLCSALSCNQSLVTLDLGQNPLGSSGVKMLFETLTCSSGTLRTLRLKIDDFNDELNKLLEEIEEKNPQLIIDTEKHHPWAERPSSHDFMI

SEQ ID NO: 24785 - protein, 966 aa, Artificial Sequence
  Synthetic polypeptide
QARWLTPVIPTLWEAEVGGSQEAALKSFNKRKPLSLAFTETKGNVICLGKEVFKGKKPDKDNRCRYILKTKFREMWKSWPGDSKEVQVMAERYKMLIPFSNPRVLPGPFSYTVVLYGPAGLGKTTLAQKLMLDWAEDNLIHKFKYAFYLSCRELSRLGPCSFAELVFRDWPELQDDIPHILAQARKILFVIDGFDELGAAPGALIEDICGDWEKKKPVPVLLGSLLNRVMLPKAALLVTTRPRALRDLRILAEEPIYIRVEGFLEEDRRAYFLRHFGDEDQAMRAFELMRSNAALFQLGSAPAVCWIVCTTLKLQMEKGEDPVPTCLTRTGLFLRFLCSRFPQGAQLRGALRTLSLLAAQGLWAQTSVLHREDLERLGVQESDLRLFLDGDILRQDRVSKGCYSFIHLSFQQFLTALFYTLEKEEEEDRDGHTWDIGDVQKLLSGVERLRNPDLIQAGYYSFGLANEKRAKELEATFGCRMSPDIKQELLRCDISCKGGHSTVTDLQELLGCLYESQEEELVKEVMAQFKEISLHLNAVDVVPSSFCVKHCRNLQKMSLQVIKENLPENVTASESDAEVERSQDDQHMLPFWTDLCSIFGSNKDLMGLAINDSFLSASLVRILCEQIASDTCHLQRVVFKNISPADAHRNLCLALRGHKTVTYLTLQGNDQDDMFPALCEVLRHPECNLRYLGLVSCSATTQQWADLSLALEVNQSLTCVNLSDNELLDEGAKLLYTTLRHPKCFLQRLSLENCHLTEANCKDLAAVLVVSRELTHLCLAKNPIGNTGVKFLCEGLRYPECKLQTLVLWNCDITSDGCCDLTKLLQEKSSLLCLDLGLNHIGVKGMKFLCEALRKPLCNLRCLWLWGCSIPPFSCEDLCSALSCNQSLVTLDLGQNPLGSSGVKMLFETLTCSSGTLRTLRLKIDDFNDELNKLLEEIEEKNPQLIIDTEKHHPWAERPSSHDFMI

SEQ ID NO: 24786 - protein, 968 aa, Artificial Sequence
  Synthetic polypeptide
QARWLTPVIPTLWEAEVGGSQEAALKSFNKRKPLSLGITRKERPPLDVDEMLERFKTEAQDKDNRCRYILKTKFREMWKSWPGDSKEVQVMAERYKMLIPFSNPRVLPGPFSYTVVLYGPAGLGKTTLAQKLMLDWAEDNLIHKFKYAFYLSCRELSRLGPCSFAELVFRDWPELQDDIPHILAQARKILFVIDGFDELGAAPGALIEDICGDWEKKKPVPVLLGSLLNRVMLPKAALLVTTRPRALRDLRILAEEPIYIRVEGFLEEDRRAYFLRHFGDEDQAMRAFELMRSNAALFQLGSAPAVCWIVCTTLKLQMEKGEDPVPTCLTRTGLFLRFLCSRFPQGAQLRGALRTLSLLAAQGLWAQTSVLHREDLERLGVQESDLRLFLDGDILRQDRVSKGCYSFIHLSFQQFLTALFYTLEKEEEEDRDGHTWDIGDVQKLLSGVERLRNPDLIQAGYYSFGLANEKRAKELEATFGCRMSPDIKQELLRCDISCKGGHSTVTDLQELLGCLYESQEEELVKEVMAQFKEISLHLNAVDVVPSSFCVKHCRNLQKMSLQVIKENLPENVTASESDAEVERSQDDQHMLPFWTDLCSIFGSNKDLMGLAINDSFLSASLVRILCEQIASDTCHLQRVVFKNISPADAHRNLCLALRGHKTVTYLTLQGNDQDDMFPALCEVLRHPECNLRYLGLVSCSATTQQWADLSLALEVNQSLTCVNLSDNELLDEGAKLLYTTLRHPKCFLQRLSLENCHLTEANCKDLAAVLVVSRELTHLCLAKNPIGNTGVKFLCEGLRYPECKLQTLVLWNCDITSDGCCDLTKLLQEKSSLLCLDLGLNHIGVKGMKFLCEALRKPLCNLRCLWLWGCSIPPFSCEDLCSALSCNQSLVTLDLGQNPLGSSGVKMLFETLTCSSGTLRTLRLKIDDFNDELNKLLEEIEEKNPQLIIDTEKHHPWAERPSSHDFMI

SEQ ID NO: 24787 - protein, 37 aa, Artificial Sequence
  Synthetic polypeptide
QARWLTPVIPTLWEAEVGGSQEAALKSFNKRKPLSLG

SEQ ID NO: 24788 - protein, 132 aa, Artificial Sequence
  Synthetic polypeptide
QARWLTPVIPTLWEAEVGGSQEAALKSFNKRKPLSLGITRKERPPLDVDEMLERFKTEAQAFTETKGNVICLGKEVFKGKKPDKDNRCRYILKTKFREMWKSWPGDSKEVQVMAERYKMLIPFSNPRVLPGP

SEQ ID NO: 24789 - protein, 987 aa, Artificial Sequence
  Synthetic polypeptide
QARWLTPVIPTLWEAEVGGSQEAALKSFNKRKPLSLGITRKERPPLDVDEMLERFKTEAQETKGNVICLGKEVFKGKKPDKDNRCRYILKTKFREMWKSWPGDSKEVQVMAERYKMLIPFSNPRVLPGPFSYTVVLYGPAGLGKTTLAQKLMLDWAEDNLIHKFKYAFYLSCRELSRLGPCSFAELVFRDWPELQDDIPHILAQARKILFVIDGFDELGAAPGALIEDICGDWEKKKPVPVLLGSLLNRVMLPKAALLVTTRPRALRDLRILAEEPIYIRVEGFLEEDRRAYFLRHFGDEDQAMRAFELMRSNAALFQLGSAPAVCWIVCTTLKLQMEKGEDPVPTCLTRTGLFLRFLCSRFPQGAQLRGALRTLSLLAAQGLWAQTSVLHREDLERLGVQESDLRLFLDGDILRQDRVSKGCYSFIHLSFQQFLTALFYTLEKEEEEDRDGHTWDIGDVQKLLSGVERLRNPDLIQAGYYSFGLANEKRAKELEATFGCRMSPDIKQELLRCDISCKGGHSTVTDLQELLGCLYESQEEELVKEVMAQFKEISLHLNAVDVVPSSFCVKHCRNLQKMSLQVIKENLPENVTASESDAEVERSQDDQHMLPFWTDLCSIFGSNKDLMGLAINDSFLSASLVRILCEQIASDTCHLQRVVFKNISPADAHRNLCLALRGHKTVTYLTLQGNDQDDMFPALCEVLRHPECNLRYLGLVSCSATTQQWADLSLALEVNQSLTCVNLSDNELLDEGAKLLYTTLRHPKCFLQRLSLENCHLTEANCKDLAAVLVVSRELTHLCLAKNPIGNTGVKFLCEGLRYPECKLQTLVLWNCDITSDGCCDLTKLLQEKSSLLCLDLGLNHIGVKGMKFLCEALRKPLCNLRCLWLWGCSIPPFSCEDLCSALSCNQSLVTLDLGQNPLGSSGVKMLFETLTCSSGTLRTLRLKIDDFNDELNKLLEEIEEKNPQLIIDTEKHHPWAERPSSHDFMI

SEQ ID NO: 24790 - protein, 161 aa, Artificial Sequence
  Synthetic polypeptide
QARWLTPVIPTLWEAEVGGSQEAALKSFNKRKPLSLGITRKERPPLDVDEMLERFKTEAQAFTETKGNVICLGKEVFKGKKPDKDNRCRYILKTKFREMWKSWPGDSKEVQVMAERYKMLIPFSNPRVLPGPFSYTVVLYGPAGLGKTTLAQKLMLDWAED

SEQ ID NO: 24791 - protein, 53 aa, Artificial Sequence
  Synthetic polypeptide
DQPGQNEAALKSFNKRKPLSLGITRKERPPLDVDEMLERFKTEAQAFTETKGN

SEQ ID NO: 24792 - protein, 35 aa, Artificial Sequence
  Synthetic polypeptide
QARWLTPVIPTLWEAEVGGSQGQESETSLAKMKQL

SEQ ID NO: 24793 - protein, 37 aa, Artificial Sequence
  Synthetic polypeptide
DQPGQNEAALKSFNKRKPLSLGITRKERPPLDVDEML

SEQ ID NO: 24794 - protein, 67 aa, Artificial Sequence
  Synthetic polypeptide
DQPGQNEAALKSFNKRKPLSLGITRKERPPLDVDEMLERFKTEAQAFTETKGNVICLGKEVFKGKKP

SEQ ID NO: 24795 - protein, 975 aa, Artificial Sequence
  Synthetic polypeptide
DQPGQNEAALKSFNKRKPLSLGITRKERPPLDVDEMLERFKTEAQAFTETKGNVICLGKEVFKGKKPDKDNRCRYILKTKFREMWKSWPGDSKEVQVMAERYKMLIPFSNPRVLPGPFSYTVVLYGPAGLGKTTLAQKLMLDWAEDNLIHKFKYAFYLSCRELSRLGPCSFAELVFRDWPELQDDIPHILAQARKILFVIDGFDELGAAPGALIEDICGDWEKKKPVPVLLGSLLNRVMLPKAALLVTTRPRALRDLRILAEEPIYIRVEGFLEEDRRAYFLRHFGDEDQAMRAFELMRSNAALFQLGSAPAVCWIVCTTLKLQMEKGEDPVPTCLTRTGLFLRFLCSRFPQGAQLRGALRTLSLLAAQGLWAQTSVLHREDLERLGVQESDLRLFLDGDILRQDRVSKGCYSFIHLSFQQFLTALFYTLEKEEEEDRDGHTWDIGDVQKLLSGVERLRNPDLIQAGYYSFGLANEKRAKELEATFGCRMSPDIKQELLRCDISCKGGHSTVTDLQELLGCLYESQEEELVKEVMAQFKEISLHLNAVDVVPSSFCVKHCRNLQKMSLQVIKENLPENVTASESDAEVERSQDDQHMLPFWTDLCSIFGSNKDLMGLAINDSFLSASLVRILCEQIASDTCHLQRVVFKNISPADAHRNLCLALRGHKTVTYLTLQGNDQDDMFPALCEVLRHPECNLRYLGLVSCSATTQQWADLSLALEVNQSLTCVNLSDNELLDEGAKLLYTTLRHPKCFLQRLSLENCHLTEANCKDLAAVLVVSRELTHLCLAKNPIGNTGVKFLCEGLRYPECKLQTLVLWNCDITSDGCCDLTKLLQEKSSLLCLDLGLNHIGVKGMKFLCEALRKPLCNLRCLWLWGCSIPPFSCEDLCSALSCNQSLVTLDLGQNPLGSSGVKMLFETLTCSSGTLRTLRLKIDDFNDELNKLLEEIEEKNPQLIIDTEKHHPWAERPSSHDFMI

SEQ ID NO: 24796 - protein, 951 aa, Artificial Sequence
  Synthetic polypeptide
DQPGQNEAALKSFNKRKPLSLAFTETKGNVICLGKEVFKGKKPDKDNRCRYILKTKFREMWKSWPGDSKEVQVMAERYKMLIPFSNPRVLPGPFSYTVVLYGPAGLGKTTLAQKLMLDWAEDNLIHKFKYAFYLSCRELSRLGPCSFAELVFRDWPELQDDIPHILAQARKILFVIDGFDELGAAPGALIEDICGDWEKKKPVPVLLGSLLNRVMLPKAALLVTTRPRALRDLRILAEEPIYIRVEGFLEEDRRAYFLRHFGDEDQAMRAFELMRSNAALFQLGSAPAVCWIVCTTLKLQMEKGEDPVPTCLTRTGLFLRFLCSRFPQGAQLRGALRTLSLLAAQGLWAQTSVLHREDLERLGVQESDLRLFLDGDILRQDRVSKGCYSFIHLSFQQFLTALFYTLEKEEEEDRDGHTWDIGDVQKLLSGVERLRNPDLIQAGYYSFGLANEKRAKELEATFGCRMSPDIKQELLRCDISCKGGHSTVTDLQELLGCLYESQEEELVKEVMAQFKEISLHLNAVDVVPSSFCVKHCRNLQKMSLQVIKENLPENVTASESDAEVERSQDDQHMLPFWTDLCSIFGSNKDLMGLAINDSFLSASLVRILCEQIASDTCHLQRVVFKNISPADAHRNLCLALRGHKTVTYLTLQGNDQDDMFPALCEVLRHPECNLRYLGLVSCSATTQQWADLSLALEVNQSLTCVNLSDNELLDEGAKLLYTTLRHPKCFLQRLSLENCHLTEANCKDLAAVLVVSRELTHLCLAKNPIGNTGVKFLCEGLRYPECKLQTLVLWNCDITSDGCCDLTKLLQEKSSLLCLDLGLNHIGVKGMKFLCEALRKPLCNLRCLWLWGCSIPPFSCEDLCSALSCNQSLVTLDLGQNPLGSSGVKMLFETLTCSSGTLRTLRLKIDDFNDELNKLLEEIEEKNPQLIIDTEKHHPWAERPSSHDFMI

SEQ ID NO: 24797 - protein, 953 aa, Artificial Sequence
  Synthetic polypeptide
DQPGQNEAALKSFNKRKPLSLGITRKERPPLDVDEMLERFKTEAQDKDNRCRYILKTKFREMWKSWPGDSKEVQVMAERYKMLIPFSNPRVLPGPFSYTVVLYGPAGLGKTTLAQKLMLDWAEDNLIHKFKYAFYLSCRELSRLGPCSFAELVFRDWPELQDDIPHILAQARKILFVIDGFDELGAAPGALIEDICGDWEKKKPVPVLLGSLLNRVMLPKAALLVTTRPRALRDLRILAEEPIYIRVEGFLEEDRRAYFLRHFGDEDQAMRAFELMRSNAALFQLGSAPAVCWIVCTTLKLQMEKGEDPVPTCLTRTGLFLRFLCSRFPQGAQLRGALRTLSLLAAQGLWAQTSVLHREDLERLGVQESDLRLFLDGDILRQDRVSKGCYSFIHLSFQQFLTALFYTLEKEEEEDRDGHTWDIGDVQKLLSGVERLRNPDLIQAGYYSFGLANEKRAKELEATFGCRMSPDIKQELLRCDISCKGGHSTVTDLQELLGCLYESQEEELVKEVMAQFKEISLHLNAVDVVPSSFCVKHCRNLQKMSLQVIKENLPENVTASESDAEVERSQDDQHMLPFWTDLCSIFGSNKDLMGLAINDSFLSASLVRILCEQIASDTCHLQRVVFKNISPADAHRNLCLALRGHKTVTYLTLQGNDQDDMFPALCEVLRHPECNLRYLGLVSCSATTQQWADLSLALEVNQSLTCVNLSDNELLDEGAKLLYTTLRHPKCFLQRLSLENCHLTEANCKDLAAVLVVSRELTHLCLAKNPIGNTGVKFLCEGLRYPECKLQTLVLWNCDITSDGCCDLTKLLQEKSSLLCLDLGLNHIGVKGMKFLCEALRKPLCNLRCLWLWGCSIPPFSCEDLCSALSCNQSLVTLDLGQNPLGSSGVKMLFETLTCSSGTLRTLRLKIDDFNDELNKLLEEIEEKNPQLIIDTEKHHPWAERPSSHDFMI

SEQ ID NO: 24798 - protein, 22 aa, Artificial Sequence
  Synthetic polypeptide
DQPGQNEAALKSFNKRKPLSLG

SEQ ID NO: 24799 - protein, 117 aa, Artificial Sequence
  Synthetic polypeptide
DQPGQNEAALKSFNKRKPLSLGITRKERPPLDVDEMLERFKTEAQAFTETKGNVICLGKEVFKGKKPDKDNRCRYILKTKFREMWKSWPGDSKEVQVMAERYKMLIPFSNPRVLPGP

SEQ ID NO: 24800 - protein, 972 aa, Artificial Sequence
  Synthetic polypeptide
DQPGQNEAALKSFNKRKPLSLGITRKERPPLDVDEMLERFKTEAQETKGNVICLGKEVFKGKKPDKDNRCRYILKTKFREMWKSWPGDSKEVQVMAERYKMLIPFSNPRVLPGPFSYTVVLYGPAGLGKTTLAQKLMLDWAEDNLIHKFKYAFYLSCRELSRLGPCSFAELVFRDWPELQDDIPHILAQARKILFVIDGFDELGAAPGALIEDICGDWEKKKPVPVLLGSLLNRVMLPKAALLVTTRPRALRDLRILAEEPIYIRVEGFLEEDRRAYFLRHFGDEDQAMRAFELMRSNAALFQLGSAPAVCWIVCTTLKLQMEKGEDPVPTCLTRTGLFLRFLCSRFPQGAQLRGALRTLSLLAAQGLWAQTSVLHREDLERLGVQESDLRLFLDGDILRQDRVSKGCYSFIHLSFQQFLTALFYTLEKEEEEDRDGHTWDIGDVQKLLSGVERLRNPDLIQAGYYSFGLANEKRAKELEATFGCRMSPDIKQELLRCDISCKGGHSTVTDLQELLGCLYESQEEELVKEVMAQFKEISLHLNAVDVVPSSFCVKHCRNLQKMSLQVIKENLPENVTASESDAEVERSQDDQHMLPFWTDLCSIFGSNKDLMGLAINDSFLSASLVRILCEQIASDTCHLQRVVFKNISPADAHRNLCLALRGHKTVTYLTLQGNDQDDMFPALCEVLRHPECNLRYLGLVSCSATTQQWADLSLALEVNQSLTCVNLSDNELLDEGAKLLYTTLRHPKCFLQRLSLENCHLTEANCKDLAAVLVVSRELTHLCLAKNPIGNTGVKFLCEGLRYPECKLQTLVLWNCDITSDGCCDLTKLLQEKSSLLCLDLGLNHIGVKGMKFLCEALRKPLCNLRCLWLWGCSIPPFSCEDLCSALSCNQSLVTLDLGQNPLGSSGVKMLFETLTCSSGTLRTLRLKIDDFNDELNKLLEEIEEKNPQLIIDTEKHHPWAERPSSHDFMI

SEQ ID NO: 24801 - protein, 146 aa, Artificial Sequence
  Synthetic polypeptide
DQPGQNEAALKSFNKRKPLSLGITRKERPPLDVDEMLERFKTEAQAFTETKGNVICLGKEVFKGKKPDKDNRCRYILKTKFREMWKSWPGDSKEVQVMAERYKMLIPFSNPRVLPGPFSYTVVLYGPAGLGKTTLAQKLMLDWAED

SEQ ID NO: 24802 - protein, 29 aa, Artificial Sequence
  Synthetic polypeptide
KLFNLSAQKPQCFPMSIQVVGMFHPSVQL

SEQ ID NO: 24803 - protein, 120 aa, Artificial Sequence
  Synthetic polypeptide
SYLTSLLKSLSASLCQSRLWGCSIPPFSCEDLCSALSCNQSLVTLDLGQNPLGSSGVKMLFETLTCSSGTLRTLRLKIDDFNDELNKLLEEIEEKNPQLIIDTEKHHPWAERPSSHDFMI

SEQ ID NO: 24804 - protein, 53 aa, Artificial Sequence
  Synthetic polypeptide
PLCSKASVLPYVNPGCGDVPSLRSVVKTSALPSAATRASSLWTWVRIPWGLVE

SEQ ID NO: 24805 - protein, 17 aa, Artificial Sequence
  Synthetic polypeptide
NKTNGQEVLNSQKPPLN

SEQ ID NO: 24806 - protein, 410 aa, Artificial Sequence
  Synthetic polypeptide
FLKQNKRTRSIEFSEATAELTVSFTNEVFTTETSRSITASPKESDSPAGESCPPVLHQGQPGPDMPRGCDPNNPGGVSGRGLAQPEEAPAAQGQGCAEAASAPPAPPADPEIKRGSGWRPTGCSQPRVMFMTAEPQARSYPREGSWHGRRLKDWRVWSVEAGGQRLQLWKRGHAASSWCSIREPFGQCLSVCLPLCLRAPSIWDGRNLWRPHPPPCTLWMTWYPGWTTYWPLSSTSLIWAPDGSLRFPALRVDSVPSSVQNPPVLPFGPLCSCLVFPRNSHPHSISHCGLTNLLSSLRTGLAGSLGMSFIFLSVKLARCPLPFTLENKISLCNMVKPHLYQQNKKTQKLARCGGASLYSQQLRGLRWENGLSLGGRGCSELRSHHCTLARVTKPDFVSKNTGMNMSITLI

SEQ ID NO: 24807 - protein, 129 aa, Artificial Sequence
  Synthetic polypeptide
FLKQNKRTRSIEFSEATAELTVSFTNEVFTTETSRSITASPKESDSPAGPARQYYTKGNLVRICLGAVILIILAGFLAEDWHSRRKRLRHRGRAVQRPLPPLPPLPLTRKSNGGQDGGRQDVHSRGLCS

SEQ ID NO: 24808 - protein, 65 aa, Artificial Sequence
  Synthetic polypeptide
LPPLFPASLPSTASLASSLLLEWTSLAASLLLSGSFCQTLALSPARPGGVVRRGRNPTVSDSVWL

SEQ ID NO: 24809 - protein, 524 aa, Artificial Sequence
  Synthetic polypeptide
NGPAWLPHYFFQGVFAKPSLSAQPGPAVSSGGDVTLQCQTRYGFDQFALYKEGDPAPYKNPERWYRASFPIITVTAAHSGTYRCYSFSSRDPYLWSAPSDPLELVVTGTSVTPSRLPTEPPSPVAEFSEATAELTVSFTNEVFTTETSRSITASPKESDSPAGESCPPVLHQGQPGPDMPRGCDPNNPGGVSGRGLAQPEEAPAAQGQGCAEAASAPPAPPADPEIKRGSGWRPTGCSQPRVMFMTAEPQARSYPREGSWHGRRLKDWRVWSVEAGGQRLQLWKRGHAASSWCSIREPFGQCLSVCLPLCLRAPSIWDGRNLWRPHPPPCTLWMTWYPGWTTYWPLSSTSLIWAPDGSLRFPALRVDSVPSSVQNPPVLPFGPLCSCLVFPRNSHPHSISHCGLTNLLSSLRTGLAGSLGMSFIFLSVKLARCPLPFTLENKISLCNMVKPHLYQQNKKTQKLARCGGASLYSQQLRGLRWENGLSLGGRGCSELRSHHCTLARVTKPDFVSKNTGMNMSITLI

SEQ ID NO: 24810 - protein, 54 aa, Artificial Sequence
  Synthetic polypeptide
PSPLPCLTPLHSITGLLSATRMDQPGCLITSFREFLPNPRSQPSPARRCRQEGT

SEQ ID NO: 24811 - protein, 225 aa, Artificial Sequence
  Synthetic polypeptide
NGPAWLPHYFFQGVFAKPSLSAQPGPAVSSGGDVTLQCQTRYGFDQFALYKEGDPAPYKNPERWYRASFPIITVTAAHSGTYRCYSFSSRDPYLWSAPSDPLELVVTEFSEATAELTVSFTNEVFTTETSRSITASPKESDSPAGPARQYYTKGNLVRICLGAVILIILAGFLAEDWHSRRKRLRHRGRAVQRPLPPLPPLPLTRKSNGGQDGGRQDVHSRGLCS

SEQ ID NO: 24812 - protein, 243 aa, Artificial Sequence
  Synthetic polypeptide
NGPAWLPHYFFQGVFAKPSLSAQPGPAVSSGGDVTLQCQTRYGFDQFALYKEGDPAPYKNPERWYRASFPIITVTAAHSGTYRCYSFSSRDPYLWSAPSDPLELVVTGTSVTPSRLPTEPPSPVAEFSEATAELTVSFTNEVFTTETSRSITASPKESDSPAGPARQYYTKGNLVRICLGAVILIILAGFLAEDWHSRRKRLRHRGRAVQRPLPPLPPLPLTRKSNGGQDGGRQDVHSRGLCS

SEQ ID NO: 24813 - protein, 98 aa, Artificial Sequence
  Synthetic polypeptide
NGPAWLPHYFFQGVFAKPSLSAQPGPAVSSGGDVTLQCQTRYGFDQFALYKEGDPAPYKNPERWYRASFPIITVTAAHSGTYRCYSFSSRDPYLWSAP

SEQ ID NO: 24814 - protein, 22 aa, Artificial Sequence
  Synthetic polypeptide
ASRQKSKYGGNIILACRDMEKC

SEQ ID NO: 24815 - protein, 24 aa, Artificial Sequence
  Synthetic polypeptide
NKPVDRRANTEATSSWPAETWRSV

SEQ ID NO: 24816 - protein, 25 aa, Artificial Sequence
  Synthetic polypeptide
SEISQSTEEQIRRQHHPGLPRHGEV

SEQ ID NO: 24817 - protein, 278 aa, Artificial Sequence
  Synthetic polypeptide
ASRQKSKYGGNIILACRDMEKCEAAAKDIRGETLNHHVNARHLDLASLKSIREFAAKIIEEEERVDILINNAGVMRCPHWTTEDGFEMQFGVNHLGHFLLTNLLLDKLKASAPSRIINLSSLAHVAGHIDFDDLNWQTRKYNTKAAYCQSKLAIVLFTKELSRRLQGSGVTVNALHPGVARTELGRHTGIHGSTFSSTTLGPIFWLLVKSPELAAQPSTYLAVAEELADVSGKYFDGLKQKAPAPEAEDEEVARRLWAESARLVGLEAPSVREQPLPR

SEQ ID NO: 24818 - protein, 69 aa, Artificial Sequence
  Synthetic polypeptide
NKPVDRRANTEATSSWPAETWRSVRRQQRTSAGRPSITMSTPGTWTWLPSSLSESLQQRSLKRRSEWTF

SEQ ID NO: 24819 - protein, 167 aa, Artificial Sequence
  Synthetic polypeptide
ASRQKSKYGGNIILACRDMEKCEAAAKDIRGETLNHHVNARHLDLASLKSIREFAAKIIEEEERVDILINNAGVMRCPHWTTEDGFEMQFGVNHLGHFLLTNLLLDKLKASAPSRIINLSSLAHVAGHIDFDDLNWQTRKYNTKAAYCQSKLAIVLFTKELSRRLQG

SEQ ID NO: 24820 - protein, 309 aa, Artificial Sequence
  Synthetic polypeptide
GHLPWKVVVRMNAPFDKTANITFSLNADDENPNANLLEICYKDRIQQFDDDEEEEDEEEAQGSGESDGEDGAWQGSQLARGARLGQPPGVRSGGSTDSEDEEEEDEEEEEDEEGIGCAARGGATPLSYPSPGPQPPGPSWTATFDPVPTDAPTSPRVSGEEELHTGPPAPQGPLSVPQGLPTQSLASPPARDALQLRSQDPTPPSAPQEATEGSKVTEPSAPCQALVSIGDLQATFHGIRSAPSSSDSATRDPSTSVPASGAHQPPQTTEGEKSPEPLGLPQSQSAQALTPPPIPNGSAPEGPASPGSQ

SEQ ID NO: 24821 - protein, 18 aa, Artificial Sequence
  Synthetic polypeptide
EGLRTLALEGGCENERTF

SEQ ID NO: 24822 - protein, 73 aa, Artificial Sequence
  Synthetic polypeptide
FQALPIADCVTLEASVAAGGHVGCLPRPAGGGGADEELPPSAVTAHAPHCWGGRAGGRPARARGGPGAAGRPV

SEQ ID NO: 24823 - protein, 291 aa, Artificial Sequence
  Synthetic polypeptide
PWRRQWLQEAMSAAFRGQREEVEQMKSCLRVLSQPMPPTAGEAEQAADQQEREGALELLADLCENMDNAADFCQLSGMHLLVGRYLEAGAAGLRWRAAQLIGTCSQNVAAIQEQVLGLGALRKLLRLLDRDACDTVRVKALFAISCLVREQEAGLLQFLRLDGFSVLMRAMQQQVQKLKVKSAFLLQNLLVGHPEHKGTLCSMGMVQQLVALVRTEHSPFHEHVLGALCSLVTDFPQGVRECREPELGLEELLRHRCQLLQQHEEYQEELEFCEKLLQTCFSSPADDSMDR

SEQ ID NO: 24824 - protein, 27 aa, Artificial Sequence
  Synthetic polypeptide
LCDLGGVSGCRRPCRLPSEASGRRWSR

SEQ ID NO: 24825 - protein, 189 aa, Artificial Sequence
  Synthetic polypeptide
PWRRQWLQEAMSAAFRGQREEVEQMKSCLRVLSQPMPPTAGEAEQAADQQEREGALELLADLCENMDNAADFCQLSGMHLLVGRYLEAGAAGLRWRAAQLIGTCSQNVAAIQEQVLGLGALRKLLRLLDRDACDTGVRECREPELGLEELLRHRCQLLQQHEEYQEELEFCEKLLQTCFSSPADDSMDR

SEQ ID NO: 24826 - protein, 146 aa, Artificial Sequence
  Synthetic polypeptide
PWRRQWLQEAMSAAFRGQREEVEQMKSCLRVLSQPMPPTAGEAEQAADQQEREGALELLADLCENMDNAADFCQLSGMHLLVGRYLEAGAAGLRWRAAQLIGTCSQNVAAIQEQVLGLGALRKLLRLLDRDACDTVRVKALFAISC

SEQ ID NO: 24827 - protein, 69 aa, Artificial Sequence
  Synthetic polypeptide
PWRRQWLQEAMSAAFRGQREEVEQMKSCLRVLSQPMPPTAGEAEQAADQQEREGALELLADLCENMDNA

SEQ ID NO: 24828 - protein, 68 aa, Artificial Sequence
  Synthetic polypeptide
PWRRQWLQEAMSAAFRGQREEVEQMKSCLRVLSQPMPPTAGEAEQAADQQEREGALELLADLCENMDN

SEQ ID NO: 24829 - protein, 173 aa, Artificial Sequence
  Synthetic polypeptide
ILTLWAAGRIQCKAPHRARRGTGGHSHSPPTAGGADDQQGDPGEEPSGPVPPHPEAGLRLLRPRAPCPASPGGSSCGSEAPASGFGPEKHLPEGVLCGPLRLCTPRPAADPGRTPTDPPLFCLRPGVRALWGPQRDAAGKGPPRTAGEAGGGPVGRSSGLPPQPGAGPRRCQT

SEQ ID NO: 24830 - protein, 428 aa, Artificial Sequence
  Synthetic polypeptide
PFGQLGGSSVKPRTGLGAEQEDTATALQRLVELTTSRVTPVRSLRDQYHLIRKLGSGSYGRVLLAQPHQGGPAVALKLLRRDLVLRSTFLREFCVGRCVSAHPGLLQTLAGPLQTPRYFAFAQEYAPCGDLSGMLQERGLPELLVKRVVAQLAGALDFLHSRGLVHADVKPDNVLVFDPVCSRVALGDLGLTRPEGSPTPAPPVPLPTAPPELCLLLPPDTLPLRPAVDSWGLGVLLFCAATACFPWDVALAPNPEFEAFAGWVTTKPQPPQPPPPWDQFAPPALALLQGLLDLDPETRSPPLAVLDFLGDDWGLQGNREGPGFWGAPCPMRTGRREAQAWRSGQMRVMTAKVVGGRGQMGELPDQVTETGGQSLGQRPFPQPPGPPGWRDSCTREDREGTHCTLPTERWAWTRIPLPTEDPRAQLLP

SEQ ID NO: 24831 - protein, 16 aa, Artificial Sequence
  Synthetic polypeptide
ARNRRTQPQPSNGWWS

SEQ ID NO: 24832 - protein, 91 aa, Artificial Sequence
  Synthetic polypeptide
ILTLWAAGRIQCKAPHRARRGTGGHSHSPPTAGGADDQQGDPGEEPSGPVPPHPEAGLRLLRPRAPCPASPGGSSCGSEAPASGFGPEKHL

SEQ ID NO: 24833 - protein, 88 aa, Artificial Sequence
  Synthetic polypeptide
PFGQLGGSSVKPRTGLGAEQEDTATALQRLVELTTSRVTPVRSLRDQYHLIRKLGSGSYGRVLLAQPHQGGPAVALKLLRRDLVLRST

SEQ ID NO: 24834 - protein, 18 aa, Artificial Sequence
  Synthetic polypeptide
PGPGTKRTQPQPSNGWWS

SEQ ID NO: 24835 - protein, 167 aa, Artificial Sequence
  Synthetic polypeptide
VKKRERPRERDQGLAPRGHSHSPPTAGGADDQQGDPGEEPSGPVPPHPEAGLRLLRPRAPCPASPGGSSCGSEAPASGFGPEKHLPEGVLCGPLRLCTPRPAADPGRTPTDPPLFCLRPGVRALWGPQRDAAGKGPPRTAGEAGGGPVGRSSGLPPQPGAGPRRCQT

SEQ ID NO: 24836 - protein, 423 aa, Artificial Sequence
  Synthetic polypeptide
KRERDRESVTRAWHQEDTATALQRLVELTTSRVTPVRSLRDQYHLIRKLGSGSYGRVLLAQPHQGGPAVALKLLRRDLVLRSTFLREFCVGRCVSAHPGLLQTLAGPLQTPRYFAFAQEYAPCGDLSGMLQERGLPELLVKRVVAQLAGALDFLHSRGLVHADVKPDNVLVFDPVCSRVALGDLGLTRPEGSPTPAPPVPLPTAPPELCLLLPPDTLPLRPAVDSWGLGVLLFCAATACFPWDVALAPNPEFEAFAGWVTTKPQPPQPPPPWDQFAPPALALLQGLLDLDPETRSPPLAVLDFLGDDWGLQGNREGPGFWGAPCPMRTGRREAQAWRSGQMRVMTAKVVGGRGQMGELPDQVTETGGQSLGQRPFPQPPGPPGWRDSCTREDREGTHCTLPTERWAWTRIPLPTEDPRAQLLP

SEQ ID NO: 24837 - protein, 85 aa, Artificial Sequence
  Synthetic polypeptide
VKKRERPRERDQGLAPRGHSHSPPTAGGADDQQGDPGEEPSGPVPPHPEAGLRLLRPRAPCPASPGGSSCGSEAPASGFGPEKHL

SEQ ID NO: 24838 - protein, 83 aa, Artificial Sequence
  Synthetic polypeptide
KRERDRESVTRAWHQEDTATALQRLVELTTSRVTPVRSLRDQYHLIRKLGSGSYGRVLLAQPHQGGPAVALKLLRRDLVLRST

SEQ ID NO: 24839 - protein, 98 aa, Artificial Sequence
  Synthetic polypeptide
GQAWWLMPVILALWEAKADGSLEVVGNCRKLGAPKVFYIAADMASPEAPESVVQFALDKLGGLDYLVLNHIGGAPAGTRARSPQATRWLMQVNFVSYV

SEQ ID NO: 24840 - protein, 13 aa, Artificial Sequence
  Synthetic polypeptide
HFGRPRRMDHLRW

SEQ ID NO: 24841 - protein, 46 aa, Artificial Sequence
  Synthetic polypeptide
GQAWWLMPVILALWEAKADGSLEVVGNCRKLGAPKVFYIAADMASP

SEQ ID NO: 24842 - protein, 241 aa, Artificial Sequence
  Synthetic polypeptide
GQAWWLMPVILALWEAKADGSLEVVGNCRKLGAPKVFYIAADMASPEAPESVVQFALDKLGGLDYLVLNHIGGAPAGTRARSPQATRWLMQVNFVSYVQLTSRALPSLTDSKGSLVVVSSLLGRVPTSFSTPYSAAKFALDGFFGSLRRELDVQDVNVAITMCVLGLRDRASAAEAVRGVTRVKAAPGPKAALAVIRGGATRAAGVFYPWRFRLLCLLRRWLPRPRAWFIRQELNVTAAAA

SEQ ID NO: 24843 - protein, 270 aa, Artificial Sequence
  Synthetic polypeptide
GQAWWLMPVILALWEAKADGSLEVVGNCRKLGAPKVFYIAADMASPEAPESVVQFALDKLGGLDYLVLNHIGGAPAGTRARSPQATRWLMQVNFVSYVQLTSRALPSLTDSKGSLVVVSSLLGRVPTSFSTPYSAAKFALDGFFGSLRRELDVQDVNVAITMCVLGLRDRASAAEAVRSSTSRPRQPEHRGVPLQSQTAMFLPPTVPGARTLTETPLRGWPQPKMKSSRQKSKTEKNDGHLEPVTAWEVQVPRVRRLCRGLARPHLFGHD

SEQ ID NO: 24844 - protein, 4 aa, Artificial Sequence
  Synthetic polypeptide
HQGC

SEQ ID NO: 24845 - protein, 463 aa, Artificial Sequence
  Synthetic polypeptide
LFHESFLSNQIISCMRARNMCHASLGSASECSTKDAESYQNVVDLAEDRKPHNTIQDNMENYRKLLSLGFLAQDSVPAEKRNTEMLDNLPSAGSQFPDFKHLGTFLVFEELVTFEDVLVDFSPEELSSLSAAQRNLYREVMLENYRNLVSLGHQFSKPDIISRLEEEESYAMETDSRHTVICQGESHDDPLEPHQGNQEKLLTPITMNDPKTLTPERSYGSDEFERSSNLSKQSKDPLGKDPQEGTAPGICTSPQSASQENKHNRCEFCKRTFSTQVALRRHERIHTGKKPYECKQCAEAFYLMPHLNRHQKTHSGRKTSGCNEGRKPSVQCANLCERVRIHSQEDYFECFQCGKAFLQNVHLLQHLKAHEAARVLPPGLSHSKTYLIRYQRKHDYVGERACQCCDCGRVFSRNSYLIQHYRTHTQERPYQCQLCGKCFGRPSYLTQHYQLHSQEKTVECDHC

SEQ ID NO: 24846 - protein, 70 aa, Artificial Sequence
  Synthetic polypeptide
GQGICVMRLWDLPQSVAPRMLNHTKMWWTSLRTGNLTTQSRTTWKTTGSCSPSVSLLRTLSLQKRGTQRC

SEQ ID NO: 24847 - protein, 129 aa, Artificial Sequence
  Synthetic polypeptide
LFHESFLSNQIISCMRARNMCHASLGSASECSTKDAESYQNVVDLAEDRKPHNTIQDNMENYRKLLSLGVQLAEDDGHSHMTQGHSSRSKRSAYPSTSRGFLAQDSVPAEKRNTEMLDNLPSAGSQVGP

SEQ ID NO: 24848 - protein, 65 aa, Artificial Sequence
  Synthetic polypeptide
GQGICVMRLWDLPQSVAPRMLNHTKMWWTSLRTGNLTTQSRTTWKTTGSCSPSECSLLKTMATPT

SEQ ID NO: 24849 - protein, 98 aa, Artificial Sequence
  Synthetic polypeptide
LFHESFLSNQIISCMRARNMCHASLGSASECSTKDAESYQNVVDLAEDRKPHNTIQDNMENYRKLLSLGFLAQDSVPAEKRNTEMLDNLPSAGSQVGP

SEQ ID NO: 24850 - protein, 1399 aa, Artificial Sequence
  Synthetic polypeptide
LFHESFLSNQIISCMRARNMCHASLGSASECSTKDAESYQNVVDLAEDRKPHNTIQDNMENYRKLLSLVQLAEDDGHSHMTQGHSSRSKRSAYPSTSRGLKTMPEAKKSTHRRGICEDESSHGVIMEKFIKDVSRSSKSGRARESSDRSQRFPRMSDDNWKDISLNKRESVIQQRVYEGNAFRGGFRFNSTLVSRKRVLERKRRYHFDTDGKGSIHDQKGCPRKKPFECGSEMRKAMSVSSLSSLSSPSFTESQPIDFGAMPYVCDECGRSFSVISEFVEHQIMHTRENLYEYGESFIHSVAVSEVQKSQVGGKRFECKDCGETFNKSAALAEHRKIHARGYLVECKNQECEEAFMPSPTFSELQKIYGKDKFYECRVCKETFLHSSALIEHQKIHFGDDKDNEREHERERERERGETFRPSPALNEFQKMYGKEKMYECKVCGETFLHSSSLKEHQKIHTRGNPFENKGKVCEETFIPGQSLKRRQKTYNKEKLCDFTDGRDAFMQSSELSEHQKIHSRKNLFEGRGYEKSVIHSGPFTESQKSHTITRPLESDEDEKAFTISSNPYENQKIPTKENVYEAKSYERSVIHSLASVEAQKSHSVAGPSKPKVMAESTIQSFDAINHQRVRAGGNTSEGREYSRSVIHSLVASKPPRSHNGNELVESNEKGESSIYISDLNDKRQKIPARENPCEGGSKNRNYEDSVIQSVFRAKPQKSVPGEGSGEFKKDGEFSVPSSNVREYQKARAKKKYIEHRSNETSVIHSLPFGEQTFRPRGMLYECQECGECFAHSSDLTEHQKIHDREKPSGSRNYEWSVIRSLAPTDPQTSYAQEQYAKEQARNKCKDFRQFFATSEDLNTNQKIYDQEKSHGEESQGENTDGEETHSEETHGQETIEDPVIQGSDMEDPQKDDPDDKIYECEDCGLGFVDLTDLTDHQKVHSRKCLVDSREYTHSVIHTHSISEYQRDYTGEQLYECPKCGESFIHSSFLFEHQRIHEQDQLYSMKGCDDGFIALLPMKPRRNRAAERNPALAGSAIRCLLCGQGFIHSSALNEHMRLHREDDLLEQSQMAEEAIIPGLALTEFQRSQTEERLFECAVCGESFVNPAELADHVTVHKNEPYEYGSSYTHTSFLTEPLKGAIPFYECKDCGKSFIHSTVLTKHKELHLEEEEEDEAAAAAAAAAQEVEANVHVPQVVLRIQGLNVEAAEPEVEAAEPEVEAAEPEVEAAEPNGEAEGPDGEAAEPIGEAGQPNGEAEQPNGDADEPDGAGIEDPEERAEEPEGKAEEPEGDADEPDGVGIEDPEEGEDQEIQVEEPYYDCHECTETFTSSTAFSEHLKTHASMIIFEPANAFGECSGYIERASTSTGGANQADEKYFKCDVCGQLFNDRLSLARHQNTHTG

SEQ ID NO: 24851 - protein, 64 aa, Artificial Sequence
  Synthetic polypeptide
GQGICVMRLWDLPQSVAPRMLNHTKMWWTSLRTGNLTTQSRTTWKTTGSCSPSCSLLKTMATPT

SEQ ID NO: 24852 - protein, 1400 aa, Artificial Sequence
  Synthetic polypeptide
LFHESFLSNQIISCMRARNMCHASLGSASECSTKDAESYQNVVDLAEDRKPHNTIQDNMENYRKLLSLGVQLAEDDGHSHMTQGHSSRSKRSAYPSTSRGLKTMPEAKKSTHRRGICEDESSHGVIMEKFIKDVSRSSKSGRARESSDRSQRFPRMSDDNWKDISLNKRESVIQQRVYEGNAFRGGFRFNSTLVSRKRVLERKRRYHFDTDGKGSIHDQKGCPRKKPFECGSEMRKAMSVSSLSSLSSPSFTESQPIDFGAMPYVCDECGRSFSVISEFVEHQIMHTRENLYEYGESFIHSVAVSEVQKSQVGGKRFECKDCGETFNKSAALAEHRKIHARGYLVECKNQECEEAFMPSPTFSELQKIYGKDKFYECRVCKETFLHSSALIEHQKIHFGDDKDNEREHERERERERGETFRPSPALNEFQKMYGKEKMYECKVCGETFLHSSSLKEHQKIHTRGNPFENKGKVCEETFIPGQSLKRRQKTYNKEKLCDFTDGRDAFMQSSELSEHQKIHSRKNLFEGRGYEKSVIHSGPFTESQKSHTITRPLESDEDEKAFTISSNPYENQKIPTKENVYEAKSYERSVIHSLASVEAQKSHSVAGPSKPKVMAESTIQSFDAINHQRVRAGGNTSEGREYSRSVIHSLVASKPPRSHNGNELVESNEKGESSIYISDLNDKRQKIPARENPCEGGSKNRNYEDSVIQSVFRAKPQKSVPGEGSGEFKKDGEFSVPSSNVREYQKARAKKKYIEHRSNETSVIHSLPFGEQTFRPRGMLYECQECGECFAHSSDLTEHQKIHDREKPSGSRNYEWSVIRSLAPTDPQTSYAQEQYAKEQARNKCKDFRQFFATSEDLNTNQKIYDQEKSHGEESQGENTDGEETHSEETHGQETIEDPVIQGSDMEDPQKDDPDDKIYECEDCGLGFVDLTDLTDHQKVHSRKCLVDSREYTHSVIHTHSISEYQRDYTGEQLYECPKCGESFIHSSFLFEHQRIHEQDQLYSMKGCDDGFIALLPMKPRRNRAAERNPALAGSAIRCLLCGQGFIHSSALNEHMRLHREDDLLEQSQMAEEAIIPGLALTEFQRSQTEERLFECAVCGESFVNPAELADHVTVHKNEPYEYGSSYTHTSFLTEPLKGAIPFYECKDCGKSFIHSTVLTKHKELHLEEEEEDEAAAAAAAAAQEVEANVHVPQVVLRIQGLNVEAAEPEVEAAEPEVEAAEPEVEAAEPNGEAEGPDGEAAEPIGEAGQPNGEAEQPNGDADEPDGAGIEDPEERAEEPEGKAEEPEGDADEPDGVGIEDPEEGEDQEIQVEEPYYDCHECTETFTSSTAFSEHLKTHASMIIFEPANAFGECSGYIERASTSTGGANQADEKYFKCDVCGQLFNDRLSLARHQNTHTG

SEQ ID NO: 24853 - protein, 331 aa, Artificial Sequence
  Synthetic polypeptide
LFHESFLSNQIISCMRARNMCHASLGSASECSTKDAESYQNVVDLAEDRKPHNTIQDNMENYRKLLSLGLKTMPEAKKSTHRRGICEDESSHGVIMEKFIKDVSRSSKSGRARESSDRSQRFPRMSDDNWKDISLNKRESVIQQRVYEGNAFRGGFRFNSTLVSRKRVLERKRRYHFDTDGKGSIHDQKGCPRKKPFECGSEMRKAMSVSSLSSLSSPSFTESQPIDFGAMPYVCDECGRSFSVISEFVEHQIMHTRENLYEYGESFIHSVAVSEVQKSQVGGKRFECKDCGETFNKSAALAEHRKIHARGYLVECKNQECEEAFMPSPTF

SEQ ID NO: 24854 - protein, 54 aa, Artificial Sequence
  Synthetic polypeptide
GQGICVMRLWDLPQSVAPRMLNHTKMWWTSLRTGNLTTQSRTTWKTTGSCSPSV

SEQ ID NO: 24855 - protein, 64 aa, Artificial Sequence
  Synthetic polypeptide
CYVSSDCLTDQLIPILLPLFKRSYSLTHSNIEIRAVWSLRMCLYTSLGKNGSFLMMLRDFCTMM

SEQ ID NO: 24856 - protein, 12 aa, Artificial Sequence
  Synthetic polypeptide
HTAILKSGLCGL

SEQ ID NO: 24857 - protein, 490 aa, Artificial Sequence
  Synthetic polypeptide
NQGCVVFEDVFVYFSREEWELLDDAQRLLYHDVMLENFALLASLGIAFSRSRAVMKLERGEEPWVYDQVDMTSATEREAQRGLRPGCWHGVEDEEVSSEQSIFVAGVSEVRTLMAELESHPCDICGPILKDTLHLAKYHGGKARQKPYLCGACGKQFWFSTDFDQHQNQPNGGKLFPRKEGRDSVKSCRVHVPEKTLTCGKGRRDFSATSGLLQHQASLSSMKPHKSTKLVSGFLMGQRYHRCGECGKAFTRKDTLARHQRIHTGERPYECNECGKFFSQSYDLFKHQTVHTGERPYECSECGKFFRQISGLIEHRRVHTGERLYQCGKCGKFFSSKSNLIRHQEVHTGARPYVCSECGKEFSRKHTLVLHQRTHTGERPYECSECGKAFSQSSHLNVHWRIHSSDYECSRCGKAFSCISKLIQHQKVHSGEKPYECSKCGKAFTQRPNLIRHWKVHTGERPYVCSECGREFIRKQTLVLHQRVHAGEKL

SEQ ID NO: 24858 - protein, 27 aa, Artificial Sequence
  Synthetic polypeptide
TLGRNRHLESGHLKLDAPLGSALFTAL

SEQ ID NO: 24859 - protein, 13 aa, Artificial Sequence
  Synthetic polypeptide
NLMHLWVAPSLQP

SEQ ID NO: 24860 - protein, 53 aa, Artificial Sequence
  Synthetic polypeptide
GTQNLRALPGRQLPQWNTSPEWRVAGPHRGSMQRLNTGKEQALGVRTSETWAQ

SEQ ID NO: 24861 - protein, 20 aa, Artificial Sequence
  Synthetic polypeptide
TLGRNRHLESGHLKLGHSDF

SEQ ID NO: 24862 - protein, 156 aa, Artificial Sequence
  Synthetic polypeptide
NLGTVTFEDVAVKFTQEEWNLLSEAQRCLYRDVTLENLALMSSLGCWCGVEDEAAPSKQSIYIQRETQVRTPVTGVSPKKAHPCEMCGPILGDILHVADHQGTHHKQKLHRCEAWGNKLYDSGNFHQHQNEHIGEKPYRGSVEEALFVKRSGHCDL

SEQ ID NO: 24863 - protein, 392 aa, Artificial Sequence
  Synthetic polypeptide
NLGTVTFEDVAVKFTQEEWNLLSEAQRCLYRDVTLENLALMSSLGCWCGVEDEAAPSKQSIYIQRETQVRTPVTGVSPKKAHPCEMCGPILGDILHVADHQGTHHKQKLHRCEAWGNKLYDSGNFHQHQNEHIGEKPYRGSVEEALFVKRCKLHVSGESSVFSESGKDFLPRSGLLQQEASHTGEKSNSKTECVSPFQCGGAHYSHGDSMKHFSTKHILSQHQRLLPREECYVCCECGKSFSKYVSFSNHQRVHSGKRPYECGECEKSFSQKSSLIQHQQFHTGGKPYGCEECGKYFSLEGYLRRHQKVHAGKGPYECGECGKSFSSNVNLKSHQRIHTGERPYKCGECEKSFSRKPSLSYHQRFGRPRWVDHKDRKEFKTSLGNIVKSCLF

SEQ ID NO: 24864 - protein, 50 aa, Artificial Sequence
  Synthetic polypeptide
NLGTVTFEDVAVKFTQEEWNLLSEAQRCLYRDVTLENLALMSSLAGHCDL

SEQ ID NO: 24865 - protein, 623 aa, Artificial Sequence
  Synthetic polypeptide
NLGTVTFEDVAVKFTQEEWNLLSEAQRCLYRDVTLENLALMSSLGCWCGVEDEAAPSKQSIYIQRETQVRTPVTGVSPKKAHPCEMCGPILGDILHVADHQGTHHKQKLHRCEAWGNKLYDSGNFHQHQNEHIGEKPYRGSVEEALFVKRCKLHVSGESSVFSESGKDFLPRSGLLQQEASHTGEKSNSKTECVSPFQCGGAHYSHGDSMKHFSTKHILSQHQRLLPREECYVCCECGKSFSKYVSFSNHQRVHSGKRPYECGECEKSFSQKSSLIQHQQFHTGGKPYGCEECGKYFSLEGYLRRHQKVHAGKGPYECGECGKSFSSNVNLKSHQRIHTGERPYKCGECEKSFSRKPSLSYHQRIHTEVRPYKCGECGKSYISKGHLRIHQRMHTGERPYKCGDCGKSFNEKGHLRSHQRVHTTERPYKCGECGKCFSHKGNLILHQHGHTRKRPYMCWECGKLFKKKSHLLVHQRIHSGEKPYACEACQKFFRHKCHLTAHQRVHTGERPYECSDCGKSFTHSCAFIVHKRVHTGQKPYECSECGKSFAASSYLTSHRRVHTGQKPYECSECGKSFAGISSLTNHRRVHTGEKPYGCSECEKKFRKSSSLRYHQRVHERKAL

SEQ ID NO: 24866 - protein, 54 aa, Artificial Sequence
  Synthetic polypeptide
GTQNLRALPGRQLPQWNTSPEWRVAGPHRGSMQRLNTGKEQALGVRTSETCRAL

SEQ ID NO: 24867 - protein, 21 aa, Artificial Sequence
  Synthetic polypeptide
TLGRNRHLESGHLKLAGHCDL

SEQ ID NO: 24868 - protein, 8 aa, Artificial Sequence
  Synthetic polypeptide
NLQGTVTF

SEQ ID NO: 24869 - protein, 157 aa, Artificial Sequence
  Synthetic polypeptide
NLQGTVTFEDVAVNFSQEEWCLLSEAQRCLYRDVMLENLALISSLGCWCGSKDEEAPCKQRISVQRESQSRTPRAGVSPKKAHPCEMCGLILEDVFHFADHQETHHKQKLNRSGACGKNLDDTAYLHQHQKQHIGEKFYRKSVREASFVKKRKLRVS

SEQ ID NO: 24870 - protein, 566 aa, Artificial Sequence
  Synthetic polypeptide
NLQGTVTFEDVAVNFSQEEWCLLSEAQRCLYRDVMLENLALISSLGCWCGSKDEEAPCKQRISVQRESQSRTPRAGVSPKKAHPCEMCGLILEDVFHFADHQETHHKQKLNRSGACGKNLDDTAYLHQHQKQHIGEKFYRKSVREASFVKKRKLRVSQEPFVFREFGKDVLPSSGLCQEEAAVEKTDSETMHGPPFQEGKTNYSCGKRTKAFSTKHSVIPHQKLFTRDGCYVCSDCGKSFSRYVSFSNHQRDHTAKGPYDCGECGKSYSRKSSLIQHQRVHTGQTAYPCEECGKSFSQKGSLISHQLVHTGEGPYECRECGKSFGQKGNLIQHQQGHTGERAYHCGECGKSFRQKFCFINHQRVHTGERPYKCGECGKSFGQKGNLVHHQRGHTGERPYECKECGKSFRYRSHLTEHQRLHTGERPYNCRECGKLFNRKYHLLVHERVHTGERPYACEVCGKLFGNKHSVTIHQRIHTGERPYECSECGKSFLSSSALHVHKRVHSGQKPYKCSECGKSFSECSSLIKHRRIHTGERPYECTKCGKTFQRSSTLLHHQSSHRRKAL

SEQ ID NO: 24871 - protein, 20 aa, Artificial Sequence
  Synthetic polypeptide
CVTLTSCESGTTLKAGHCDL

SEQ ID NO: 24872 - protein, 7 aa, Artificial Sequence
  Synthetic polypeptide
KQGTVTF

SEQ ID NO: 24873 - protein, 10 aa, Artificial Sequence
  Synthetic polypeptide
KWDNLKSRAL

SEQ ID NO: 24874 - protein, 156 aa, Artificial Sequence
  Synthetic polypeptide
KQGTVTFEDVAVNFSQEEWCLLSEAQRCLYRDVMLENLALISSLGCWCGSKDEEAPCKQRISVQRESQSRTPRAGVSPKKAHPCEMCGLILEDVFHFADHQETHHKQKLNRSGACGKNLDDTAYLHQHQKQHIGEKFYRKSVREASFVKKRKLRVS

SEQ ID NO: 24875 - protein, 565 aa, Artificial Sequence
  Synthetic polypeptide
KQGTVTFEDVAVNFSQEEWCLLSEAQRCLYRDVMLENLALISSLGCWCGSKDEEAPCKQRISVQRESQSRTPRAGVSPKKAHPCEMCGLILEDVFHFADHQETHHKQKLNRSGACGKNLDDTAYLHQHQKQHIGEKFYRKSVREASFVKKRKLRVSQEPFVFREFGKDVLPSSGLCQEEAAVEKTDSETMHGPPFQEGKTNYSCGKRTKAFSTKHSVIPHQKLFTRDGCYVCSDCGKSFSRYVSFSNHQRDHTAKGPYDCGECGKSYSRKSSLIQHQRVHTGQTAYPCEECGKSFSQKGSLISHQLVHTGEGPYECRECGKSFGQKGNLIQHQQGHTGERAYHCGECGKSFRQKFCFINHQRVHTGERPYKCGECGKSFGQKGNLVHHQRGHTGERPYECKECGKSFRYRSHLTEHQRLHTGERPYNCRECGKLFNRKYHLLVHERVHTGERPYACEVCGKLFGNKHSVTIHQRIHTGERPYECSECGKSFLSSSALHVHKRVHSGQKPYKCSECGKSFSECSSLIKHRRIHTGERPYECTKCGKTFQRSSTLLHHQSSHRRKAL

SEQ ID NO: 24876 - protein, 23 aa, Artificial Sequence
  Synthetic polypeptide
GQAWWLKPGIPALWDAEQGTVTF

SEQ ID NO: 24877 - protein, 20 aa, Artificial Sequence
  Synthetic polypeptide
ARHGGSSLESQHFGMLSRAL

SEQ ID NO: 24878 - protein, 172 aa, Artificial Sequence
  Synthetic polypeptide
GQAWWLKPGIPALWDAEQGTVTFEDVAVNFSQEEWCLLSEAQRCLYRDVMLENLALISSLGCWCGSKDEEAPCKQRISVQRESQSRTPRAGVSPKKAHPCEMCGLILEDVFHFADHQETHHKQKLNRSGACGKNLDDTAYLHQHQKQHIGEKFYRKSVREASFVKKRKLRVS

SEQ ID NO: 24879 - protein, 581 aa, Artificial Sequence
  Synthetic polypeptide
GQAWWLKPGIPALWDAEQGTVTFEDVAVNFSQEEWCLLSEAQRCLYRDVMLENLALISSLGCWCGSKDEEAPCKQRISVQRESQSRTPRAGVSPKKAHPCEMCGLILEDVFHFADHQETHHKQKLNRSGACGKNLDDTAYLHQHQKQHIGEKFYRKSVREASFVKKRKLRVSQEPFVFREFGKDVLPSSGLCQEEAAVEKTDSETMHGPPFQEGKTNYSCGKRTKAFSTKHSVIPHQKLFTRDGCYVCSDCGKSFSRYVSFSNHQRDHTAKGPYDCGECGKSYSRKSSLIQHQRVHTGQTAYPCEECGKSFSQKGSLISHQLVHTGEGPYECRECGKSFGQKGNLIQHQQGHTGERAYHCGECGKSFRQKFCFINHQRVHTGERPYKCGECGKSFGQKGNLVHHQRGHTGERPYECKECGKSFRYRSHLTEHQRLHTGERPYNCRECGKLFNRKYHLLVHERVHTGERPYACEVCGKLFGNKHSVTIHQRIHTGERPYECSECGKSFLSSSALHVHKRVHSGQKPYKCSECGKSFSECSSLIKHRRIHTGERPYECTKCGKTFQRSSTLLHHQSSHRRKAL

SEQ ID NO: 24880 - protein, 585 aa, Artificial Sequence
  Synthetic polypeptide
SACSLFGFKHFLTEEPPWKSWQGTVTFEDVAVNFSQEEWCLLSEAQRCLYRDVMLENLALISSLGCWCGSKDEEAPCKQRISVQRESQSRTPRAGVSPKKAHPCEMCGLILEDVFHFADHQETHHKQKLNRSGACGKNLDDTAYLHQHQKQHIGEKFYRKSVREASFVKKRKLRVSQEPFVFREFGKDVLPSSGLCQEAAAVEKTDSETMHGPPFQEGKTNYSCGKRTKAFSTKHSVIPHQKLFTRDGCYVCSDCGKSFSRYVSFSNHQRDHTAKGPYDCGECGKSYSRKSSLIQHQRVHTGKTAYPCEECGKSFSQKGSLISHQRVHTGERPYECREYGKSFGQKGNLIQHQQGHTGERAYHCGECGKSFRQKFCFINHQRVHTGERPYKCGECGKSFGQKGNLVQHQRGHTGERPYECKECGKSFRYRSHLTEHQRLHTGERPYNCRECGKLFNRKYHLLVHERVHTGERPYACEVCGKLFGNKNCVTIHQRIHTGERPYECNECGKSFLSSSALHVHKRVHSGQKPYKCSECGKSFAECSSLIKHRRIHTGERPYECTKCGKTFQRSSTLLHHQSSHRRKAL

SEQ ID NO: 24881 - protein, 28 aa, Artificial Sequence
  Synthetic polypeptide
TDYDLHVLSLGSSISLQKSHRGSHGRAL

SEQ ID NO: 24882 - protein, 59 aa, Artificial Sequence
  Synthetic polypeptide
SRAFPFAHLTFSYLVNCMHLPPAQDYKYELIMICMFSLWVQAFPYRRATVEVMAGHCDL

SEQ ID NO: 24883 - protein, 48 aa, Artificial Sequence
  Synthetic polypeptide
KSQRAVSLLPPCEDTTKKAPSVEPESEPSPATKAADALIWDFPASRTQ

SEQ ID NO: 24884 - protein, 13 aa, Artificial Sequence
  Synthetic polypeptide
SGTSQPPELNNSA

SEQ ID NO: 24885 - protein, 137 aa, Artificial Sequence
  Synthetic polypeptide
CLDLGLPSLQNSIIRHRPALVKVILISSVAFSIALICGMAISYMIYRLAQAEERQQLESLYKNLRIPLLGDEEEGSEDEGESTHLLPENENELEKFIHSVIISKRSKNIKKKLKEEQNSVTENKTKNASHNGKMEDL

SEQ ID NO: 24886 - protein, 28 aa, Artificial Sequence
  Synthetic polypeptide
SVSSESLLLLQTGSMLPITSSPTTHRNQ

SEQ ID NO: 24887 - protein, 52 aa, Artificial Sequence
  Synthetic polypeptide
VLSPCCSFRQGPCSPSPPVPPLIGTSDLPGCGCGLYPGGMGAAGPYPEDPLP

SEQ ID NO: 24888 - protein, 19 aa, Artificial Sequence
  Synthetic polypeptide
GRVGWLRPVIPAIWEVEHR

SEQ ID NO: 24889 - protein, 188 aa, Artificial Sequence
  Synthetic polypeptide
SQQFGRWSTDDVQINDISLQDYIAVKEKYAKYLPHSAGRYAAKRFRKAQCPIVERLTNSMMMHGRNNGKKLMTVRIVKHAFEIIHLLTGENPLQVLVNAIINSGPREDSTRIGRAGTVRRQAVDVSPLRRVNQAIWLLCTGAREAAFRNIKTIAECLADELINAAKGSSNSYAIKKKDELERVAKSNR

SEQ ID NO: 24890 - protein, 33 aa, Artificial Sequence
  Synthetic polypeptide
PGGVAQACNPSNLGGGAPMMCRSMTFPCRITLQ

SEQ ID NO: 24891 - protein, 184 aa, Artificial Sequence
  Synthetic polypeptide
SQQFGRWSTDDVQINDISLQDYIAVKEKYAKYLPHSAGRYAAKRFRKAQCPIVERLTNSMMMHGRNNGKKLMTVRIVKHAFEIIHLLTGENPLQVLVNAIINSGPREDSTRIGRAGTVRRQAVDVSPLRRVNQAIWLLCTGAREAAFRNIKTIAECLADELINAAKGSSNSYAIKKKDELERVA

SEQ ID NO: 24892 - protein, 118 aa, Artificial Sequence
  Synthetic polypeptide
SQQFGRWSTDDVQINDISLQNPLQVLVNAIINSGPREDSTRIGRAGTVRRQAVDVSPLRRVNQAIWLLCTGAREAAFRNIKTIAECLADELINAAKGSSNSYAIKKKDELERVAKSNR

SEQ ID NO: 24893 - protein, 35 aa, Artificial Sequence
  Synthetic polypeptide
PGGVAQACNPSNLGGGAPMMCRSMTFPCRTLCRSW

SEQ ID NO: 24894 - protein, 209 aa, Artificial Sequence
  Synthetic polypeptide
SQQFGRWSTDDVQINDISLQMTTTSVMRGLLHQKEHHISHMDYIAVKEKYAKYLPHSAGRYAAKRFRKAQCPIVERLTNSMMMHGRNNGKKLMTVRIVKHAFEIIHLLTGENPLQVLVNAIINSGPREDSTRIGRAGTVRRQAVDVSPLRRVNQAIWLLCTGAREAAFRNIKTIAECLADELINAAKGSSNSYAIKKKDELERVAKSNR

SEQ ID NO: 24895 - protein, 29 aa, Artificial Sequence
  Synthetic polypeptide
PGGVAQACNPSNLGGGAPMMCRSMTFPCR

SEQ ID NO: 24896 - protein, 18 aa, Artificial Sequence
  Synthetic polypeptide
TSVRRRSRGRSASPTTCS

SEQ ID NO: 24897 - protein, 79 aa, Artificial Sequence
  Synthetic polypeptide
GGGAEEGLLHLRPVPEPGRQPAREPPALREAHLQQPHHGVPVQAPAGRRGDGNARRSRHGVQAQSRLPHVTHNSTLCLL

SEQ ID NO: 24898 - protein, 507 aa, Artificial Sequence
  Synthetic polypeptide
HLLGTCVLGSSTFLLFWACLQMTVKADSISLGLQMNFSEEEEPRKVCFTYDLFLNLEGNPPVNHLRCEKLTFNNPTTEFRYKLLRAGGVMVMPEGADTVSRPSPDYPMLPTIPLSAFSDPKKTKPSHGSKDANKESSKTSKPHKVTKEHRERPRKDSESKSSSKELEREQAKSSKDTSRKLGEGRLPKEEKAPPPKAAFKEPKMALKETKLESTSPKGGPPPPPPPPPRASSKRPATADSPKPSAKKQKKSSSKGSRSAPGTSPRTSSSSSFSDKKPAKDKSSTRGEKVKAESEPREAKKALEVEESNSEDEASFKSESAQSSPSNSSSSSDSSSDSDFEPSQNHSQGPLRSMVEDLQSEESDEDDSSSGEEAAGKTNPGRDSRLSFSDSESDNSADSSLPSREPPPPQKPPPPNSKVSGRRSPESCSKPEKILKKGTYDKAYTDELVELHRRLMALRERNVLQQIVNLIEETGHFNVTNTTFDFDLFSLDETTVRKLQSCLEAVAT

SEQ ID NO: 24899 - protein, 19 aa, Artificial Sequence
  Synthetic polypeptide
DQPGQWAKPQTLPSRQRRS

SEQ ID NO: 24900 - protein, 31 aa, Artificial Sequence
  Synthetic polypeptide
GQEFKTSLGNGPSHRHCHPGRGDHEAQEAAL

SEQ ID NO: 24901 - protein, 124 aa, Artificial Sequence
  Synthetic polypeptide
WAQWLTSVIPALWEAKAGGSLEAKSLRPAWAMGQATDIAIQAEEIMKLKKQLYNIYAKHTKQSLQVIESAMERDRYMSPMEAQEFGILDKVLVHPPQDGEDEPTLVQKEPVEAAPAAEPVPAST

SEQ ID NO: 24902 - protein, 70 aa, Artificial Sequence
  Synthetic polypeptide
WAQWLTSVIPALWEAKAGGSLEAKSLRPAWAMGQATDIAIQAEEIMKLKKQLYNIYAKHTKQSLQVIESA

SEQ ID NO: 24903 - protein, 53 aa, Artificial Sequence
  Synthetic polypeptide
WAQWLTSVIPALWEAKAGGSLEAKSLRPAWAMGQATDIAIQAEEIMKLKKQLY

SEQ ID NO: 24904 - protein, 326 aa, Artificial Sequence
  Synthetic polypeptide
TLILQTLITGTAGSAAPEFLMLRIWVLDTGEQLMVPVEVLEVDNKEALWKFLLSGAMAGAVSRTGTAPLDRAKVYMQVYSSKTNFTNLLGGLQSMVQEGGFRSLWRGNGINVLKIAPEYAIKFSVFEQCKNYFCGIQGSPPFQERLLAGSLAVAISQTLINPMEVLKTRLTLRRTGQYKGLLDCARQILQREGTRALYRGYLPNMLGIIPYACTDLAVYEMLQCFWVKSGRDMGDPSGLVSLSSVTLSTTCGQMASYPLTLVRTRMQAQDTVEGSNPTMRGVLQRILAQQGWLGLYRGMTPTLLKVLPAGGISYVVYEAMKKTLGI

SEQ ID NO: 24905 - protein, 12 aa, Artificial Sequence
  Synthetic polypeptide
CSEYGYWTQESS

SEQ ID NO: 24906 - protein, 25 aa, Artificial Sequence
  Synthetic polypeptide
VPNAQNMGTGHRRAADGPRGSPGSG

SEQ ID NO: 24907 - protein, 198 aa, Artificial Sequence
  Synthetic polypeptide
TLILQTLITGTAGSAAPEFLMLRIWVLDTGEQLMVPVEVLEVDNKEALWKFLLSGAMAGAVSRTGTAPLDRAKVYMQLLGRLRQENRLNLGGGGCSEPRSPDRTPAWATESTPPRRTSPTCWGGYRAWSRRAASAPCGGATASTCSRLLLSMPSSSPYSSSARITSVEYKGPRPSRSVSLLAPWLWPSPRPSSTPWRC

SEQ ID NO: 24908 - protein, 307 aa, Artificial Sequence
  Synthetic polypeptide
GQAQWLTPKIPALWEAEVGGSRGQAIATILANMVLDIGECLTVPDEFSKQEKLTGMWWKQLVAGAVAGAVSRTGTAPLDRLKVFMQVHASKTNRLNILGGLRSMVLEGGIRSLWRGNGINVLKIAPESAIKFMAYEQIKRAILGQQETLHVQERFVAGSLAGATAQTIIYPMEVLKTRLTLRRTGQYKGLLDCARRILEREGPRAFYRGYLPNVLGIIPYAGIDLAVYETLKNWWLQQYSHDSADPGILVLLACGTISSTCGQIASYPLALVRTRMQAQGWSTVARFQITATSAFQVQAILLPQPPE

SEQ ID NO: 24909 - protein, 40 aa, Artificial Sequence
  Synthetic polypeptide
ARRSGSHLKSQHFGRPKWADHEVRRSRPSWLTWSWTLASA

SEQ ID NO: 24910 - protein, 74 aa, Artificial Sequence
  Synthetic polypeptide
HGPGHWRVPDSAGRVLKAREADGHVVETAGGRRSGRCRVTDRHGPSGPPQGLHAGPCLKDQPAEHPWGASKHGP

SEQ ID NO: 24911 - protein, 340 aa, Artificial Sequence
  Synthetic polypeptide
GQAQWLTPKIPALWEAEVGGSRGQAIATILANMVLDIGECLTVPDEFSKQEKLTGMWWKQLVAGAVAGAVSRTGTAPLDRLKVFMQVHASKTNRLNILGGLRSMVLEGGIRSLWRGNGINVLKIAPESAIKFMAYEQIKRAILGQQETLHVQERFVAGSLAGATAQTIIYPMEVLKTRLTLRRTGQYKGLLDCARRILEREGPRAFYRGYLPNVLGIIPYAGIDLAVYETLKNWWLQQYSHDSADPGILVLLACGTISSTCGQIASYPLALVRTRMQAQASIEGGPQLSMLGLLRHILSQEGMRGLYRGIAPNFMKVIPAVSISYVVYENMKQALGVTSR

SEQ ID NO: 24912 - protein, 310 aa, Artificial Sequence
  Synthetic polypeptide
GQAQWLTPKIPALWEAEVGGSRGQAIATILANMVLDIGECLTVPDEFSKQEKLTGMWWKQLVAGAVAGAVSRTGTAPLDRLKVFMQVHASKTNRLNILGGLRSMVLEGGIRSLWRGNGINVLKIAPESAIKFMAYEQIKRAILGQQETLHVQERFVAGSLAGATAQTIIYPMEVLKTRLTLRRTGQYKGLLDCARRILEREGPRAFYRGYLPNVLGIIPYAGIDLAVYETLKNWWLQQYSHDSADPGILVLLACGTISSTCGQIASYPLALVRTRMQAQDVSVYKTDTVPTLIELTGRRGRKMLNKSFWN

SEQ ID NO: 24913 - protein, 37 aa, Artificial Sequence
  Synthetic polypeptide
GRTQWLTPVIPTLWDAEMGELLEPRSSRPAWATQASQ

SEQ ID NO: 24914 - protein, 31 aa, Artificial Sequence
  Synthetic polypeptide
SQHFGMPRWENCLSPEVQDQPGQHRPASDLQ

SEQ ID NO: 24915 - protein, 461 aa, Artificial Sequence
  Synthetic polypeptide
AQKFKTSLGNTGQPVTFSEEVFLAQKPGAPLQAFHRRAVHLQLFKQFIEARLEKLNKGEGFSDQFEQEITGCGASSGALRSYQLWADNLKKGGGALLHSVKAKTQPAVKNMYRSAKSGLKGVQSLLMYKDGDSVLQRGGSLRAPALPSRSDRLQQRLPITQHFGKNRPLRPSRRRQLEEGTSEPPGAGTPPLSPEDEGCPWAEEALDSSFLGSGEELDLLSEILDSLSMGAKSAGSLRPSQSLDCCHRGDLDSCFSLPNIPRWQPDDKKLPEPEPQPLSLPSLQNASSLDATSSSKDSRSQLIPSESDQEVTSPSQSSTASADPSIWGDPKPSPLTEPLILHLTPSHKAAEDSTAQENPTPWLSTAPTEPSPPESPQILAPTKPNFDIAWTSQPLDPSSDPSSLEDPRARPPKALLAERAHLQPREEPGALNSPATPTSNCQKSQPSSRPRVADLKKCFEG

SEQ ID NO: 24916 - protein, 68 aa, Artificial Sequence
  Synthetic polypeptide
DLAWLLEPVIPALSEGAAGGSLEPRSLRPAWPTWTSAGPQAILAGGPSTGPLLPAWTRAGQGAATYPS

SEQ ID NO: 24917 - protein, 149 aa, Artificial Sequence
  Synthetic polypeptide
DQPGQHGPQQDPRLYWQGGPALGRSFLHGPELDKGQLRIHRDGIYMVHIQVTLAICSSTTASRHHPTTLAVGICSPASRSISLLRLSFHQGLFGFWNWGLKVKCFLRHLIWTAHCFIPLTQLVFMQALQSWRNHHCSHFTDEENRGVNR

SEQ ID NO: 24918 - protein, 55 aa, Artificial Sequence
  Synthetic polypeptide
AQEFETSLANMDLSRTPGYTGRGAQHWAAPSCMDQSWTRGSYVSIVMASTWYTSR

SEQ ID NO: 24919 - protein, 134 aa, Artificial Sequence
  Synthetic polypeptide
DQPGQHGPQQDPRLYWQGGPALGRSFLHGPELDKGQLRIHRDGIYMVHIQVTLAICSSTTASRHHPTTLAVGICSPASRSISLLRLSFHQGCTIASQRLTPLARGDTLCTNLTGTLLPSRNTDETFFGVQWVRP

SEQ ID NO: 24920 - protein, 65 aa, Artificial Sequence
  Synthetic polypeptide
GWMRWLTPVIPALWGTYAAGSLEPRCLRPAWTSAGPQAILAGGPSTGPLLPAWTRAGQGAATYPS

SEQ ID NO: 24921 - protein, 146 aa, Artificial Sequence
  Synthetic polypeptide
DQPGPQQDPRLYWQGGPALGRSFLHGPELDKGQLRIHRDGIYMVHIQVTLAICSSTTASRHHPTTLAVGICSPASRSISLLRLSFHQGLFGFWNWGLKVKCFLRHLIWTAHCFIPLTQLVFMQALQSWRNHHCSHFTDEENRGVNR

SEQ ID NO: 24922 - protein, 52 aa, Artificial Sequence
  Synthetic polypeptide
AQMFETSLDLSRTPGYTGRGAQHWAAPSCMDQSWTRGSYVSIVMASTWYTSR

SEQ ID NO: 24923 - protein, 131 aa, Artificial Sequence
  Synthetic polypeptide
DQPGPQQDPRLYWQGGPALGRSFLHGPELDKGQLRIHRDGIYMVHIQVTLAICSSTTASRHHPTTLAVGICSPASRSISLLRLSFHQGCTIASQRLTPLARGDTLCTNLTGTLLPSRNTDETFFGVQWVRP

SEQ ID NO: 24924 - protein, 33 aa, Artificial Sequence
  Synthetic polypeptide
GWMRWLTPVIPALWGTYAAGSLEPRCLRPACGT

SEQ ID NO: 24925 - protein, 7 aa, Artificial Sequence
  Synthetic polypeptide
DQPVGRS

SEQ ID NO: 24926 - protein, 162 aa, Artificial Sequence
  Synthetic polypeptide
AQMFETSLWDVAELQLNHTGPQQDPRLYWQGGPALGRSFLHGPELDKGQLRIHRDGIYMVHIQVTLAICSSTTASRHHPTTLAVGICSPASRSISLLRLSFHQGLFGFWNWGLKVKCFLRHLIWTAHCFIPLTQLVFMQALQSWRNHHCSHFTDEENRGVNR

SEQ ID NO: 24927 - protein, 147 aa, Artificial Sequence
  Synthetic polypeptide
AQMFETSLWDVAELQLNHTGPQQDPRLYWQGGPALGRSFLHGPELDKGQLRIHRDGIYMVHIQVTLAICSSTTASRHHPTTLAVGICSPASRSISLLRLSFHQGCTIASQRLTPLARGDTLCTNLTGTLLPSRNTDETFFGVQWVRP

SEQ ID NO: 24928 - protein, 19 aa, Artificial Sequence
  Synthetic polypeptide
AQMFETSLWDVAELQLNHT

SEQ ID NO: 24929 - protein, 475 aa, Artificial Sequence
  Synthetic polypeptide
GVPVVPASREAEVGFSLSRVRSGRVRSYSTRDFQDCPLQKNSSSFLVLFLINTKDLQVQVRKYGEQKTLFIFPGLLPEAPSKPGLPKPQATVPRKVDGGGTSAASKPKSTPAVIQGPSGKDKDLVLGLSHLNNSYNFSFHVVIGSQAEEGQYSLNFHNCNNSVPGKEHPFDITVMIREKNPDGFLSAAEMPLFKLYMVMSACFLAAGIFWVSILCRNTYSVFKIHWLMAALAFTKSISLLFHSINYYFINSQGHPIEGLAVMYYIAHLLKGALLFITIALIGSGWAFIKYVLSDKEKKVFGIVIPMQVLANVAYIIIESREEGASDYVLWKEILFLVDLICCGAILFPVVWSIRHLQDASGTDGKVAVNLAKLKLFRHYYVMVICYVYFTRIIAILLQVAVPFQWQWLYQLLVEGSTLAFFVLTGYKFQPTGNNPYLQLPQEDEEDVQMEQVMTDSGFREGLSKVNKTASGRELL

SEQ ID NO: 24930 - protein, 108 aa, Artificial Sequence
  Synthetic polypeptide
SQPVGRPRWGSVSAGFGLAEFAPIQPGISRTALSRKTVAVSWSCSSSTPRICRSRCGSMESRRRCLSFPGSSRKHPPNQGSRSHRPQSPARWMAEGPLQPASPSQHPQ

SEQ ID NO: 24931 - protein, 46 aa, Artificial Sequence
  Synthetic polypeptide
PGVVRCACSPSQSGGRGGVQSQPGSVWQSSLLFNPGFPGLPSPEKQ

SEQ ID NO: 24932 - protein, 57 aa, Artificial Sequence
  Synthetic polypeptide
GVPVVPASREAEVGFSLSRVRSGRVRSYSTRDFQDCPLQKNSSSFLVLFLINTKDLQ

SEQ ID NO: 24933 - protein, 53 aa, Artificial Sequence
  Synthetic polypeptide
SQPVGRPRWGSVSAGFGLAEFAPIQPGISRTALSRKTVAVSWSCSSSTPRICS

SEQ ID NO: 24934 - protein, 268 aa, Artificial Sequence
  Synthetic polypeptide
GVPVVPASREAEVGFSLSRVRSGRVRSYSTRDFQDCPLQKNSSSFLVLFLINTKDLQVQVRKYGEQKTLFIFPGLLPEAPSKPGLPKPQATVPRKVDGGGTSAASKPKSTPAVIQGPSGKDKDLVLGLSHLNNSYNFSFHVVIGSQAEEGQYSLNFHNCNNSVPGKEHPFDITVMIREKNPDGFLSAAEMPLFKLYMVMSACFLAAGIFWVSILCRNTYSVFKIHWLMAALAFTKSISLLFHSINYYFINSQGHPIEGLAVMYYIAHL

SEQ ID NO: 24935 - protein, 89 aa, Artificial Sequence
  Synthetic polypeptide
GVPVVPASREAEVGFSLSRVRSGRVRSYSGPGAEVWRAEDVVYLSRAPPGSTLQTRAPEATGHSPPQGGWRRDLCSQQAQVNTRSDSGS

SEQ ID NO: 24936 - protein, 85 aa, Artificial Sequence
  Synthetic polypeptide
SQPVGRPRWGSVSAGFGLAEFAPIQVQVRKYGEQKTLFIFPGLLPEAPSKPGLPKPQATVPRKVDGGGTSAASKPKSTPAVIQGP

SEQ ID NO: 24937 - protein, 89 aa, Artificial Sequence
  Synthetic polypeptide
PGVVRCACSPSQSGGRGGVQSQPGSVWQSSLLFRSRCGSMESRRRCLSFPGSSRKHPPNQGSRSHRPQSPARWMAEGPLQPASPSQHPQ

SEQ ID NO: 24938 - protein, 101 aa, Artificial Sequence
  Synthetic polypeptide
GRAWCLKPVISPLWEAGVGGLLEFRRSRSAWATCSCALRTLEPSCPPAVRSSASSGASSSKPLTSSMCRILARSSTPCLLCPGPRSPRTGGSCPSPPRRRV

SEQ ID NO: 24939 - protein, 28 aa, Artificial Sequence
  Synthetic polypeptide
SRPFGKLVWEDCLSLGDRDQPGQHVPVP

SEQ ID NO: 24940 - protein, 764 aa, Artificial Sequence
  Synthetic polypeptide
EIEISLGNMFLCLKNIRTFLSTCCEKFGLKRSELFEAFDLFDVQDFGKVIYTLSALSWTPIAQNRGIMPFPTEEESVGDEDIYSGLSDQIDDTVEEDEDLYDCVENEEAEGDEIYEDLMRSEPVSMPPKMTEYDKRCCCLREIQQTEEKYTDTLGSIQQHFLKPLQRFLKPQDIEIIFINIEDLLRVHTHFLKEMKEALGTPGAANLYQVFIKYKERFLVYGRYCSQVESASKHLDRVAAAREDVQMKLEECSQRANNGRFTLRDLLMVPMQRVLKYHLLLQELVKHTQEAMEKENLRLALDAMRDLAQCVNEVKRDNETLRQITNFQLSIENLDQSLAHYGRPKIDGELKITSVERRSKMDRYAFLLDKALLICKRRGDSYDLKDFVNLHSFQVRDDSSGDRDNKKWSHMFLLIEDQGAQGYELFFKTRELKKKWMEQFEMAISNIYPENATANGHDFQMFSFEETTSCKACQMLLRGTFYQGYRCHRCRASAHKECLGRVPPCGRHGQDFPGTMKKDKLHRRAQDKKRNELGLPKMEVFQEYYGLPPPPGAIGPFLRLNPGDIVELTKAEAEQNWWEGPPQDLSVHLWYAGPMERAGAESILANRSDGTFLVRQRVKDAAEFAISIKYNVEVKHIKIMTAEGLYRITEKKAFRGLTELVEFYQQNSLKDCFKSLDTTLQFPFKEPEKRTISRPAVGSTKYFGTAKARYDFCARDRSELSLKEGDIIKILNKKGQQGWWRGEIYGRVGWFPANYVEEDYSEYC

SEQ ID NO: 24941 - protein, 786 aa, Artificial Sequence
  Synthetic polypeptide
EIEISLGNMFLCLKNIRTFLSTCCEKFGLKRSELFEAFDLFDVQDFGKVIYTLSALSWTPIAQNRGIMPFPTEEESVGDEDIYSGLSDQIDDTVEEDEDLYDCVENEEAEGDEIYEDLMRSEPVSMPPKMTEYDKRCCCLREIQQTEEKYTDTLGSIQQHFLKPLQRFLKPQDIEIIFINIEDLLRVHTHFLKEMKEALGTPGAANLYQVFIKYKERFLVYGRYCSQVESASKHLDRVAAAREDVQMKLEECSQRANNGRFTLRDLLMVPMQRVLKYHLLLQELVKHTQEAMEKENLRLALDAMRDLAQCVNEVKRDNETLRQITNFQLSIENLDQSLAHYGRPKIDGELKITSVERRSKMDRYAFLLDKALLICKRRGDSYDLKDFVNLHSFQVRDDSSGDRDNKKWSHMFLLIEDQGAQGYELFFKTRELKKKWMEQFEMAISNIYPENATANGHDFQMFSFEETTSCKACQMLLRGTFYQGYRCHRCRASAHKECLGRVPPCGRHGQDFPGTMKKDKLHRRAQDKKRNELGLPKMEVFQEYYGLPPPPGAIGPFLRLNPGDIVELTKAEAEQNWWEGRNTSTNEIGWFPCNRVKPYVHGPPQDLSVHLWYAGPMERAGAESILANRSDGTFLVRQRVKDAAEFAISIKYNVEVKHIKIMTAEGLYRITEKKAFRGLTELVEFYQQNSLKDCFKSLDTTLQFPFKEPEKRTISRPAVGSTKYFGTAKARYDFCARDRSELSLKEGDIIKILNKKGQQGWWRGEIYGRVGWFPANYVEEDYSEYC

SEQ ID NO: 24942 - protein, 754 aa, Artificial Sequence
  Synthetic polypeptide
EIEISLGNMFLCLKNIRTFLSTCCEKFGLKRSELFEAFDLFDVQDFGKVIYTLSALSWTPIAQNRGIMPFPTEEESVGDEDIYSGLSDQIDDTVEEDEDLYDCVENEEAEGDEIYEDLMRSEPVSMPHFLKPLQRFLKPQDIEIIFINIEDLLRVHTHFLKEMKEALGTPGAANLYQVFIKYKERFLVYGRYCSQVESASKHLDRVAAAREDVQMKLEECSQRANNGRFTLRDLLMVPMQRVLKYHLLLQELVKHTQEAMEKENLRLALDAMRDLAQCVNEVKRDNETLRQITNFQLSIENLDQSLAHYGRPKIDGELKITSVERRSKMDRYAFLLDKALLICKRRGDSYDLKDFVNLHSFQVRDDSSGDRDNKKWSHMFLLIEDQGAQGYELFFKTRELKKKWMEQFEMAISNIYPENATANGHDFQMFSFEETTSCKACQMLLRGTFYQGYRCHRCRASAHKECLGRVPPCGRHGQDFPGTMKKDKLHRRAQDKKRNELGLPKMEVFQEYYGLPPPPGAIGPFLRLNPGDIVELTKAEAEQNWWEGRNTSTNEIGWFPCNRVKPYVHGPPQDLSVHLWYAGPMERAGAESILANRSDGTFLVRQRVKDAAEFAISIKYNVEVKHIKIMTAEGLYRITEKKAFRGLTELVEFYQQNSLKDCFKSLDTTLQFPFKEPEKRTISRPAVGSTKYFGTAKARYDFCARDRSELSLKEGDIIKILNKKGQQGWWRGEIYGRVGWFPANYVEEDYSEYC

SEQ ID NO: 24943 - protein, 120 aa, Artificial Sequence
  Synthetic polypeptide
GRVRWLTPVIPALWEAEAGGSRGQEIETVLANTRPPHWPGGAGRPRPEYCGAHPAGVWHRCSHHTPRLPPHDPRQRHLPAAAERLCCPGPCSGAAEAAREKGQAPHSGDTVPGGWLGLRV

SEQ ID NO: 24944 - protein, 228 aa, Artificial Sequence
  Synthetic polypeptide
SRHFGRPRQADHEVRRSRLSWLTRDLRTGLVVLGAHVLSTAEPTQQVFGIDALTTHPDYHPMTHANDICLLRLNGSAVLGPAVGLLRPPGRRARPPTAGTRCRVAGWGFVSDFEELPPGLMEAKVRVLDPDVCNSSWKGHLTLTMLCTRSGDSHRRGFCSADSGGPLVCRNRAHGLVSFSGLWCGDPKTPDVYTQVSAFVAWIWDVVRRSSPQPGPLPGTTRPPGEAA

SEQ ID NO: 24945 - protein, 15 aa, Artificial Sequence
  Synthetic polypeptide
HETSALAWWCWAPTS

SEQ ID NO: 24946 - protein, 96 aa, Artificial Sequence
  Synthetic polypeptide
SHHCGLGDRRPPHWPGGAGRPRPEYCGAHPAGVWHRCSHHTPRLPPHDPRQRHLPAAAERLCCPGPCSGAAEAAREKGQAPHSGDTVPGGWLGLRV

SEQ ID NO: 24947 - protein, 224 aa, Artificial Sequence
  Synthetic polypeptide
AWEVEAAVSCDHTTAAWVTEDLRTGLVVLGAHVLSTAEPTQQVFGIDALTTHPDYHPMTHANDICLLRLNGSAVLGPAVGLLRPPGRRARPPTAGTRCRVAGWGFVSDFEELPPGLMEAKVRVLDPDVCNSSWKGHLTLTMLCTRSGDSHRRGFCSADSGGPLVCRNRAHGLVSFSGLWCGDPKTPDVYTQVSAFVAWIWDVVRRSSPQPGPLPGTTRPPGEAA

SEQ ID NO: 24948 - protein, 15 aa, Artificial Sequence
  Synthetic polypeptide
QKTSALAWWCWAPTS

SEQ ID NO: 24949 - protein, 175 aa, Artificial Sequence
  Synthetic polypeptide
LVGHGSKWLYVSPATREAELNGSAVLGPAVGLLRPPGRRARPPTAGTRCRVAGWGFVSDFEELPPGLMEAKVRVLDPDVCNSSWKGHLTLTMLCTRSGDSHRRGFCSADSGGPLVCRNRAHGLVSFSGLWCGDPKTPDVYTQVSAFVAWIWDVVRRSSPQPGPLPGTTRPPGEAA

SEQ ID NO: 24950 - protein, 18 aa, Artificial Sequence
  Synthetic polypeptide
LGMVASGCTYPQLLGRLS

SEQ ID NO: 24951 - protein, 106 aa, Artificial Sequence
  Synthetic polypeptide
LVGHGSKWLYVSPATREAERPPHWPGGAGRPRPEYCGAHPAGVWHRCSHHTPRLPPHDPRQRHLPAAAERLCCPGPCSGAAEAAREKGQAPHSGDTVPGGWLGLRV

SEQ ID NO: 24952 - protein, 222 aa, Artificial Sequence
  Synthetic polypeptide
LGMVASGCTYPQLLGRLRDLRTGLVVLGAHVLSTAEPTQQVFGIDALTTHPDYHPMTHANDICLLRLNGSAVLGPAVGLLRPPGRRARPPTAGTRCRVAGWGFVSDFEELPPGLMEAKVRVLDPDVCNSSWKGHLTLTMLCTRSGDSHRRGFCSADSGGPLVCRNRAHGLVSFSGLWCGDPKTPDVYTQVSAFVAWIWDVVRRSSPQPGPLPGTTRPPGEAA

SEQ ID NO: 24953 - protein, 20 aa, Artificial Sequence
  Synthetic polypeptide
GQEFETSLANTEMERERLLG

SEQ ID NO: 24954 - protein, 1115 aa, Artificial Sequence
  Synthetic polypeptide
IPALWEAEAGRSSEVRSSRPAWPTRKWSENVFLDNELLTSKILSVLRPQSERGFRAGDLRYPTHFLSTNSVLASVTASLKEHPRGTLLSDGSPALSRNVGMTVSQKGGPQPTPSPAGPGTQLGPITGEMDEADSAFLKFKQTADDSLSLTSPNTESIFVEDPYTASLRSEIESDGHEFEAESWSLAVDAAYAKKQKREVVKRQDVLYELMQTEVHHVRTLKIMLKVYSRALQEELQFSSKAIGRLFPCADDLLETHSHFLARLKERRQESLEEGSDRNYVIQKIGDLLVQQFSGENGERMKEKYGVFCSGHNEAVSHYKLLLQQNKKFQNLIKKIGNFSIVRRLGVQECILLVTQRITKYPVLVERIIQNTEAGTEDYEDLTQALNLIKDIISQVDAKVSECEKGQRLREIAGKMDLKSSSKLKNGLTFRKEDMLQRQLHLEGMLCWKTTSGRLKDILAILLTDVLLLLQEKDQKYVFASVDSKPPVISLQKLIVREVANEEKAMFLISASLQGPEMYEIYTSSKEDRNAWMAHIQRAVESCPDEEEGPFSLPEEERKVVEARATRLRDFQERLSMKDQLIAQSLLEKQQIYLEMAEMGGLEDLPQPRGLFRGGDPSETLQGELILKSAMSEIEGIQSLICRQLGSANGQAEDGGSSTGPPRRAETFAGYDCTNSPTKNGSFKKKVSSTDPRPRDWRGPPNSPDLKLSDSDIPGSSEESPQVVEAPGTESDPRLPTVLESELVQRIQTLSQLLLNLQAVIAHQDSYVETQRAAIQEREKQFRLQSTRGNLLLEQERQRNFEKQREERAALEKLQSQLRHEQQRWERERQWQHQELERAGARLQEREGEARQLRERLEQERAELERQRQAYQHDLERLREAQRAVERERERLELLRRLKKQNTAPGALPPDTLAEAQPPSHPPSFNGEGLEGPRVSMLPSGVGPEYAERPEVARRDSAPTENRLAKSDVPIQLLSATNQFQRQAAVQQQIPTKLAASTKGGKDKGGKSRGSQRWESSASFDLKQQLLLNKLMGKDESTSRNRRSLSPILPGRHSPAPPPDPGFPAPSPPPADSPSEGFSLKAGGTALLPGPPAPSPLPATPLSAKEDASKEDVIFF

SEQ ID NO: 24955 - protein, 46 aa, Artificial Sequence
  Synthetic polypeptide
MGMVVRACKSQHFGRLRLADHLRSGVRDQPGQHGNGARTSSWITSC

SEQ ID NO: 24956 - protein, 24 aa, Artificial Sequence
  Synthetic polypeptide
QSALEQHGFQLRNGARTSSWITSC

SEQ ID NO: 24957 - protein, 20 aa, Artificial Sequence
  Synthetic polypeptide
SRPLNSTGFSCEMERERLLG

SEQ ID NO: 24958 - protein, 1097 aa, Artificial Sequence
  Synthetic polypeptide
TARVSAAKWSENVFLDNELLTSKILSVLRPQSERGFRAGDLRYPTHFLSTNSVLASVTASLKEHPRGTLLSDGSPALSRNVGMTVSQKGGPQPTPSPAGPGTQLGPITGEMDEADSAFLKFKQTADDSLSLTSPNTESIFVEDPYTASLRSEIESDGHEFEAESWSLAVDAAYAKKQKREVVKRQDVLYELMQTEVHHVRTLKIMLKVYSRALQEELQFSSKAIGRLFPCADDLLETHSHFLARLKERRQESLEEGSDRNYVIQKIGDLLVQQFSGENGERMKEKYGVFCSGHNEAVSHYKLLLQQNKKFQNLIKKIGNFSIVRRLGVQECILLVTQRITKYPVLVERIIQNTEAGTEDYEDLTQALNLIKDIISQVDAKVSECEKGQRLREIAGKMDLKSSSKLKNGLTFRKEDMLQRQLHLEGMLCWKTTSGRLKDILAILLTDVLLLLQEKDQKYVFASVDSKPPVISLQKLIVREVANEEKAMFLISASLQGPEMYEIYTSSKEDRNAWMAHIQRAVESCPDEEEGPFSLPEEERKVVEARATRLRDFQERLSMKDQLIAQSLLEKQQIYLEMAEMGGLEDLPQPRGLFRGGDPSETLQGELILKSAMSEIEGIQSLICRQLGSANGQAEDGGSSTGPPRRAETFAGYDCTNSPTKNGSFKKKVSSTDPRPRDWRGPPNSPDLKLSDSDIPGSSEESPQVVEAPGTESDPRLPTVLESELVQRIQTLSQLLLNLQAVIAHQDSYVETQRAAIQEREKQFRLQSTRGNLLLEQERQRNFEKQREERAALEKLQSQLRHEQQRWERERQWQHQELERAGARLQEREGEARQLRERLEQERAELERQRQAYQHDLERLREAQRAVERERERLELLRRLKKQNTAPGALPPDTLAEAQPPSHPPSFNGEGLEGPRVSMLPSGVGPEYAERPEVARRDSAPTENRLAKSDVPIQLLSATNQFQRQAAVQQQIPTKLAASTKGGKDKGGKSRGSQRWESSASFDLKQQLLLNKLMGKDESTSRNRRSLSPILPGRHSPAPPPDPGFPAPSPPPADSPSEGFSLKAGGTALLPGPPAPSPLPATPLSAKEDASKEDVIFF

SEQ ID NO: 24959 - protein, 1033 aa, Artificial Sequence
  Synthetic polypeptide
QSALEQHGFQLPSLKEHPRGTLLSDGSPALSRNVGMTVSQKGGPQPTPSPAGPGTQLGPITGEMDEADSAFLKFKQTADDSLSLTSPNTESIFVEDPYTASLRSEIESDGHEFEAESWSLAVDAAYAKKQKREVVKRQDVLYELMQTEVHHVRTLKIMLKVYSRALQEELQFSSKAIGRLFPCADDLLETHSHFLARLKERRQESLEEGSDRNYVIQKIGDLLVQQFSGENGERMKEKYGVFCSGHNEAVSHYKLLLQQNKKFQNLIKKIGNFSIVRRLGVQECILLVTQRITKYPVLVERIIQNTEAGTEDYEDLTQALNLIKDIISQVDAKVSECEKGQRLREIAGKMDLKSSSKLKNGLTFRKEDMLQRQLHLEGMLCWKTTSGRLKDILAILLTDVLLLLQEKDQKYVFASVDSKPPVISLQKLIVREVANEEKAMFLISASLQGPEMYEIYTSSKEDRNAWMAHIQRAVESCPDEEEGPFSLPEEERKVVEARATRLRDFQERLSMKDQLIAQSLLEKQQIYLEMAEMGGLEDLPQPRGLFRGGDPSETLQGELILKSAMSEIEGIQSLICRQLGSANGQAEDGGSSTGPPRRAETFAGYDCTNSPTKNGSFKKKVSSTDPRPRDWRGPPNSPDLKLSDSDIPGSSEESPQVVEAPGTESDPRLPTVLESELVQRIQTLSQLLLNLQAVIAHQDSYVETQRAAIQEREKQFRLQSTRGNLLLEQERQRNFEKQREERAALEKLQSQLRHEQQRWERERQWQHQELERAGARLQEREGEARQLRERLEQERAELERQRQAYQHDLERLREAQRAVERERERLELLRRLKKQNTAPGALPPDTLAEAQPPSHPPSFNGEGLEGPRVSMLPSGVGPEYAERPEVARRDSAPTENRLAKSDVPIQLLSATNQFQRQAAVQQQIPTKLAASTKGGKDKGGKSRGSQRWESSASFDLKQQLLLNKLMGKDESTSRNRRSLSPILPGRHSPAPPPDPGFPAPSPPPADSPSEGFSLKAGGTALLPGPPAPSPLPA

SEQ ID NO: 24960 - protein, 35 aa, Artificial Sequence
  Synthetic polypeptide
SRPLNSTGFSCPRSRSTPGAPSCPMAARPCPGMSV

SEQ ID NO: 24961 - protein, 60 aa, Artificial Sequence
  Synthetic polypeptide
TARVSAALAQGAPPGHPPVRWQPGPVQECRYDGLSERGSPANTEPGWPWDATRTNHRRDG

SEQ ID NO: 24962 - protein, 1050 aa, Artificial Sequence
  Synthetic polypeptide
QSALEQHGFQLPSLKEHPRGTLLSDGSPALSRNVGMTVSQKGGPQPTPSPAGPGTQLGPITGEMDEADSAFLKFKQTADDSLSLTSPNTESIFVEDPYTASLRSEIESDGHEFEAESWSLAVDAAYAKKQKREVVKRQDVLYELMQTEVHHVRTLKIMLKVYSRALQEELQFSSKAIGRLFPCADDLLETHSHFLARLKERRQESLEEGSDRNYVIQKIGDLLVQQFSGENGERMKEKYGVFCSGHNEAVSHYKLLLQQNKKFQNLIKKIGNFSIVRRLGVQECILLVTQRITKYPVLVERIIQNTEAGTEDYEDLTQALNLIKDIISQVDAKVSECEKGQRLREIAGKMDLKSSSKLKNGLTFRKEDMLQRQLHLEGMLCWKTTSGRLKDILAILLTDVLLLLQEKDQKYVFASVDSKPPVISLQKLIVREVANEEKAMFLISASLQGPEMYEIYTSSKEDRNAWMAHIQRAVESCPDEEEGPFSLPEEERKVVEARATRLRDFQERLSMKDQLIAQSLLEKQQIYLEMAEMGGLEDLPQPRGLFRGGDPSETLQGELILKSAMSEIEGIQSLICRQLGSANGQAEDGGSSTGPPRRAETFAGYDCTNSPTKNGSFKKKVSSTDPRPRDWRGPPNSPDLKLSDSDIPGSSEESPQVVEAPGTESDPRLPTVLESELVQRIQTLSQLLLNLQAVIAHQDSYVETQRAAIQEREKQFRLQSTRGNLLLEQERQRNFEKQREERAALEKLQSQLRHEQQRWERERQWQHQELERAGARLQEREGEARQLRERLEQERAELERQRQAYQHDLERLREAQRAVERERERLELLRRLKKQNTAPGALPPDTLAEAQPPSHPPSFNGEGLEGPRVSMLPSGVGPEYAERPEVARRDSAPTENRLAKSDVPIQLLSATNQFQRQAAVQQQIPTKLAASTKGGKDKGGKSRGSQRWESSASFDLKQQLLLNKLMGKDESTSRNRRSLSPILPGRHSPAPPPDPGFPAPSPPPADSPSEGFSLKAGGTALLPGPPAPSPLPATPLSAKEDASKEDVIFF

SEQ ID NO: 24963 - protein, 30 aa, Artificial Sequence
  Synthetic polypeptide
QHFGRPRPVDRLRLGVQDQSGQHAHPVWAQ

SEQ ID NO: 24964 - protein, 512 aa, Artificial Sequence
  Synthetic polypeptide
GWEFKTSLASMLILFGLSNQLAVTFREENTIAFRHLFLLGYSDGADDTFAAYTREQLYQAIFHAVDQYLALPDVSLGRYAYVRGGGDPWTNGSGLALCQRYYHRGHVDPANDTFDIDPMVVTDCIQVDPPERPPPPPSDDLTLLESSSSYKNLTLKFHKLVNVTIHFRLKTINLQSLINNEIPDCYTFSVLITFDNKAHSGRIPISLETQAHIQECKHPSVFQHGDNSFRLLFDVVVILTCSLSFLLCARSLLRGFLLQNEFVGFMWRQRGRVISLWERLEFVNGWYILLVTSDVLTISGTIMKIGIEAKNLASYDVCSILLGTSTLLVWVGVIRYLTFFHNYNILIATLRVALPSVMRFCCCVAVIYLGYCFCGWIVLGPYHVKFRSLSMVSECLFSLINGDDMFVTFAAMQAQQGRSSLVWLFSQLYLYSFISLFIYMVLSLFIALITGAYDTIKHPGGAGAEESELQAYIAQCQDSPTSGKFRRGSGSACSLLCCCGRDPSEEHSLLVN

SEQ ID NO: 24965 - protein, 34 aa, Artificial Sequence
  Synthetic polypeptide
ALWKAEAGGSLEAGSSRPVWPACSSCLGSVISWL

SEQ ID NO: 24966 - protein, 132 aa, Artificial Sequence
  Synthetic polypeptide
GWEFKTSLASMLILFGLSNQLAVTFREENTIAFRHLFLLGYSDGADDTFAAYTREQLYQAIFHAVDQYLALPDVSLGRYAYVRGGGDPWTNGSGLALCQRYYHRGHVDPANDTFDIDPMVVTGWSMSPSTSG

SEQ ID NO: 24967 - protein, 8 aa, Artificial Sequence
  Synthetic polypeptide
TLRMRRNS

SEQ ID NO: 24968 - protein, 12 aa, Artificial Sequence
  Synthetic polypeptide
MPLRHSGCVEIL

SEQ ID NO: 24969 - protein, 45 aa, Artificial Sequence
  Synthetic polypeptide
TLRMRRNSERSYSECQEGWGVEGAYHGSPKHAHLVFLLQNVRYPG

SEQ ID NO: 24970 - protein, 166 aa, Artificial Sequence
  Synthetic polypeptide
MPLRHSGCVEILSGVIRSVKKDGEWKVLIMDHPSMRILSSCCKMSDILAEGITTCPEPLFSELGRSRLAKVVKTLKEIHLAFLPYEAQVFSLDAPHSTYNLYCPFRAEERTRQLEVLAQQIATLCATLQEYPAIRYRKGPEDTAQLAHAVLAKLNAFKADTPSLGE

SEQ ID NO: 24971 - protein, 601 aa, Artificial Sequence
  Synthetic polypeptide
MPLRHSGCVEILSGVIRSVKKDGEWKVLIMDHPSMRILSSCCKMSDILAEGITIVEDINKRREPIPSLEAIYLLSPTEKAQAQRVIHLPQSVQALIKDFQGTPTFTYKAAHIFFTDTCPEPLFSELGRSRLAKVVKTLKEIHLAFLPYEAQVFSLDAPHSTYNLYCPFRAEERTRQLEVLAQQIATLCATLQEYPAIRYRKGPEDTAQLAHAVLAKLNAFKADTPSLGEGPEKTRSQLLIMDRAADPVSPLLHELTFQAMAYDLLDIEQDTYRYETTGLSEAREKAVLLDEDDDLWVELRHMHIADVSKKVTELLRTFCESKRLTTDKANIKDLSQILKKMPQYQKELNKYSTHLHLADDCMKHFKGSVEKLCSVEQDLAMGSDAEGEKIKDSMKLIVPVLLDAAVPAYDKIRVLLLYILLRNGVSEENLAKLIQHANVQAHSSLIRNLEQLGGTVTNPGGSGTSSRLEPRERMEPTYQLSRWTPVIKDVMEDAVEDRLDRNLWPFVSDPAPTASSQAAVSARFGHWHKNKAGIEARAGPRLIVYVMGGVAMSEMRAAYEVTRATEGKWEVLIGSSHILTPTRFLDDLKALDKKLEDIALP

SEQ ID NO: 24972 - protein, 590 aa, Artificial Sequence
  Synthetic polypeptide
MPLRHSGCVEILSGVIRSVKKDGEWKVLIMDHPSMRILSSCCKMSDILAEGITIVEDINKRREPIPSLEAIYLLSPTEKSVQALIKDFQGTPTFTYKAAHIFFTDTCPEPLFSELGRSRLAKVVKTLKEIHLAFLPYEAQVFSLDAPHSTYNLYCPFRAEERTRQLEVLAQQIATLCATLQEYPAIRYRKGPEDTAQLAHAVLAKLNAFKADTPSLGEGPEKTRSQLLIMDRAADPVSPLLHELTFQAMAYDLLDIEQDTYRYETTGLSEAREKAVLLDEDDDLWVELRHMHIADVSKKVTELLRTFCESKRLTTDKANIKDLSQILKKMPQYQKELNKYSTHLHLADDCMKHFKGSVEKLCSVEQDLAMGSDAEGEKIKDSMKLIVPVLLDAAVPAYDKIRVLLLYILLRNGVSEENLAKLIQHANVQAHSSLIRNLEQLGGTVTNPGGSGTSSRLEPRERMEPTYQLSRWTPVIKDVMEDAVEDRLDRNLWPFVSDPAPTASSQAAVSARFGHWHKNKAGIEARAGPRLIVYVMGGVAMSEMRAAYEVTRATEGKWEVLIGSSHILTPTRFLDDLKALDKKLEDIALP

SEQ ID NO: 24973 - protein, 405 aa, Artificial Sequence
  Synthetic polypeptide
MPLRHSGCVEILSGVIRSVKKDGEWKVLIMDHPSMRILSSCCKMSDILAEGITIVEDINKRREPIPSLEAIYLLSPTEKSVQALIKDFQGTPTFTYKAAHIFFTDTCPEPLFSELGRSRLAKVVKTLKEIHLAFLPYEAQVFSLDAPHSTYNLYCPFRAEERTRQLEVLAQQIATLCATLQEYPAIRYRKGPEDTAQLAHAVLAKLNAFKADTPSLGEGPEKTRSQLLIMDRAADPVSPLLHELTFQAMAYDLLDIEQDTYRYETTGLSEAREKAVLLDEDDDLWVELRHMHIADVSKKVTELLRTFCESKRLTTDKANIKDLSQILKKMPQYQKELNKDLAMGSDAEGEKIKDSMKLIVPVLLDAAVPAYDKIRVLLLYILLRNATPLDPGTLLHWLGDSSTEV

SEQ ID NO: 24974 - protein, 587 aa, Artificial Sequence
  Synthetic polypeptide
MPLRHSGCVEILSGVIRSVKKDGEWKVLIMDHPSMRILSSCCKMSDILAEGITIVEDINKRREPIPSLEAIYLLSPTEKALIKDFQGTPTFTYKAAHIFFTDTCPEPLFSELGRSRLAKVVKTLKEIHLAFLPYEAQVFSLDAPHSTYNLYCPFRAEERTRQLEVLAQQIATLCATLQEYPAIRYRKGPEDTAQLAHAVLAKLNAFKADTPSLGEGPEKTRSQLLIMDRAADPVSPLLHELTFQAMAYDLLDIEQDTYRYETTGLSEAREKAVLLDEDDDLWVELRHMHIADVSKKVTELLRTFCESKRLTTDKANIKDLSQILKKMPQYQKELNKYSTHLHLADDCMKHFKGSVEKLCSVEQDLAMGSDAEGEKIKDSMKLIVPVLLDAAVPAYDKIRVLLLYILLRNGVSEENLAKLIQHANVQAHSSLIRNLEQLGGTVTNPGGSGTSSRLEPRERMEPTYQLSRWTPVIKDVMEDAVEDRLDRNLWPFVSDPAPTASSQAAVSARFGHWHKNKAGIEARAGPRLIVYVMGGVAMSEMRAAYEVTRATEGKWEVLIGSSHILTPTRFLDDLKALDKKLEDIALP

SEQ ID NO: 24975 - protein, 36 aa, Artificial Sequence
  Synthetic polypeptide
GRAWWLTPIIPALWEAEVGGSPKVRSSRPAWSICCP

SEQ ID NO: 24976 - protein, 54 aa, Artificial Sequence
  Synthetic polypeptide
SQHFGRPRWADHLRSGVRDQPGQYAAHSGFFHRILVLPGADRPLQAGQGGLPVL

SEQ ID NO: 24977 - protein, 732 aa, Artificial Sequence
  Synthetic polypeptide
GQEFETSLVNMLPIVASSIVSLYFLELTDLFKPAKVGFQCYDRTLSMPYVETNEELIPLLMLLSLAFAAPAASIMVAEGMLYCLQSRLWGRAGGPAGAEGSINAGGCNFNSFLRRTVRFVGVHVFGLCATALVTDVIQLATGYHTPFFLTVCKPNYTLLGTSCEVNPYITQDICSGHDIHAILSARKTFPSQHATLSAFAAVYVSVSPAPHCPSQALLLTRGEPSLTPTPMPQMYFNSVISDTTKLLKPILVFAFAIAAGVCGLTQITQYRSHPVDVYAGFLIGAGIAAYLACHAVGNFQAPPAEKPAAPAPAKDALRALTQRGHDSVYQQNKSVSTDELGPPGRLEGAPRPVAREKTSLGSLKRASVDVDLLAPRSPMAKENMVTFSHTLPRASAPSLDDPARRHMTIHVPLDASRSKQLISEWKQKSLEGRGLGLPDDASPGHLRAPAEPMAEEEEEEEDEEEEEEEEEEEDEGPAPPSLYPTVQARPGLGPRVILPPRAGPPPLVHIPEEGAQTGAGLSPKSGAGVRAKWLMMAEKSGAAVANPPRLLQVIAMSKAPGAPGPKAAETASSSSASSDSSQYRSPSDRDSASIVTIDAHAPHHPVVHLSAGGAPWEWKAAGGGAKAEADGGYELGDLARGFRGGAKPPGVSPGSSVSDVDQEEPRFGAVATVNLATGEGLPPLGAADGALGPGSRESTLRRHAGGLGLAEREAEAEAEGYFRKMQARRFPD

SEQ ID NO: 24978 - protein, 704 aa, Artificial Sequence
  Synthetic polypeptide
GQEFETSLVNMLPIVASSIVSLYFLELTDLFKPAKVGFQCYDRTLSMPYVETNEELIPLLMLLSLAFAAPAASIMVAEGMLYCLQSRLWGRAGGPAGAEGSINAGGCNFNSFLRRTVRFVGVHVFGLCATALVTDVIQLATGYHTPFFLTVCKPNYTLLGTSCEVNPYITQDICSGHDIHAILSARKTFPSQHATLSAFAAVYVSMYFNSVISDTTKLLKPILVFAFAIAAGVCGLTQITQYRSHPVDVYAGFLIGAGIAAYLACHAVGNFQAPPAEKPAAPAPAKDALRALTQRGHDSVYQQNKSVSTDELGPPGRLEGAPRPVAREKTSLGSLKRASVDVDLLAPRSPMAKENMVTFSHTLPRASAPSLDDPARRHMTIHVPLDASRSKQLISEWKQKSLEGRGLGLPDDASPGHLRAPAEPMAEEEEEEEDEEEEEEEEEEEDEGPAPPSLYPTVQARPGLGPRVILPPRAGPPPLVHIPEEGAQTGAGLSPKSGAGVRAKWLMMAEKSGAAVANPPRLLQVIAMSKAPGAPGPKAAETASSSSASSDSSQYRSPSDRDSASIVTIDAHAPHHPVVHLSAGGAPWEWKAAGGGAKAEADGGYELGDLARGFRGGAKPPGVSPGSSVSDVDQEEPRFGAVATVNLATGEGLPPLGAADGALGPGSRESTLRRHAGGLGLAEREAEAEAEGYFRKMQARRFPD

SEQ ID NO: 24979 - protein, 120 aa, Artificial Sequence
  Synthetic polypeptide
GQEFETSLVNMLPIVASSIVSLYFLELTDLFKPAKVGFQCYDRTLSMPYVETNEELIPLLMLLSLAFAAPAASIMVAEGMLYCLQSRLWGRAGGPAGAEGSINAGGCNFNSFLRRTVRFV

SEQ ID NO: 24980 - protein, 34 aa, Artificial Sequence
  Synthetic polypeptide
EKGRGSDGGGPEKGRGSDGGGTPGLAPWCWVPMT

SEQ ID NO: 24981 - protein, 24 aa, Artificial Sequence
  Synthetic polypeptide
RREGGQMEEAQRKEEAQMEEEPRG

SEQ ID NO: 24982 - protein, 199 aa, Artificial Sequence
  Synthetic polypeptide
EGKGVRWRRPRERKRLRWRRNPGVSTVVLGAYDLRRRERQSRQTFSISSMSENGYDPQQNLNDLMLLQLDREANLTSSVTILPLPLQNATVEAGTRCQVAGWGSQRSGGRLSRFPRFVNVTVTPEDQCRPNNVCTGVLTRRGGICNGDGGTPLVCEGLAHGVASFSLGPCGRGPDFFTRVALFRDWIDGVLNNPGPGPA

SEQ ID NO: 24983 - protein, 68 aa, Artificial Sequence
  Synthetic polypeptide
EKGRGSDGGGPEKGRGSDGGGAVKERGSDGGGPEKGRGSDGGGGPEKGRGSDGGGTPGLAPWCWVPMT

SEQ ID NO: 24984 - protein, 35 aa, Artificial Sequence
  Synthetic polypeptide
RKGGQMGEAQRREGAQMEEGAQRKEGAQMEEEPRG

SEQ ID NO: 24985 - protein, 233 aa, Artificial Sequence
  Synthetic polypeptide
EGKGVRWRRPRERKRLRWRRCSEGKGVRWGRPREGKGLRWRRGPRERKGLRWRRNPGVSTVVLGAYDLRRRERQSRQTFSISSMSENGYDPQQNLNDLMLLQLDREANLTSSVTILPLPLQNATVEAGTRCQVAGWGSQRSGGRLSRFPRFVNVTVTPEDQCRPNNVCTGVLTRRGGICNGDGGTPLVCEGLAHGVASFSLGPCGRGPDFFTRVALFRDWIDGVLNNPGPGPA

SEQ ID NO: 24986 - protein, 90 aa, Artificial Sequence
  Synthetic polypeptide
EKGRGSDGGGPEKGRGSDGGGAVKERGSDGGGPEKGRGSDGGGGPEKGRGSDGGGAEKGRGSDGGGPEKGRGSDGGGTPGLAPWCWVPMT

SEQ ID NO: 24987 - protein, 57 aa, Artificial Sequence
  Synthetic polypeptide
RKGGQMGEAQRREGAQMEEGAQRKEGAQMEEVQRREGGQMGEAQRREGAQMEEEPRG

SEQ ID NO: 24988 - protein, 255 aa, Artificial Sequence
  Synthetic polypeptide
EGKGVRWRRPRERKRLRWRRCSEGKGVRWGRPREGKGLRWRRGPRERKGLRWRRCREGKGVRWGRPREGKGLRWRRNPGVSTVVLGAYDLRRRERQSRQTFSISSMSENGYDPQQNLNDLMLLQLDREANLTSSVTILPLPLQNATVEAGTRCQVAGWGSQRSGGRLSRFPRFVNVTVTPEDQCRPNNVCTGVLTRRGGICNGDGGTPLVCEGLAHGVASFSLGPCGRGPDFFTRVALFRDWIDGVLNNPGPGPA

SEQ ID NO: 24989 - protein, 101 aa, Artificial Sequence
  Synthetic polypeptide
EKGRGSDGGGPEKGRGSDGGGAVKERGSDGGGPEKGRGSDGGGGPEKGRGSDGGGAEKGRGSDGGGPEKGRGSDGGGAEKGRGSDGGGTPGLAPWCWVPMT

SEQ ID NO: 24990 - protein, 68 aa, Artificial Sequence
  Synthetic polypeptide
RKGGQMGEAQRREGAQMEEGAQRKEGAQMEEVQRREGGQMGEAQRREGAQMEEVQRREGAQMEEEPRG

SEQ ID NO: 24991 - protein, 266 aa, Artificial Sequence
  Synthetic polypeptide
EGKGVRWRRPRERKRLRWRRCSEGKGVRWGRPREGKGLRWRRGPRERKGLRWRRCREGKGVRWGRPREGKGLRWRRCREGKGLRWRRNPGVSTVVLGAYDLRRRERQSRQTFSISSMSENGYDPQQNLNDLMLLQLDREANLTSSVTILPLPLQNATVEAGTRCQVAGWGSQRSGGRLSRFPRFVNVTVTPEDQCRPNNVCTGVLTRRGGICNGDGGTPLVCEGLAHGVASFSLGPCGRGPDFFTRVALFRDWIDGVLNNPGPGPA

SEQ ID NO: 24992 - protein, 112 aa, Artificial Sequence
  Synthetic polypeptide
EKGRGSDGGGPEKGRGSDGGGAVKERGSDGGGPEKGRGSDGGGGPEKGRGSDGGGAEKGRGSDGGGPEKGRGSDGGGAEKGRGSDGGGAEKRRASDGGGTPGLAPWCWVPMT

SEQ ID NO: 24993 - protein, 79 aa, Artificial Sequence
  Synthetic polypeptide
RKGGQMGEAQRREGAQMEEGAQRKEGAQMEEVQRREGGQMGEAQRREGAQMEEVQRREGAQMEEVQRREGPQMEEEPRG

SEQ ID NO: 24994 - protein, 277 aa, Artificial Sequence
  Synthetic polypeptide
EGKGVRWRRPRERKRLRWRRCSEGKGVRWGRPREGKGLRWRRGPRERKGLRWRRCREGKGVRWGRPREGKGLRWRRCREGKGLRWRRCREEKGLRWRRNPGVSTVVLGAYDLRRRERQSRQTFSISSMSENGYDPQQNLNDLMLLQLDREANLTSSVTILPLPLQNATVEAGTRCQVAGWGSQRSGGRLSRFPRFVNVTVTPEDQCRPNNVCTGVLTRRGGICNGDGGTPLVCEGLAHGVASFSLGPCGRGPDFFTRVALFRDWIDGVLNNPGPGPA

SEQ ID NO: 24995 - protein, 15 aa, Artificial Sequence
  Synthetic polypeptide
GGTPGLAPWCWVPMT

SEQ ID NO: 24996 - protein, 5 aa, Artificial Sequence
  Synthetic polypeptide
EEPRG

SEQ ID NO: 24997 - protein, 70 aa, Artificial Sequence
  Synthetic polypeptide
GGAEKGRGSDGGGPGKGRGSDGGGAEKGRGSDGGGPGKGRGSDGGGAEKGRGSDGGGTPGLAPWCWVPMT

SEQ ID NO: 24998 - protein, 60 aa, Artificial Sequence
  Synthetic polypeptide
EVQRREGGQMGEAQGREGAQMEEGQRREGGQMGEAQGREGAQMGEAQRREGGQMEEEPRG

SEQ ID NO: 24999 - protein, 235 aa, Artificial Sequence
  Synthetic polypeptide
RCREGKGVRWGRPREGKGLRWRRGREGKGVRWGRPREGKGLRWGRRREGKGVRWRRNPGVSTVVLGAYDLRRRERQSRQTFSISSMSENGYDPQQNLNDLMLLQLDREANLTSSVTILPLPLQNATVEAGTRCQVAGWGSQRSGGRLSRFPRFVNVTVTPEDQCRPNNVCTGVLTRRGGICNGDGGTPLVCEGLAHGVASFSLGPCGRGPDFFTRVALFRDWIDGVLNNPGPGPA

SEQ ID NO: 25000 - protein, 28 aa, Artificial Sequence
  Synthetic polypeptide
GEVQRREGGQMGEAQIREGAQMEEEPRG

SEQ ID NO: 25001 - protein, 187 aa, Artificial Sequence
  Synthetic polypeptide
GKGLRWRRNPGVSTVVLGAYDLRRRERQSRQTFSISSMSENGYDPQQNLNDLMLLQLDREANLTSSVTILPLPLQNATVEAGTRCQVAGWGSQRSGGRLSRFPRFVNVTVTPEDQCRPNNVCTGVLTRRGGICNGDGGTPLVCEGLAHGVASFSLGPCGRGPDFFTRVALFRDWIDGVLNNPGPGPA

SEQ ID NO: 25002 - protein, 37 aa, Artificial Sequence
  Synthetic polypeptide
GGAEKGRGSDGGGPDKGRGSDGGGTPGLAPWCWVPMT

SEQ ID NO: 25003 - protein, 99 aa, Artificial Sequence
  Synthetic polypeptide
ASSHPERSAPQGRGFLSVLFVIGLMWLRTGLGIQVVLTEQPSQPQCLRRHSPAATAGPASAPRHPVPGHGLGPRGCPRPPSPGPAGAQCHRGHLLLPAT

SEQ ID NO: 25004 - protein, 170 aa, Artificial Sequence
  Synthetic polypeptide
PPPTQKDQLPRAEDFCLCCSLLDSCGLERDWAYRWCSLSSPANLSASVATVQLPQQDQPVPHGTQCLAMGWGRVGAHDPPAQVLQELNVTVVTFFCRPHNICTFVPRRKAGICFGDSGGPLICDGIIQGIDSFVIWGCATRLFPDFFTRVALYVDWIRSTLRRVEAKGRP

SEQ ID NO: 25005 - protein, 10 aa, Artificial Sequence
  Synthetic polypeptide
NGTGHTGGAH

SEQ ID NO: 25006 - protein, 82 aa, Artificial Sequence
  Synthetic polypeptide
VWQVWQKHSNARLNLNFGHRAGLGDCGGPASAAPRVALHGVPAAARRPLLRRHPDCAQLRHVGRALRGECKRPRGAGGPGSP

SEQ ID NO: 25007 - protein, 247 aa, Artificial Sequence
  Synthetic polypeptide
ISGTALASEIVGGRRARPHAWPFMVSLQLRGGHFCGATLIAPNFVMSAAHCVANVNVRAVRVVLGAHNLSRREPTRQVFAVQRIFENGYDPVNLLNDIVILQLNGSATINANVQVAQLPAQGRRLGNGVQCLAMGWGLLGRNRGIASVLQELNVTVVTSLCRRSNVCTLVRGRQAGVCFGDSGSPLVCNGLIHGIASFVRGGCASGLYPDAFAPVAQFVNWIDSIIQRSEDNPCPHPRDPDPASRTH

SEQ ID NO: 25008 - protein, 54 aa, Artificial Sequence
  Synthetic polypeptide
GLAGLAKTQQRSVKSEFRAPRWPRRLWGAGERGPTRGPSWCPCSCAEATSAAPP

SEQ ID NO: 25009 - protein, 28 aa, Artificial Sequence
  Synthetic polypeptide
VWQVWQKHSNARLNLNFGCAEATSAAPP

SEQ ID NO: 25010 - protein, 41 aa, Artificial Sequence
  Synthetic polypeptide
ISAARRPLLRRHPDCAQLRHVGRALRGECKRPRGAGGPGSP

SEQ ID NO: 25011 - protein, 237 aa, Artificial Sequence
  Synthetic polypeptide
GLAGLAKTQQRSVKSEFRLRGGHFCGATLIAPNFVMSAAHCVANVNVRAVRVVLGAHNLSRREPTRQVFAVQRIFENGYDPVNLLNDIVILQLNGSATINANVQVAQLPAQGRRLGNGVQCLAMGWGLLGRNRGIASVLQELNVTVVTSLCRRSNVCTLVRGRQAGVCFGDSGSPLVCNGLIHGIASFVRGGCASGLYPDAFAPVAQFVNWIDSIIQRSEDNPCPHPRDPDPASRTH

SEQ ID NO: 25012 - protein, 277 aa, Artificial Sequence
  Synthetic polypeptide
MGSSPGLSVPWRGTVGRSLCLSVPQFPHLNNRGTALASEIVGGRRARPHAWPFMVSLQLRGGHFCGATLIAPNFVMSAAHCVANVNVRAVRVVLGAHNLSRREPTRQVFAVQRIFENGYDPVNLLNDIVILQLNGSATINANVQVAQLPAQGRRLGNGVQCLAMGWGLLGRNRGIASVLQELNVTVVTSLCRRSNVCTLVRGRQAGVCFGDSGSPLVCNGLIHGIASFVRGGCASGLYPDAFAPVAQFVNWIDSIIQRSEDNPCPHPRDPDPASRTH

SEQ ID NO: 25013 - protein, 39 aa, Artificial Sequence
  Synthetic polypeptide
TTGAPRWPRRLWGAGERGPTRGPSWCPCSCAEATSAAPP

SEQ ID NO: 25014 - protein, 96 aa, Artificial Sequence
  Synthetic polypeptide
GFKSRSVCALEGHRGEVPLPLRASVSSSEQQGHRAGLGDCGGPASAAPRVALHGVPAAARRPLLRRHPDCAQLRHVGRALRGECKRPRGAGGPGSP

SEQ ID NO: 25015 - protein, 59 aa, Artificial Sequence
  Synthetic polypeptide
MGAAAQACNPSYWGGRGRGNHWSPGVASCREPSGLPEHQSKVPGLSAGAQRPAQKTSEA

SEQ ID NO: 25016 - protein, 690 aa, Artificial Sequence
  Synthetic polypeptide
WARRLKPVIPATGEAEVGGIIGAQELQAAESHQDFRSIKAKFQASQPEPSDLPKKPPKPEFGKLKKFSQPELSEHPKKAPLPEFGAVSLKPPPPEVTDLPKKPPPPEVTDLPKKPPPPEVTDLPKKPPPPEVTDLPKKPSKLELSDLSKKFPQLGATPFPRKPLQPEVGEAPLKASLPEPGAPARKPLQPDELSHPARPPSEPKSGAFPRKLWQPEAGEATPRSPQPELSTFPKKPAQPEFNVYPKKPPQPQVGGLPKKSVPQPEFSEAAQTPLWKPQSSEPKRDSSAFPKKASQPPLSDFPKKPPQPELGDLTRTSSEPEVSVLPKRPRPAEFKALSKKPPQPELGGLPRTSSEPEFNSLPRKLLQPERRGPPRKFSQPEPSAVLKRHPQPEFFGDLPRKPPLPSSASESSLPAAVAGFSSRHPLSPGFGAAGTPRWRSGGLVHSGGARPGLRPSHPPRRRPLPPASSLGHPPAKPPLPPGPVDMQSFRRPSAASIDLRRTRSAAGLHFQDRQPEDIPQVPDEIYELYDDVEPRDDSSPSPKGRDEAPSVQQAARRPPQDPALRKEKDPQPQQLPPMDPKLLKQLRKAEKAEREFRKKFKFEGEIVVHTKMMIDPNAKTRRGGGKHLGIRRGEILEVIEFTSNEEMLCRDPKGKYGYVPRTALLPLETEVYDDVDFCDPLENQPLPLGR

SEQ ID NO: 25017 - protein, 55 aa, Artificial Sequence
  Synthetic polypeptide
SQLLGRPRSGESLEPRSCKLQRAIRTSGASKQSSRPLSRSPATCPKNLRSLSLVN

SEQ ID NO: 25018 - protein, 689 aa, Artificial Sequence
  Synthetic polypeptide
WARRLKPVIPATGEAEVGGIIGAQELQAAESHQDFRSIKAKFQASQPEPSDLPKKPPKPEFGKLKKFSQPELSEHPKKAPLPEFGAVSLKPPPPEVTDLPKKPPPPEVTDLPKKPPPPEVTDLPKKPPPPEVTDLPKKPSKLELSDLSKKFPQLGATPFPRKPLQPEVGEAPLKASLPEPGAPARKPLQPDELSHPARPPSEPKSGAFPRKLWQPEAGEATPRSPQPELSTFPKKPAQPEFNVYPKKPPQPQVGGLPKKSVPQPEFSEAAQTPLWKPQSSEPKRDSSAFPKKASQPPLSDFPKKPPQPELGDLTRTSSEPEVSVLPKRPRPAEFKALSKKPPQPELGGLPRTSSEPEFNSLPRKLLQPERRGPPRKFSQPEPSAVLKRHPQPEFFGDLPRKPPLPSSASESSLPAAVAGFSSRHPLSPGFGAAGTPRWRSGGLVHSGGARPGLRPSHPPRRRPLPPASSLGHPPAKPPLPPGPVDMQSFRRPSAASIDLRRTRSAAGLHFQDRQPEDIPVPDEIYELYDDVEPRDDSSPSPKGRDEAPSVQQAARRPPQDPALRKEKDPQPQQLPPMDPKLLKQLRKAEKAEREFRKKFKFEGEIVVHTKMMIDPNAKTRRGGGKHLGIRRGEILEVIEFTSNEEMLCRDPKGKYGYVPRTALLPLETEVYDDVDFCDPLENQPLPLGR

SEQ ID NO: 25019 - protein, 200 aa, Artificial Sequence
  Synthetic polypeptide
WARRLKPVIPATGEAEVGGIIGAQELQAAESHQDFRSIKAKFQASQPEPSDLPKKPPKPEFGKLKKFSQPELSEHPKKAPLPEFGAVSLKPPPPEVTDLPKKPPPPEVTDLPKKPSKLELSDLSKKFPQLGATPFPRKPLQPEVGEAPLKASLPEPGAPARKPLQPDELSHPARPPSEPKSGAFPRKLWQPEAGEATPRS

SEQ ID NO: 25020 - protein, 46 aa, Artificial Sequence
  Synthetic polypeptide
MGAAAQACNPSYWGGRGEPSGLPEHQSKVPGLSAGAQRPAQKTSEA

SEQ ID NO: 25021 - protein, 677 aa, Artificial Sequence
  Synthetic polypeptide
WARRLKPVIPATGEAEESHQDFRSIKAKFQASQPEPSDLPKKPPKPEFGKLKKFSQPELSEHPKKAPLPEFGAVSLKPPPPEVTDLPKKPPPPEVTDLPKKPPPPEVTDLPKKPPPPEVTDLPKKPSKLELSDLSKKFPQLGATPFPRKPLQPEVGEAPLKASLPEPGAPARKPLQPDELSHPARPPSEPKSGAFPRKLWQPEAGEATPRSPQPELSTFPKKPAQPEFNVYPKKPPQPQVGGLPKKSVPQPEFSEAAQTPLWKPQSSEPKRDSSAFPKKASQPPLSDFPKKPPQPELGDLTRTSSEPEVSVLPKRPRPAEFKALSKKPPQPELGGLPRTSSEPEFNSLPRKLLQPERRGPPRKFSQPEPSAVLKRHPQPEFFGDLPRKPPLPSSASESSLPAAVAGFSSRHPLSPGFGAAGTPRWRSGGLVHSGGARPGLRPSHPPRRRPLPPASSLGHPPAKPPLPPGPVDMQSFRRPSAASIDLRRTRSAAGLHFQDRQPEDIPQVPDEIYELYDDVEPRDDSSPSPKGRDEAPSVQQAARRPPQDPALRKEKDPQPQQLPPMDPKLLKQLRKAEKAEREFRKKFKFEGEIVVHTKMMIDPNAKTRRGGGKHLGIRRGEILEVIEFTSNEEMLCRDPKGKYGYVPRTALLPLETEVYDDVDFCDPLENQPLPLGR

SEQ ID NO: 25022 - protein, 42 aa, Artificial Sequence
  Synthetic polypeptide
SQLLGRPRRAIRTSGASKQSSRPLSRSPATCPKNLRSLSLVN

SEQ ID NO: 25023 - protein, 676 aa, Artificial Sequence
  Synthetic polypeptide
WARRLKPVIPATGEAEESHQDFRSIKAKFQASQPEPSDLPKKPPKPEFGKLKKFSQPELSEHPKKAPLPEFGAVSLKPPPPEVTDLPKKPPPPEVTDLPKKPPPPEVTDLPKKPPPPEVTDLPKKPSKLELSDLSKKFPQLGATPFPRKPLQPEVGEAPLKASLPEPGAPARKPLQPDELSHPARPPSEPKSGAFPRKLWQPEAGEATPRSPQPELSTFPKKPAQPEFNVYPKKPPQPQVGGLPKKSVPQPEFSEAAQTPLWKPQSSEPKRDSSAFPKKASQPPLSDFPKKPPQPELGDLTRTSSEPEVSVLPKRPRPAEFKALSKKPPQPELGGLPRTSSEPEFNSLPRKLLQPERRGPPRKFSQPEPSAVLKRHPQPEFFGDLPRKPPLPSSASESSLPAAVAGFSSRHPLSPGFGAAGTPRWRSGGLVHSGGARPGLRPSHPPRRRPLPPASSLGHPPAKPPLPPGPVDMQSFRRPSAASIDLRRTRSAAGLHFQDRQPEDIPVPDEIYELYDDVEPRDDSSPSPKGRDEAPSVQQAARRPPQDPALRKEKDPQPQQLPPMDPKLLKQLRKAEKAEREFRKKFKFEGEIVVHTKMMIDPNAKTRRGGGKHLGIRRGEILEVIEFTSNEEMLCRDPKGKYGYVPRTALLPLETEVYDDVDFCDPLENQPLPLGR

SEQ ID NO: 25024 - protein, 187 aa, Artificial Sequence
  Synthetic polypeptide
WARRLKPVIPATGEAEESHQDFRSIKAKFQASQPEPSDLPKKPPKPEFGKLKKFSQPELSEHPKKAPLPEFGAVSLKPPPPEVTDLPKKPPPPEVTDLPKKPSKLELSDLSKKFPQLGATPFPRKPLQPEVGEAPLKASLPEPGAPARKPLQPDELSHPARPPSEPKSGAFPRKLWQPEAGEATPRS

SEQ ID NO: 25025 - protein, 41 aa, Artificial Sequence
  Synthetic polypeptide
RRRVFRSCLLRVRTAPPGQSCSVAQAGVQWCHHANLDLLDL

SEQ ID NO: 25026 - protein, 40 aa, Artificial Sequence
  Synthetic polypeptide
GGACSVPASSVCGRRHLGSLALLPRLECSGAIMPTSTSWT

SEQ ID NO: 25027 - protein, 40 aa, Artificial Sequence
  Synthetic polypeptide
AARVPFLPPPCADGATWAVLLCCPGWSAVVPSCQPRPPGL

SEQ ID NO: 25028 - protein, 83 aa, Artificial Sequence
  Synthetic polypeptide
PLIGCFLQPIRCLHRSVTFVTSDSGWLLSATNQTERGLPLHLQEEQHLCLPVHGDLRLVSSWPQQPDNSVVSRSSFSRCFLSS

SEQ ID NO: 25029 - protein, 609 aa, Artificial Sequence
  Synthetic polypeptide
LQTLVGCFLQPIRLNAGYRFIYRRNSISAFLFTVTFAWCPPGLSNLTILSCPDHLSQDVFCLHESKFEEERMVAGWLTNYSQDSVTFEDVAVDFTQEEWTLLDQTQRNLYRDVMLENYKNLVAVDWESHINTKWSAPQQNFLQGKTSSVVEMERNHFGEELFDFNQCEKALSEHSCLKTHRRTYFRKKTCECNQCEKAFRKPSIFTLHKKTDIGEELPNCNQCETAFSQHLHLVCKKTSQNLHLVCKKTHTQEKPYKCSDCEKGLPSSSHLRECVRIYGGERPYTHKEYVETFSHSTALFVHMQTQDGEKFYECKACGKPFTESSYLTQHLRTHSRVLPIEHKKFGKAFAFSPDLAKHIRLRTRGKHYVCNECGKEFTCFSKLNIHIRVHTGEKPYECNKCGKAFTDSSGLIKHRRTHTGEKPYECKECGKAFANSSHLTVHMRTHTGEKPYQCKECGKAFINSSSFKSHMQTHPGVKPYDCQQCGKAFIRSSFLIRHLRSHSAERPFECEECGKAFRYSSHLSQHKRIHTGERPYKCQKCGQAFSISSGLTVHMRTHTGERPFECQECGKAFTRSTYLIRHLRSHSVEKPYKECGQTFSNSSCLTECV

SEQ ID NO: 25030 - protein, 19 aa, Artificial Sequence
  Synthetic polypeptide
TRATASFTGGTASLPSCSR

SEQ ID NO: 25031 - protein, 78 aa, Artificial Sequence
  Synthetic polypeptide
PLIGCFLQPIRCLHRSVTFVTSDSGWLLSATNQTERGLPLHLQEEQHLCLPVHGDLRLVSSWPQQPDNSVVSRLGESY

SEQ ID NO: 25032 - protein, 83 aa, Artificial Sequence
  Synthetic polypeptide
LQTLVGCFLQPIRLNAGYRFIYRRNSISAFLFTVTFAWCPPGLSNLTILSCPDWESHINTKWSAPQQNFLQGKTSSVVEMGWV

SEQ ID NO: 25033 - protein, 81 aa, Artificial Sequence
  Synthetic polypeptide
PLIGCFLQPIRCLHRSVTFVTSDSGWLLSATNQTERGLPLHLQEEQHLCLPVHGDLRLVSSWPQQPDNSVVSRDAVLLCCL

SEQ ID NO: 25034 - protein, 60 aa, Artificial Sequence
  Synthetic polypeptide
LQTLVGCFLQPIRLNAGYRFIYRRNSISAFLFTVTFAWCPPGLSNLTILSCPEMRSCCVA

SEQ ID NO: 25035 - protein, 77 aa, Artificial Sequence
  Synthetic polypeptide
PLIGCFLQPIRCLHRSVTFVTSDSGWLLSATNQTERGLPLHLQEEQHLCLPVHGDLRLVSSWPQQPDNSVVSRAGYK

SEQ ID NO: 25036 - protein, 89 aa, Artificial Sequence
  Synthetic polypeptide
LQTLVGCFLQPIRLNAGYRFIYRRNSISAFLFTVTFAWCPPGLSNLTILSCPGLGISKQEEGLGEESDEQGEGSQGWSEIQEMRSCCVA

SEQ ID NO: 25037 - protein, 537 aa, Artificial Sequence
  Synthetic polypeptide
LQTLVGCFLQPIRLNAGYRFIYRRNSISAFLFTVTFAWCPPGLSNLTILSCPDWESHINTKWSAPQQNFLQGKTSSVVEMERNHFGEELFDFNQCEKALSEHSCLKTHRRTYFRKKTCECNQCEKAFRKPSIFTLHKKTDIGEELPNCNQCETAFSQHLHLVCKKTSQNLHLVCKKTHTQEKPYKCSDCEKGLPSSSHLRECVRIYGGERPYTHKEYVETFSHSTALFVHMQTQDGEKFYECKACGKPFTESSYLTQHLRTHSRVLPIEHKKFGKAFAFSPDLAKHIRLRTRGKHYVCNECGKEFTCFSKLNIHIRVHTGEKPYECNKCGKAFTDSSGLIKHRRTHTGEKPYECKECGKAFANSSHLTVHMRTHTGEKPYQCKECGKAFINSSSFKSHMQTHPGVKPYDCQQCGKAFIRSSFLIRHLRSHSAERPFECEECGKAFRYSSHLSQHKRIHTGERPYKCQKCGQAFSISSGLTVHMRTHTGERPFECQECGKAFTRSTYLIRHLRSHSVEKPYKECGQTFSNSSCLTECV

SEQ ID NO: 25038 - protein, 100 aa, Artificial Sequence
  Synthetic polypeptide
PLIGCFLQPIRCLHRSVTFVTSDSGWLLSATNQTERGLPLHLQEEQHLCLPVHGDLRLVSSWPQQPDNSVVSRQEYSGEITVHCSIDLPRLRCCSHLSLL

SEQ ID NO: 25039 - protein, 79 aa, Artificial Sequence
  Synthetic polypeptide
LQTLVGCFLQPIRLNAGYRFIYRRNSISAFLFTVTFAWCPPGLSNLTILSCPGRSTVVRSRFTAALTSLGSGVAPTSVF

SEQ ID NO: 25040 - protein, 16 aa, Artificial Sequence
  Synthetic polypeptide
AQITPLHSSLDDMGWV

SEQ ID NO: 25041 - protein, 37 aa, Artificial Sequence
  Synthetic polypeptide
SQLLERLRQNCLNPGGGSCSELRSRHCTPAWMIWAGY

SEQ ID NO: 25042 - protein, 5 aa, Artificial Sequence
  Synthetic polypeptide
YGLGI

SEQ ID NO: 25043 - protein, 38 aa, Artificial Sequence
  Synthetic polypeptide
SQLLERLRQNCLNPGGGSCSELRSRHCTPAWMIWAGYK

SEQ ID NO: 25044 - protein, 38 aa, Artificial Sequence
  Synthetic polypeptide
YGLGISKQEEGLGEESDEQGEGSQGWSEIQEMRSCCVA

SEQ ID NO: 25045 - protein, 37 aa, Artificial Sequence
  Synthetic polypeptide
GHSKKSPSVNQEVGPHQMPNLPTLQSWTSHSPELAGY

SEQ ID NO: 25046 - protein, 28 aa, Artificial Sequence
  Synthetic polypeptide
TKKWDLIRCQICQHFNLGLPILQNWLGI

SEQ ID NO: 25047 - protein, 63 aa, Artificial Sequence
  Synthetic polypeptide
GQSTNELDWCLYKRDSRELAHLFCLVRTQQEVTICEPRSGTSSDAKSANTSILDFPFSRTGWV

SEQ ID NO: 25048 - protein, 38 aa, Artificial Sequence
  Synthetic polypeptide
GHSKKSPSVNQEVGPHQMPNLPTLQSWTSHSPELAGYK

SEQ ID NO: 25049 - protein, 61 aa, Artificial Sequence
  Synthetic polypeptide
TKKWDLIRCQICQHFNLGLPILQNWLGISKQEEGLGEESDEQGEGSQGWSEIQEMRSCCVA

SEQ ID NO: 25050 - protein, 412 aa, Artificial Sequence
  Synthetic polypeptide
KNSKKLEWEIQPRTKRSSLQQGFLKNQIFSGIQMTRGYSGWKLCDCKNCGEVFREQFCLKTHMRVQNGGNTSEGNCYGKDTLSVHKEASTGQELSKFNPCGKVFTLTPGLAVHLEVLNARQPYKCKECGKGFKYFASLDNHMGIHTDEKLCEFQEYGRAVTASSHLKQCVAVHTGKKSKKTKKCGKSFTNFSQLYAPVKTHKGEKSFECKECGRSFRNSSCLNDHIQIHTGIKPHKCTYCGKAFTRSTQLTEHVRTHTGIKPYECKECGQAFAQYSGLSIHIRSHSGKKPYQCKECGKAFTTSTSLIQHTRIHTGEKPYECVECGKTFITSSRRSKHLKTHSGEKPFVCKICGKAFLYSSRLNVHLRTHTGEKPFVCKECGKAFAVSSRLSRHERIHTGEKPYECKDMSVTI

SEQ ID NO: 25051 - protein, 20 aa, Artificial Sequence
  Synthetic polypeptide
HCETPSLLKKFKKIRMGNTT

SEQ ID NO: 25052 - protein, 207 aa, Artificial Sequence
  Synthetic polypeptide
KNSKKLEWEIQPRTKRSSLQQGFLKNQIFSGIQMTRGYSGWKLCDCKNCGEVFREQFCLKTHMRVQNGGNTSEGNCYGKDTLSVHKEASTGQELSKFNPCGKVFTLTPGLAVHLEVLNARQPYKCKECGKGFKYFASLDNHMGIHTDEKLCEFQEYGRAVTASSHLKQCVAVHTGKKSKKTKKCGKSFTNFSQLYAPVKTHKGEKSF

SEQ ID NO: 25053 - protein, 32 aa, Artificial Sequence
  Synthetic polypeptide
VQWLMPVIPATQETENGKYNLEPNGHHFSRVF

SEQ ID NO: 25054 - protein, 13 aa, Artificial Sequence
  Synthetic polypeptide
FQLLRRQRMGNTT

SEQ ID NO: 25055 - protein, 420 aa, Artificial Sequence
  Synthetic polypeptide
AVAHACNSSYSGDREWEIQPRTKRSSLQQGFLKNQIFSGIQMTRGYSGWKLCDCKNCGEVFREQFCLKTHMRVQNGGNTSEGNCYGKDTLSVHKEASTGQELSKFNPCGKVFTLTPGLAVHLEVLNARQPYKCKECGKGFKYFASLDNHMGIHTDEKLCEFQEYGRAVTASSHLKQCVAVHTGKKSKKTKKCGKSFTNFSQLYAPVKTHKGEKSFECKECGRSFRNSSCLNDHIQIHTGIKPHKCTYCGKAFTRSTQLTEHVRTHTGIKPYECKECGQAFAQYSGLSIHIRSHSGKKPYQCKECGKAFTTSTSLIQHTRIHTGEKPYECVECGKTFITSSRRSKHLKTHSGEKPFVCKICGKAFLYSSRLNVHLRTHTGEKPFVCKECGKAFAVSSRLSRHERIHTGEKPYECKDMSVTI

SEQ ID NO: 25056 - protein, 215 aa, Artificial Sequence
  Synthetic polypeptide
AVAHACNSSYSGDREWEIQPRTKRSSLQQGFLKNQIFSGIQMTRGYSGWKLCDCKNCGEVFREQFCLKTHMRVQNGGNTSEGNCYGKDTLSVHKEASTGQELSKFNPCGKVFTLTPGLAVHLEVLNARQPYKCKECGKGFKYFASLDNHMGIHTDEKLCEFQEYGRAVTASSHLKQCVAVHTGKKSKKTKKCGKSFTNFSQLYAPVKTHKGEKSF

SEQ ID NO: 25057 - protein, 8 aa, Artificial Sequence
  Synthetic polypeptide
FQLLRRQS

SEQ ID NO: 25058 - protein, 15 aa, Artificial Sequence
  Synthetic polypeptide
AVAHACNSSYSGDRV

SEQ ID NO: 25059 - protein, 21 aa, Artificial Sequence
  Synthetic polypeptide
VCNPSTLGCQADKKLQWMETL

SEQ ID NO: 25060 - protein, 320 aa, Artificial Sequence
  Synthetic polypeptide
SVIPALWDAKQTRSYSGWKLCENCGEVFSEQFCLKTHMRAQNGGNTFEGNCYGKDSISVHKEASIGQELSKFNPCGKVFTLTPGLAVHLEILNGRQPYKCKECGKGFKYFASLDNHMGIHIGEKLCEFQECERAITTSSHLKQCVAVHTGKKSEKTKNCGKSFTNFSQLSAHAKTHKGEKSFECKECGRSFRNSSSFNVHIQIHTGIKPHKCTECGKAFTRSTHLTQHVRTHTGIKPYECKECGQAFTQYTGLAIHIRNHTGEKPYQCKECGKAFNRSSTLTQHRRIHTGEKPYECVECGKTFITSSHRSKHLKTHSGER

SEQ ID NO: 25061 - protein, 35 aa, Artificial Sequence
  Synthetic polypeptide
SQHFGMPSRQEATVDGNSVRIVERSSVNSFALRHT

SEQ ID NO: 25062 - protein, 21 aa, Artificial Sequence
  Synthetic polypeptide
SVIPALWDAKQTRSYSGWKLC

SEQ ID NO: 25063 - protein, 19 aa, Artificial Sequence
  Synthetic polypeptide
SQHFGMPSRQEATVDGNSV

SEQ ID NO: 25064 - protein, 51 aa, Artificial Sequence
  Synthetic polypeptide
SVIPALWDAKQTRSYSGWKLCENCGEVFSEQFCLKTHMRAQNGGNTFEGNC

SEQ ID NO: 25065 - protein, 21 aa, Artificial Sequence
  Synthetic polypeptide
EVPFTSCHDFEASPAMWNCPM

SEQ ID NO: 25066 - protein, 32 aa, Artificial Sequence
  Synthetic polypeptide
LLSHFLLLPPCKKCLSPPAMILRPPQPCGTAL

SEQ ID NO: 25067 - protein, 10 aa, Artificial Sequence
  Synthetic polypeptide
GLPSHVELPY

SEQ ID NO: 25068 - protein, 29 aa, Artificial Sequence
  Synthetic polypeptide
EVPFTSCHDFEASPAMWNCPMMPSREIQQ

SEQ ID NO: 25069 - protein, 13 aa, Artificial Sequence
  Synthetic polypeptide
GLPSHVELPYDAK

SEQ ID NO: 25070 - protein, 7 aa, Artificial Sequence
  Synthetic polypeptide
KPSTYRR

SEQ ID NO: 25071 - protein, 73 aa, Artificial Sequence
  Synthetic polypeptide
SLEIVMCRITMFWSSRGHSTRHYSLPVVMLVSANLLCFQSDKSPAHTGDDLASTTFCYSSTWQSGTNQISISK

SEQ ID NO: 25072 - protein, 936 aa, Artificial Sequence
  Synthetic polypeptide
CRQTYCASSRIKAQHIQEMTWLPPLSAIQAPGKVEPTKFPFPNKDSQLVSSGHNNPKKGDAEPESPDSGTSNTSMLEDDLKLSSDEEENEQQAAQRTALRALSDSAVVQQPNCRTSVPSSKGSSSSSSSGSSSSSSDSESSSGSDSETESSSSESEGSKPPHFSSPEAEPASSNKWQLDKWLNKVNPHKPPILIQNESHGSESNQYYNPVKEDVQDCGKVPDVCQPSLREKEIKSTCKEEQRPRTANKAPGSKGVKQKSPPAAVAVAVSAAAPPPAVPCAPAENAPAPARRSAGKKPTRRTERTSAGDGANCHRPEEPAAADALGTSVVVPPEPTKTRPCGNNRASHRKELRSSVTCEKRRTRGLSRIVPKSKEFIETESSSSSSSSDSDLESEQEEYPLSKAQTVAASASSGNDQRLKEAAANGGSGPRAPVGSINARTTSDIAKELEEQFYTLVPFGRNELLSPLKDSDEIRSLWVKIDLTLLSRIPEHLPQEPGVLSAPATKDSESAPPSHTSDTPAEKALPKSKRKRKCDNEDDYREIKKSQGEKDSSSRLATSTSNTLSANHCNMNINSVAIPINKNEKMLRSPISPLSDASKHKYTSEDLTSSSRPNGNSLFTSASSSKKPKADSQLQPHGGDLTKAAHNNSENIPLHKSRPQTKPWSPGSNGHRDCKRQKLVFDDMPRSADYFMQEAKRMKHKADAMVEKFGKALNYAEAALSFIECGNAMEQGPMESKSPYTMYSETVELIRYAMRLKTHSGPNATPEDKQLAALCYRCLALLYWRMFRLKRDHAVKYSKALIDYFKNSSKAAQAPSPWGASGKSTGTPSPMSPNPSPASSVGSQGSLSNASALSPSTIVSIPQRIHQMAANHVSITNSILHSYDYWEMADNLAKENREFFNDLDLLMGPVTLHSSMEHLVQYSQQGLHWLRNSAHLS

SEQ ID NO: 25073 - protein, 108 aa, Artificial Sequence
  Synthetic polypeptide
CRQTYCASSRIKAQHIQEMTWLPPLSAIQAPGKVEPTKFPFPNKDSQLVSSGHNNPKKGDAEPESPDSGTSNTSMLEDDLKLSSDEEENEQQAAQRTALRALSDSLSW

SEQ ID NO: 25074 - protein, 36 aa, Artificial Sequence
  Synthetic polypeptide
LISILFQIIEKCGKIFISFNKLLMIIHYCCCGRSYI

SEQ ID NO: 25075 - protein, 13 aa, Artificial Sequence
  Synthetic polypeptide
KNVGRFSSHLISS

SEQ ID NO: 25076 - protein, 73 aa, Artificial Sequence
  Synthetic polypeptide
LYYLGLCKNALMFAEEHRLTIHFSEVTRGTKNLSSGETQQGNVSPRLQKEESVNGCGVTTCTTSGFCWPHAFG

SEQ ID NO: 25077 - protein, 408 aa, Artificial Sequence
  Synthetic polypeptide
ERSDVCRRTSPNDTFLRSDKRNQEPQFRGNTARKCEPQAAEGRVSEWLRCDNMHHQWLLLAACFWVIFMFMVASKFITLTFKDPDVYSAKQEFLFLTTMPEVRKLPEEKHIPEELKPTGKELPDSQLVQPLVYMERLELIRNVCRDDALKNLSHTPVSKFVLDRIFVCDKHKILFCQTPKVGNTQWKKVLIVLNGAFSSIEEIPENVVHDHEKNGLPRLSSFSDAEIQKRLKTYFKFFIVRDPFERLISAFKDKFVHNPRFEPWYRHEIAPGIIRKYRRNRTETRGIQFEDFVRYLGDPNHRWLDLQFGDHIIHWVTYVELCAPCEIMYSVIGHHETLEDDAPYILKEAGIDHLVSYPTIPPGITVYNRTKVEHYFLGISKRDIRRLYARFEGDFKLFGYQKPDFLLN

SEQ ID NO: 25078 - protein, 146 aa, Artificial Sequence
  Synthetic polypeptide
ERSDVCRRTSPNDTFLRSDKRNQEPQFRGNTARKCEPQAAEGRVSEWLRCDNMHHQWLLLAACFWVIFMFMVASKFITLTFKDPDVYSAKQEFLFLTTMPEVRKLPEEKHIPEELKPTGKELPDSQLVQPLVYMERLELIRNVCRD

SEQ ID NO: 25079 - protein, 44 aa, Artificial Sequence
  Synthetic polypeptide
WFYQTFPLLHLPHFLLPPTCKKSLSPPSMILKPLQPCGTDFLNL

SEQ ID NO: 25080 - protein, 14 aa, Artificial Sequence
  Synthetic polypeptide
SLSSHVELISSTFS

SEQ ID NO: 25081 - protein, 183 aa, Artificial Sequence
  Synthetic polypeptide
AASYGTHSFQVWEVISLLSLPLTGVHSSAVPHLRKNCIENLMDEDEKDRAKRASRNKSEKKRRDQFNVLIKELSSMLPGNTRKMDKTTVLEKVIGFLQKHNEVSAQTEICDIQQDWKPSFLSNEEFTQLMLEALDGFIIAVTTDGSIIYVSDSITPLLGHLPSDVMDQNLLNFLPEQEHSEVY

SEQ ID NO: 25082 - protein, 23 aa, Artificial Sequence
  Synthetic polypeptide
FPSCPFPLQVFTALPFPTSGKTA

SEQ ID NO: 25083 - protein, 42 aa, Artificial Sequence
  Synthetic polypeptide
RLLWDTLLPGLGSNFPLVPSPYRCSQLCRSPPQEKLHRKSNG

SEQ ID NO: 25084 - protein, 865 aa, Artificial Sequence
  Synthetic polypeptide
AASYGTHSFQVWEVISLLSLPLTGVHSSAVPHLRKNCIENLMDEDEKDRAKRASRNKSEKKRRDQFNVLIKELSSMLPGNTRKMDKTTVLEKVIGFLQKHNEVSAQTEICDIQQDWKPSFLSNEEFTQLMLEALDGFIIAVTTDGSIIYVSDSITPLLGHLPSDVMDQNLLNFLPEQEHSEVYKILSSHMLVTDSPSPEYLKSDSDLEFYCHLLRGSLNPKEFPTYEYIKFVGNFRSYNNVPSPSCNGFDNTLSRPCRVPLGKEVCFIATVRLATPQFLKEMCIVDEPLEEFTSRHSLEWKFLFLDHRAPPIIGYLPFEVLGTSGYDYYHIDDLELLARCHQHLMQFGKGKSCCYRFLTKGQQWIWLQTHYYITYHQWNSKPEFIVCTHSVVSYADVRVERRQELALEDPPSEALHSSALKDKGSSLEPRQHFNTLDVGASGLNTSHSPSASSRSSHKSSHTAMSEPTSTPTKLMAEASTPALPRSATLPQELPVPGLSQAATMPAPLPSPSSCDLTQQLLPQTVLQSTPAPMAQFSAQFSMFQTIKDQLEQRTRILQANIRWQQEELHKIQEQLCLVQDSNVQMFLQQPAVSLSFSSTQRPEAQQQLQQRSAAVTQPQLGAGPQLPGQISSAQVTSQHLLRESSVISTQGPKPMRSSQLMQSSGRSGSSLVSPFSSATAALPPSLNLTTPASTSQDASQCQPSPDFSHDRQLRLLLSQPIQPMMPGSCDARQPSEVSRTGRQVKYAQSQTVFQNPDAHPANSSSAPMPVLLMGQAVLHPSFPASQPSPLQPAQARQQPPQHYLQVQAPTSLHSEQQDSLLLSTYSQQPGTLGYPQPPPAQPQPLRPPRRVSSLSESSGLQQPPR

SEQ ID NO: 25085 - protein, 14 aa, Artificial Sequence
  Synthetic polypeptide
ANHSLKMTETASRR

SEQ ID NO: 25086 - protein, 55 aa, Artificial Sequence
  Synthetic polypeptide
NSLRQVLQALFQKAQERTALCVLLPMKTFSWDKMWTWKTLILTILTLCRPRLITH

SEQ ID NO: 25087 - protein, 40 aa, Artificial Sequence
  Synthetic polypeptide
RIMRSGDRDHPGQHVHEHPDLRAAAVHQGGGSLLAVGCCV

SEQ ID NO: 25088 - protein, 560 aa, Artificial Sequence
  Synthetic polypeptide
GQEIETILANMSMNILTSVLLLYTKEEEAFWLLVAVCERMLPDYFNHRVIGAQVDQSVFEELIKGHLPELAEHMNDLSALASVSLSWFLTLFLSIMPLESAVNVVDCFFYDGIKAIFQLGLAVLEANAEDLCSSKDDGQALMILSRFLDHIKNEDSPGPPVGSHHAFFSDDQEPYPVTDISDLIRDSYEKFGDQSVEQIEHLRYKHRIRVLQGHEDTTKQNVLRVVIPEVSILPEDLEELYDLFKREHMMSCYWEQPRPMASRHDPSRPYAEQYRIDARQFAHLFQLVSPWTCGAHTEILAERTFRLLDDNMDQLIEFKAFVSCLDIMYNGEMNEKIKLLYRLHIPPALTENDRDSQSPLRNPLLSTSRPLVFGKPNGDAVDYQKQLKQMIKDLAKEKDKTEKELPKMSQREFIQFCKTLYSMFHEDPEENDLYQAIATVTTLLLQIGEVGQRGSSSGSCSQECGEELRASAPSPEDSVFADTGKTPQDSQAFPEAAERDWTVSLEHILASLLTEQSLVNFFEKPLDMKSKLENAKINQYNLKTFEMSHQSQSELKLSNL

SEQ ID NO: 25089 - protein, 15 aa, Artificial Sequence
  Synthetic polypeptide
DHEVRRSRPSWPTCP

SEQ ID NO: 25090 - protein, 1067 aa, Artificial Sequence
  Synthetic polypeptide
AIKYSLGATLEEINQHWDWLEQNLLHTLSVFDNKDDIASFVKGKVKALIAEETSSRLAEQEEEPEKFREALVKFEARFNFPEAEKLVTYYSCCCWKGRVPRQGWLYLSINHLCFYSFFLGKELKLVVPWVDIQKLERTSNVFLTDTIRITTQNKERDFSMFLNLDEVFKVMEQLADVTLRRLLDNEVFDLDPDLQEPSQITKRDLEARAQNEFFRAFFRLPRKEKLHAVVDCSLWTPFSRCHTTGRMFASDSYICFASREDGCCKIILPLREVVSIEKMEDTSLLPHPIIVSIRSKVAFQFIELRDRDSLVEALLARLKQVHANHPVHYDTSADDDMASLVFHSTSMCSDHRFGDLEMMSSQNSEESEKEKSPLMHPDALVTAFQQSGSQSPDSRMSREQIKISLWNDHFVEYGRTVCMFRTEKIRKLVAMGIPESLRGRLWLLFSDAVTDLASHPGYYGNLVEESLGKCCLVTEEIERDLHRSLPEHPAFQNETGIAALRRVLTAYAHRNPKIGYCQSMNILTSVLLLYTKEEEAFWLLVAVCERMLPDYFNHRVIGAQVDQSVFEELIKGHLPELAEHMNDLSALASVSLSWFLTLFLSIMPLESAVNVVDCFFYDGIKAIFQLGLAVLEANAEDLCSSKDDGQALMILSRFLDHIKNEDSPGPPVGSHHAFFSDDQEPYPVTDISDLIRDSYEKFGDQSVEQIEHLRYKHRIRVLQGHEDTTKQNVLRVVIPEVSILPEDLEELYDLFKREHMMSCYWEQPRPMASRHDPSRPYAEQYRIDARQFAHLFQLVSPWTCGAHTEILAERTFRLLDDNMDQLIEFKAFVSCLDIMYNGEMNEKIKLLYRLHIPPALTENDRDSQSPLRNPLLSTSRPLVFGKPNGDAVDYQKQLKQMIKDLAKEKDKTEKELPKMSQREFIQFCKTLYSMFHEDPEENDLYQAIATVTTLLLQIGEVGQRGSSSGSCSQECGEELRASAPSPEDSVFADTGKTPQDSQAFPEAAERDWTVSLEHILASLLTEQSLVNFFEKPLDMKSKLENAKINQYNLKTFEMSHQSQSELKLSNL

SEQ ID NO: 25091 - protein, 54 aa, Artificial Sequence
  Synthetic polypeptide
GKTFQQQKDYDLLKAQIIMNVFLSHKVFSRCNIRGNQSALGLAGTKSPPHLVCL

SEQ ID NO: 25092 - protein, 46 aa, Artificial Sequence
  Synthetic polypeptide
VCSTTASLLLLLPPCEMSPFAFQHDWKLPEAPQKQKLPCFCRTVQH

SEQ ID NO: 25093 - protein, 67 aa, Artificial Sequence
  Synthetic polypeptide
YVALPPLSCSCSHHVKCPPLPSSMIGSFLRLPRSRSCHASAEPCNIRGNQSALGLAGTKSPPHLVCL

SEQ ID NO: 25094 - protein, 1074 aa, Artificial Sequence
  Synthetic polypeptide
GSPEAEVAMLLQNRATLEEINQHWDWLEQNLLHTLSVFDNKDDIASFVKGKVKALIAEETSSRLAEQEEEPEKFREALVKFEARFNFPEAEKLVTYYSCCCWKGRVPRQGWLYLSINHLCFYSFFLGKELKLVVPWVDIQKLERTSNVFLTDTIRITTQNKERDFSMFLNLDEVFKVMEQLADVTLRRLLDNEVFDLDPDLQEPSQITKRDLEARAQNEFFRAFFRLPRKEKLHAVVDCSLWTPFSRCHTTGRMFASDSYICFASREDGCCKIILPLREVVSIEKMEDTSLLPHPIIVSIRSKVAFQFIELRDRDSLVEALLARLKQVHANHPVHYDTSADDDMASLVFHSTSMCSDHRFGDLEMMSSQNSEESEKEKSPLMHPDALVTAFQQSGSQSPDSRMSREQIKISLWNDHFVEYGRTVCMFRTEKIRKLVAMGIPESLRGRLWLLFSDAVTDLASHPGYYGNLVEESLGKCCLVTEEIERDLHRSLPEHPAFQNETGIAALRRVLTAYAHRNPKIGYCQSMNILTSVLLLYTKEEEAFWLLVAVCERMLPDYFNHRVIGAQVDQSVFEELIKGHLPELAEHMNDLSALASVSLSWFLTLFLSIMPLESAVNVVDCFFYDGIKAIFQLGLAVLEANAEDLCSSKDDGQALMILSRFLDHIKNEDSPGPPVGSHHAFFSDDQEPYPVTDISDLIRDSYEKFGDQSVEQIEHLRYKHRIRVLQGHEDTTKQNVLRVVIPEVSILPEDLEELYDLFKREHMMSCYWEQPRPMASRHDPSRPYAEQYRIDARQFAHLFQLVSPWTCGAHTEILAERTFRLLDDNMDQLIEFKAFVSCLDIMYNGEMNEKIKLLYRLHIPPALTENDRDSQSPLRNPLLSTSRPLVFGKPNGDAVDYQKQLKQMIKDLAKEKDKTEKELPKMSQREFIQFCKTLYSMFHEDPEENDLYQAIATVTTLLLQIGEVGQRGSSSGSCSQECGEELRASAPSPEDSVFADTGKTPQDSQAFPEAAERDWTVSLEHILASLLTEQSLVNFFEKPLDMKSKLENAKINQYNLKTFEMSHQSQSELKLSNL

SEQ ID NO: 25095 - protein, 1100 aa, Artificial Sequence
  Synthetic polypeptide
NSGRLVGALDAVLDSNARVAPFRILLQVPGSQVYSPIACGATLEEINQHWDWLEQNLLHTLSVFDNKDDIASFVKGKVKALIAEETSSRLAEQEEEPEKFREALVKFEARFNFPEAEKLVTYYSCCCWKGRVPRQGWLYLSINHLCFYSFFLGKELKLVVPWVDIQKLERTSNVFLTDTIRITTQNKERDFSMFLNLDEVFKVMEQLADVTLRRLLDNEVFDLDPDLQEPSQITKRDLEARAQNEFFRAFFRLPRKEKLHAVVDCSLWTPFSRCHTTGRMFASDSYICFASREDGCCKIILPLREVVSIEKMEDTSLLPHPIIVSIRSKVAFQFIELRDRDSLVEALLARLKQVHANHPVHYDTSADDDMASLVFHSTSMCSDHRFGDLEMMSSQNSEESEKEKSPLMHPDALVTAFQQSGSQSPDSRMSREQIKISLWNDHFVEYGRTVCMFRTEKIRKLVAMGIPESLRGRLWLLFSDAVTDLASHPGYYGNLVEESLGKCCLVTEEIERDLHRSLPEHPAFQNETGIAALRRVLTAYAHRNPKIGYCQSMNILTSVLLLYTKEEEAFWLLVAVCERMLPDYFNHRVIGAQVDQSVFEELIKGHLPELAEHMNDLSALASVSLSWFLTLFLSIMPLESAVNVVDCFFYDGIKAIFQLGLAVLEANAEDLCSSKDDGQALMILSRFLDHIKNEDSPGPPVGSHHAFFSDDQEPYPVTDISDLIRDSYEKFGDQSVEQIEHLRYKHRIRVLQGHEDTTKQNVLRVVIPEVSILPEDLEELYDLFKREHMMSCYWEQPRPMASRHDPSRPYAEQYRIDARQFAHLFQLVSPWTCGAHTEILAERTFRLLDDNMDQLIEFKAFVSCLDIMYNGEMNEKIKLLYRLHIPPALTENDRDSQSPLRNPLLSTSRPLVFGKPNGDAVDYQKQLKQMIKDLAKEKDKTEKELPKMSQREFIQFCKTLYSMFHEDPEENDLYQAIATVTTLLLQIGEVGQRGSSSGSCSQECGEELRASAPSPEDSVFADTGKTPQDSQAFPEAAERDWTVSLEHILASLLTEQSLVNFFEKPLDMKSKLENAKINQYNLKTFEMSHQSQSELKLSNL

SEQ ID NO: 25096 - protein, 65 aa, Artificial Sequence
  Synthetic polypeptide
PGTGQQGLEIESKHQVHGRCFNHSCLHNKTLVAWSALWMQCWIPMHGSLHFEFCFKFPAPRFILP

SEQ ID NO: 25097 - protein, 92 aa, Artificial Sequence
  Synthetic polypeptide
QGQDNRGWRLSPSTKSMADVLITPAYIIKLWSPGRRSGCSVGFQCTGRSISNSASSSRLPGLFSHSMWCNIRGNQSALGLAGTKSPPHLVCL

SEQ ID NO: 25098 - protein, 1115 aa, Artificial Sequence
  Synthetic polypeptide
NSGRLVGALDAVLDSNARVAPFRILLQVPGSQVYSPIACGELLNGSDVYWAIATGATLEEINQHWDWLEQNLLHTLSVFDNKDDIASFVKGKVKALIAEETSSRLAEQEEEPEKFREALVKFEARFNFPEAEKLVTYYSCCCWKGRVPRQGWLYLSINHLCFYSFFLGKELKLVVPWVDIQKLERTSNVFLTDTIRITTQNKERDFSMFLNLDEVFKVMEQLADVTLRRLLDNEVFDLDPDLQEPSQITKRDLEARAQNEFFRAFFRLPRKEKLHAVVDCSLWTPFSRCHTTGRMFASDSYICFASREDGCCKIILPLREVVSIEKMEDTSLLPHPIIVSIRSKVAFQFIELRDRDSLVEALLARLKQVHANHPVHYDTSADDDMASLVFHSTSMCSDHRFGDLEMMSSQNSEESEKEKSPLMHPDALVTAFQQSGSQSPDSRMSREQIKISLWNDHFVEYGRTVCMFRTEKIRKLVAMGIPESLRGRLWLLFSDAVTDLASHPGYYGNLVEESLGKCCLVTEEIERDLHRSLPEHPAFQNETGIAALRRVLTAYAHRNPKIGYCQSMNILTSVLLLYTKEEEAFWLLVAVCERMLPDYFNHRVIGAQVDQSVFEELIKGHLPELAEHMNDLSALASVSLSWFLTLFLSIMPLESAVNVVDCFFYDGIKAIFQLGLAVLEANAEDLCSSKDDGQALMILSRFLDHIKNEDSPGPPVGSHHAFFSDDQEPYPVTDISDLIRDSYEKFGDQSVEQIEHLRYKHRIRVLQGHEDTTKQNVLRVVIPEVSILPEDLEELYDLFKREHMMSCYWEQPRPMASRHDPSRPYAEQYRIDARQFAHLFQLVSPWTCGAHTEILAERTFRLLDDNMDQLIEFKAFVSCLDIMYNGEMNEKIKLLYRLHIPPALTENDRDSQSPLRNPLLSTSRPLVFGKPNGDAVDYQKQLKQMIKDLAKEKDKTEKELPKMSQREFIQFCKTLYSMFHEDPEENDLYQAIATVTTLLLQIGEVGQRGSSSGSCSQECGEELRASAPSPEDSVFADTGKTPQDSQAFPEAAERDWTVSLEHILASLLTEQSLVNFFEKPLDMKSKLENAKINQYNLKTFEMSHQSQSELKLSNL

SEQ ID NO: 25099 - protein, 68 aa, Artificial Sequence
  Synthetic polypeptide
QGQDNRGWRLSPSTKSMADVLITPAYIIKLWSPGRRSGCSVGFQCTGRSISNSASSSRLPGLFSHSMW

SEQ ID NO: 25100 - protein, 278 aa, Artificial Sequence
  Synthetic polypeptide
RKSDRFDYLHILNFSIMKAIQWGEDGRPFHYLFYTGKQSYYSLMHDVYGMLLNLEKHQSHLQAKSLLPEKTVTRDVIGSRWLIKEELEEMLVEKLSDLDYMQFIRLLEKLLTSQCGAAEEEFVQRFRRSVTLESKKQLIEPVQYDEQGMAFSKSEGKRKTAKAEAIVYKHGSGRIKVNGIDYQLYFPITQDREQLMFPFHFVDRLGKHDVTCTVSGGGRSAQAGAIRLAMAKALCSFVTEDEVEWMRQAGLLTTDPRVRERKKPGQEGARRKFTWKKR

SEQ ID NO: 25101 - protein, 25 aa, Artificial Sequence
  Synthetic polypeptide
KQSSGEKMAVHFTISSILANSHTIH

SEQ ID NO: 25102 - protein, 38 aa, Artificial Sequence
  Synthetic polypeptide
LFTYFKLLDYESNPVGRRWPSISLSLLYWQTVILFINA

SEQ ID NO: 25103 - protein, 31 aa, Artificial Sequence
  Synthetic polypeptide
TWEAEVTVSRDHATALQPGTQRLVLQGPALA

SEQ ID NO: 25104 - protein, 240 aa, Artificial Sequence
  Synthetic polypeptide
AEIMPLHSSLGHRDLSYKDRHWHEACFHCSQCRNSLVDKPFAAKEDQLLCTDCYSNEYSSKCQECKKTIMPGTRKMEYKGSSWHETCFICHRCQQPIGTKSFIPKDNQNFCVPCYEKQHAMQCVQCKKPITTGGVTYREQPWHKECFVCTACRKQLSGQRFTARDDFAYCLNCFCDLYAKKCAGCTNPISGLGGTKYISFEERQWHNDCFNCKKCSLSLVGRGFLTERDDILCPDCGKDI

SEQ ID NO: 25105 - protein, 192 aa, Artificial Sequence
  Synthetic polypeptide
SQLLERLRHENHLNLGGRSYSEPRSCHCTPAWDTETCLTRTGTGMKPVSTARSAETHWWTSPLLPRRTSCSVQTAIPTSTHPSARNARRPSCQVPARWSTRAAAGMRPASSATAASSQLEPRVSSPKTIRISVCPAMRNNMPCSAFSAKSPSPREGSLTGSSPGTRSASCAPPAGSSCLGSASQLAMTLPTA

SEQ ID NO: 25106 - protein, 86 aa, Artificial Sequence
  Synthetic polypeptide
RHTGRRQHLQVQERGLARNQPCPHLDLDFQPPELPRQDAQEDQRAGCVPHAQHGRRVPRQWQRRRPHLRPQHPGLRQVRLCGRAGG

SEQ ID NO: 25107 - protein, 380 aa, Artificial Sequence
  Synthetic polypeptide
VKMKSLGWALIQSNWCSYKKRRLEHKEKEIGTQTHSEGRPCEDTQEEDSICRSRREALQGTNPAHTLIWTSSLQNCLGKTRRKTSARDASPTPSTDAEYPANGSGADRIYDLNIPAFVKFAYVAEREDELSLVKGSRVTVMEKCSDGWWRGSYNGQIGWFPSNYVLEEVDEAAAESPSFLSLRKGASLSNGQGSRVLHVVQTLYPFSSVTEEELNFEKGETMEVIEKPENDPEWWKCKNARGQVGLVPKNYVVVLSDGPALHPAHAPQISYTGPSSSGRFAGREWYYGNVTRHQAECALNERGVEGDFLIRDSESSPSDFSVSLKASGKNKHFKVQLVDNVYCIGQRRFHTMDELVEHYKKAPIFTSEHGEKLYLVRALQ

SEQ ID NO: 25108 - protein, 65 aa, Artificial Sequence
  Synthetic polypeptide
FGLPASRIASARRAGRPARGMRPPRPARTPSTPPMAAAPTASTTSTSRPSSSSPMWPSGRMSCPW

SEQ ID NO: 25109 - protein, 144 aa, Artificial Sequence
  Synthetic polypeptide
VKMKSLGWALIQSNWCSYKKRRLEHKEKEIGTQTHSEGRPCEDTQEEDSICRSRREALQGTNPAHTLIWTSSLQNCLGKTRRKTSARDASPTPSTDAEYPANGSGADRIYDLNIPAFVKFAYVAEREDELSLVKGSRVTVMEKC

SEQ ID NO: 25110 - protein, 68 aa, Artificial Sequence
  Synthetic polypeptide
RHTGRRQHLQVQERGLARNQPCPHLDLDFQPPELPRQDAQEDQRAGCVPHAQHGRRVPRQWQRRRPHL

SEQ ID NO: 25111 - protein, 110 aa, Artificial Sequence
  Synthetic polypeptide
VKMKSLGWALIQSNWCSYKKRRLEHKEKEIGTQTHSEGRPCEDTQEEDSICRSRREALQGTNPAHTLIWTSSLQNCLGKTRRKTSARDASPTPSTDAEYPANGSGADRIY

SEQ ID NO: 25112 - protein, 43 aa, Artificial Sequence
  Synthetic polypeptide
FGLPASRIASARRAGRPARGMRPPRPARTPSTPPMAAAPTAST

SEQ ID NO: 25113 - protein, 347 aa, Artificial Sequence
  Synthetic polypeptide
NVLGPAPRWCSFLDNLTEELEENPESTVYDDYKFVTKKDLENLGLTHLIGSPFLRAYMHGFFMDIRLYHKVKLMVNPFAYEEYRKDKIRQKIEETRAQRVQLKKLPKVNKELALKLIEEEEEKQKSTWKKKVKSLPNILTDDRFKVMFENPDFQVDEESEEFRLLNPLVSKISEKRKKKLRLLEQQELREKEEEEEPEGKPSDAESSESSDDEKAWVEEVRKQRRLLQQEEKVKRQERLKEDQQTVLKPQFYEIKAGEEFRSFKDSATKQKLMNKTLEDRLKIEAKNGTLSVSDTTVGSKQLTFTLKRSEQQKKQQEAEKLHRQERKRLRRSAGHLKSRHKRGRSFH

SEQ ID NO: 25114 - protein, 15 aa, Artificial Sequence
  Synthetic polypeptide
ALEMFWVLLLGGVPS

SEQ ID NO: 25115 - protein, 37 aa, Artificial Sequence
  Synthetic polypeptide
SHVAVEHLKCFGSCSSVVFLLRQLDRRIRRESRKHSL

SEQ ID NO: 25116 - protein, 11 aa, Artificial Sequence
  Synthetic polypeptide
NFYEISDRRNN

SEQ ID NO: 25117 - protein, 475 aa, Artificial Sequence
  Synthetic polypeptide
GILYGCTQVNSKISMKSQTEEITSTTDSVYTGGTEVMVPSFCKSEEPDSITKSISSPSVSSETMDKPVDLSTRKEIDTDSTSQGESKIVSFGFGSSTGLSFADLASSNSGDFAFGSKDKNFQWANTGAAVFGTQSVGTQSAGKVGEDEDGSDEEVVHNEDIHFEPIVSLPEVEVKSGEEDEEILFKERAKLYRWDRDVSQWKERGVGDIKILWHTMKNYYRILMRRDQVFKVCANHVITKTMELKPLNVSNNALVWTASDYADGEAKVEQLAVRFKTKEVADCFKKTFEECQQNLMKLQKGHVSLAAELSKETNPVVFFDVCADGEPLGRITMELFSNIVPRTAENFRALCTGEKGFGFKNSIFHRVIPDFVCQGGDITKHDGTGGQSIYGDKFEDENFDVKHTGPGLLSMANQGQNTNNSQFVITLKKAEHLDFKHVVFGFVKDGMDTVKKIESFGSPKGSVCRRITITECGQI

SEQ ID NO: 25118 - protein, 30 aa, Artificial Sequence
  Synthetic polypeptide
WCHFPTACAHFESLCHISVPGALRLQAPEE

SEQ ID NO: 25119 - protein, 301 aa, Artificial Sequence
  Synthetic polypeptide
RQTSFHRTSLCCASQILHFFYKLKLRGNPASTKSSGAIFQQHVLTSSLCVTFRYLALYAYKPQKSDELELHKGEMYRVLEKCQDGWFKGASLRTGVSGVFPGNYVTPVSRVPAGGAGPPRNNVVGGSPLAKGITTTMHPGSGSLSSLATATRPALPITTPQAHAQHPTASPPTGSCLRHSAQPTASQARSTISTAAHSAAQAQDRPTATVSPLRTQNSPSRLPATSLRPHSVVSPQHSHQPPVQMCPRPAIPLTSAASAITPPNVSAANLNGEAGGGPIGVLSTSSPTNTGCKLDEKKSEK

SEQ ID NO: 25120 - protein, 68 aa, Artificial Sequence
  Synthetic polypeptide
SFGATQHPPSLVVPFSNSMCSLRVSVSHFGTWRSTPTSPRRVTSWSCTRERCTGSSRSVRMAGSRGRL

SEQ ID NO: 25121 - protein, 467 aa, Artificial Sequence
  Synthetic polypeptide
RQTSFHRTSLCCASQILHFFYKLKLRGNPASTKSSGAIFQQHVLTSSLCVTFRYLALYAYKPQKSDELELHKGEMYRVLEKCQDGWFKGASLRTGVSGVFPGNYVTPVSRVPAGGAGPPRNNVVGGSPLAKGITTTMHPGSGSLSSLATATRPALPITTPQAHAQHPTASPPTGSCLRHSAQPTASQARSTISTAAHSAAQAQDRPTATVSPLRTQNSPSRLPATSLRPHSVVSPQHSHQPPVQMCPRPAIPLTSAASAITPPNVSAANLNGEAGGGPIGVLSTSSPTNTGCKLDEKKSEKKEKKSGLLKLLAGASTKKKSRSPPSVSPTHDPQVAVDALLQGAVGPEVSSLSIHGRAGSCPIESEMQGAMGMEPLHRKAGSLDLNFTSPSRQAPLSMAAIRPEPKLLPRERYRVVVSYPPQSEAEIELKEGDIVFVHKKREDGWYKGTLQRNGRTGLFPGSFVESF

SEQ ID NO: 25122 - protein, 41 aa, Artificial Sequence
  Synthetic polypeptide
SYIASLKVTVFKNLLMALVFKRPMKPKDMSSMVNVRGRKKK

SEQ ID NO: 25123 - protein, 213 aa, Artificial Sequence
  Synthetic polypeptide
SYSFQEPIDGISVQETYEAKRHEFHGERQRKEEEMKQMFVQRVKEKEAILKEAERELQAKFEHLKRLHQEERMKLEEKRRLLEEEIIAFSKKKATSEIFHSQSFLATGSNLRKDKDRKKEPGCRFELLCIDVRACETNGGRKDAEKAPIFCKTEVPEHRRSSSQANFIKKKLEVCFDFAVICFITSIFGEQPQLLIFMEKYFQVQGQYISQSE

SEQ ID NO: 25124 - protein, 123 aa, Artificial Sequence
  Synthetic polypeptide
SYSFQEPIDGISVQETYEAKRHEFHGERQRKEEEMKQMFVQRVKEKEAILKEAERELQAKFEHLKRLHQEERMKLEEKRRLLEEEIIAFSKKKATSEIFHSQSFLATGSNLRKDKDRKNSNFL

SEQ ID NO: 25125 - protein, 157 aa, Artificial Sequence
  Synthetic polypeptide
SYSFQEPIDGISVQETYEAKRHEFHGERQRKEEEMKQMFVQRVKEKEAILKEAERELQAKFEHLKRLHQEERMKLEEKRRLLEEEIIAFSKKKATSEIFHSQSFLATGSNLRKDKDRKKEPGCRFELLCIDVRACETNGGRKDAEKGREGHSARGQP

SEQ ID NO: 25126 - protein, 119 aa, Artificial Sequence
  Synthetic polypeptide
SYSFQEPIDGISVQETYEAKRHEFHGERQRKEEEMKQMFVQRVKEKEAILKEAERELQAKFEHLKRLHQEERMKLEEKRRLLEEEIIAFSKKKATSEIFHSQSFLATGSNLRKDKDRKK

SEQ ID NO: 25127 - protein, 67 aa, Artificial Sequence
  Synthetic polypeptide
GHYAKREGQSQKDKYGMIPFISGHHYSGSVCLRTSVCDPGPCSSPSPTHEGLPAALCRYLGSWSGPW

SEQ ID NO: 25128 - protein, 90 aa, Artificial Sequence
  Synthetic polypeptide
FHSYQGIITQAASVSEPQCVIPAPAAAPLPPMRGFQLLCADIWVLGLDHGSRHPHSIPLAARMGDVCLAHLVSHLLDVPVVLLVWILQKI

SEQ ID NO: 25129 - protein, 32 aa, Artificial Sequence
  Synthetic polypeptide
ARRAVTKGQIRHDSIHIRASLLRQRLSQNLSV

SEQ ID NO: 25130 - protein, 23 aa, Artificial Sequence
  Synthetic polypeptide
KWPYCPRSGELYLLSGSEWSVFL

SEQ ID NO: 25131 - protein, 830 aa, Artificial Sequence
  Synthetic polypeptide
AKSPANIIMTGSNSHITILTLNINGLNSAIKRHRLASWIKSQDPSVCCIQETHLTCRDTHRLKIKGWRKIYQANGKQKKAGVAILVSDKTDFKPTKIKRDKEGHYIMVKGSIQQEELTFLNIYAPNTGAPRFIKQVLSDLQRDLDSHTLIMGDFNTPLSTLDRSTRQKVNKDTQELNSALHQADLIDIYRTLHPKSTEYTFFSAPHHTYSKIDHIVGSKALLSKCKRTEIITNYLSDHSAIKLELRIKTLTQSRSTTWKLNNLLLNDYWVHNEMKAEIKMFFETNENKDTTYQNLWDAFKAVCRGKFIALNAYKRKQERSKIDTLTSQLKELEKQEQTHSKASRRQEITKIRAELKEIETQKTLQKINESRSWFFERINKIDRPLARLIKKKREKNQIDTIKNDKGDITTDPTEIQTTIREYYKHLYANKLENLEEMDTFLDTYTLPRLNQEEVESLNRPITGSEIVAIINSLPTKKSPGPDGFTAEFYQRYKEELVPFLLKLFQSIEKEGILPNSFYEASIILIPKPGRDTTKKENFRPISLMNIDAKILNKILANRIQQHIKKLIHHDQVGFIPGMQGWFNIRKSINVIQHINRAKGKNHMIISIDAEKAFDKIQQPFMLKTLNKLGIDGTYFKIIRAIYDKPTANIILNGQKLEAFPLKTGTRQGCPLSPLLFNIVLEVLARAIRQEKEIKGIQLGKEEVKLSLFADDMIVYLENPIVSAQNLLKLISNFSKVSGYKINVQKSQAFLYTNNRQTESQIMGELPFTIASKRIKYLGIQLTRDVKDLFKENYKPLLKEIKEDTNKWKNIPCSWVGRINIVKMAILPKVW

SEQ ID NO: 25132 - protein, 498 aa, Artificial Sequence
  Synthetic polypeptide
TPIHNCFKENKIPRNPTYKGCEGPLQGELQTTAQGNKRGHKQMEEHSMLMGRKNQYRENGHTAQGLVSCTFFLAVNGLYSSSDDVIELTPSNFNREVIQSDSLWLVEFYAPWCGHCQRLTPEWKKAATALKDVVKVGAVDADKHHSLGGQYGVQGFPTIKIFGSNKNRPEDYQGGRTGEAIVDAALSALRQLVKDRLGGRSGGYSSGKQGRSDSSSKKDVIELTDDSFDKNVLDSEDVWMVEFYAPWCGHCKNLEPEWAAAASEVKEQTKGKVKLAAVDATVNQVLASRYGIRGFPTIKIFQKGESPVDYDGGRTRSDIVSRALDLFSDNAPPPELLEIINEDIAKRTCEEHQLCVVAVLPHILDTGAAGRNSYLEVLLKLADKYKKKMWGWLWTEAGAQSELETALGIGGFGYPAMAAINARKMKFALLKGSFSEQGINEFLRELSFGRGSTAPVGGGAFPTIVEREPWDGRDGELPVEDDIDLSDVELDDLGKDEL

SEQ ID NO: 25133 - protein, 37 aa, Artificial Sequence
  Synthetic polypeptide
SILEHRQKLVKVLSWSMSITFLEKEPLPRCTKLPREI

SEQ ID NO: 25134 - protein, 317 aa, Artificial Sequence
  Synthetic polypeptide
LNIKYPRTQAKTSESSKLVYVHHLLGEGAFAQVYEATQGDLNDAKNKQKFVLKVQKPANPWEFYIGTQLMERLKPSMQHMFMKFYSAHLFQNGSVLVGELYSYGTLLNAINLYKNTPEKVMPQGLVISFAMRMLYMIEQVHDCEIIHGDIKPDNFILGNGFLEQDDEDDLSAGLALIDLGQSIDMKLFPKGTIFTAKCETSGFQCVEMLSNKPWNYQIDYFGVAATVYCMLFGTYMKVKNEGGECKPEGLFRRLPHLDMWNEFFHVMLNIPDCHHLPSLDLLRQKLKKVFQQHYTNKIRALRNRLIVLLLECKRSRK

SEQ ID NO: 25135 - protein, 260 aa, Artificial Sequence
  Synthetic polypeptide
LNIKYPRTQAKTSESSKLVYVHHLLGEGAFAQVYEATQGDLNDAKNKQKFVLKVQKPANPWEFYIGTQLMERLKPSMQHMFMKFYSAHLFQNGSVLVGELYSYGTLLDDEDDLSAGLALIDLGQSIDMKLFPKGTIFTAKCETSGFQCVEMLSNKPWNYQIDYFGVAATVYCMLFGTYMKVKNEGGECKPEGLFRRLPHLDMWNEFFHVMLNIPDCHHLPSLDLLRQKLKKVFQQHYTNKIRALRNRLIVLLLECKRSRK

SEQ ID NO: 25136 - protein, 37 aa, Artificial Sequence
  Synthetic polypeptide
SQEFETSLGNMVLSWSMSITFLEKEPLPRCTKLPREI

SEQ ID NO: 25137 - protein, 30 aa, Artificial Sequence
  Synthetic polypeptide
LTPVIPTLWEAKAGGSLEARNLRQAWATWF

SEQ ID NO: 25138 - protein, 309 aa, Artificial Sequence
  Synthetic polypeptide
DKPGQHGSKLVYVHHLLGEGAFAQVYEATQGDLNDAKNKQKFVLKVQKPANPWEFYIGTQLMERLKPSMQHMFMKFYSAHLFQNGSVLVGELYSYGTLLNAINLYKNTPEKVMPQGLVISFAMRMLYMIEQVHDCEIIHGDIKPDNFILGNGFLEQDDEDDLSAGLALIDLGQSIDMKLFPKGTIFTAKCETSGFQCVEMLSNKPWNYQIDYFGVAATVYCMLFGTYMKVKNEGGECKPEGLFRRLPHLDMWNEFFHVMLNIPDCHHLPSLDLLRQKLKKVFQQHYTNKIRALRNRLIVLLLECKRSRK

SEQ ID NO: 25139 - protein, 252 aa, Artificial Sequence
  Synthetic polypeptide
DKPGQHGSKLVYVHHLLGEGAFAQVYEATQGDLNDAKNKQKFVLKVQKPANPWEFYIGTQLMERLKPSMQHMFMKFYSAHLFQNGSVLVGELYSYGTLLDDEDDLSAGLALIDLGQSIDMKLFPKGTIFTAKCETSGFQCVEMLSNKPWNYQIDYFGVAATVYCMLFGTYMKVKNEGGECKPEGLFRRLPHLDMWNEFFHVMLNIPDCHHLPSLDLLRQKLKKVFQQHYTNKIRALRNRLIVLLLECKRSRK

SEQ ID NO: 25140 - protein, 528 aa, Artificial Sequence
  Synthetic polypeptide
QWLPLKAEKTKNFVSRSLVIGEVLSMADMATGVKCGIIYWLFGGAIRNLGSPEHVTKWFQPLQEQKYTGMFAMTERGHGSNARGIQTEATFDLSAQEFVIDTPCENAEKMYIGNAMYGNYAAVFAQLIIDGRSQGPHCFIVPVRDENGSLYPGVTAIDMMYKEGLHGVDNGILIFDKVRIPRENLLDKFGSVAPDGQYHSPIRNKSARFNAMLAALTPSRLAVAFQAMGAMKLGLTIAIRYSHSRRQFGPKTKEEVKIIEHQTQTLRLMPHLATALALTFVSRYAGALLDEDVFQGKELVNSRSLQALVAGLKAYSTWENIRCLQDCRECTGGMGYMMENRISGLKCDTDVFATFEGDDVVMLQVVGRELLAQYTKQYEEKPLFGLLQNWAESVGDKLRTSFLAFNMDTVDDLAFLLKAVKFRERVLQRGLVARIYYKVKTKKEDFFHAWNSCLHHVASLSLAHTHRVTLEQFSLAVKSCPDQEDQTLLMKFCLLYGTKLVFQERAWYLEHKYLTPMASTRIRNQERC

SEQ ID NO: 25141 - protein, 51 aa, Artificial Sequence
  Synthetic polypeptide
VVAFEGRENKEFCQPKPCHRRSPLHGGHGHRSEVRNNLLAIWWCYQESRKP

SEQ ID NO: 25142 - protein, 561 aa, Artificial Sequence
  Synthetic polypeptide
QWLPLKAEKTKNFVSRSLVIGEVLSMADMATGVKCGIIYWLFGGAIRNLGSPEHVTKWFQPLQEQKYTGMFAMTERGHGSNARGIQTEATFDLSAQEFVIDTPCENAEKMYIGNAMYGNYAAVFAQLIIDGRSQGPHCFIVPVRDENGSLYPGVTAIDMMYKEGLHGVDNGILIFDKVRIPRENLLDKFGSVAPDGQYHSPIRNKSARFNAMLAALTPSRLAVAFQAMGAMKLGLTIAIRYSHSRRQFGPKTKEEVKIIEHQTQTLRLMPHLATALALTFVSRYAGALLDEDVFQGKELVNSRSLQALVAGLKAYSTWENIRCLQDCRECTGGMVVGRELLAQYTKQYEEKPLFGLLQNWAESVGDKLRTSFLAFNMDTVDDLAFLLKAVKFRERVLQRGLVARIYYKVKTKKEDFFHAWNSCLHHVASLSLAHTHRVTLEQFSLAVKSCPDQEDQTLLMKFCLLYGTKLVFQERAWYLEHKYLTPMASTRIRNQLLDLCDSVKDDARRVISTFNIPHTYLHAPIAGISNPRAAWAFYPAPLQPRPREEARSRRPKLGAKL

SEQ ID NO: 25143 - protein, 260 aa, Artificial Sequence
  Synthetic polypeptide
QWLPLKAEKTKNFVSRSLVIGEVLSMADMATGVKCGIIYWLFGGAIRNLGSPEHVTKWFQPLQEQKYTGMFAMTERGHGSNARGIQTEATFDLSAQEFVIDTPCENAEKMYIGNAMYGNYAAVFAQLIIDGRSQGPHCFIVPVRDENGSLYPGVTAIDMMYKEGLHGVDNGILIFDKVRIPRENLLDKFGSVAPDGQYHSPIRNKSARFNAMLAALTPSRLAVAFQAMGAMKLGLTIAIRYSHRSRIISQNCCSAPAGLY

SEQ ID NO: 25144 - protein, 51 aa, Artificial Sequence
  Synthetic polypeptide
QWLPLKAEKTKNFVSRSLVIGEVLSMADMATGVKCGIIYWLFGGAIRNLGS

SEQ ID NO: 25145 - protein, 50 aa, Artificial Sequence
  Synthetic polypeptide
VVAFEGRENKEFCQPKPCHRRSPLHGGHGHRSEVRNNLLAIWWCYQESRK

SEQ ID NO: 25146 - protein, 20 aa, Artificial Sequence
  Synthetic polypeptide
CPRLRAPDAGGSLGPKPRKR

SEQ ID NO: 25147 - protein, 19 aa, Artificial Sequence
  Synthetic polypeptide
ELLTPEAVWAQNQGRGEDH

SEQ ID NO: 25148 - protein, 56 aa, Artificial Sequence
  Synthetic polypeptide
PRNGKPNTACSHFQVRAKQGVCRGYIQSVMMDFGDSEGGGWEEENLYLLCSACCTH

SEQ ID NO: 25149 - protein, 27 aa, Artificial Sequence
  Synthetic polypeptide
WTLETQKEEGGKKRTFTYYVQHAAPTR

SEQ ID NO: 25150 - protein, 1766 aa, Artificial Sequence
  Synthetic polypeptide
ARSMQRLYTECYDGLWRLRRRRVGRREPLPTMFSMLHPLDEITPLVCKSGSLFGSSRVQYVVDHAMKIVFLNTDPSIVMTYDAVQNVHSVWTLRRVKSEEENVVLKFSEQGGTPQNVATSSSLTAHLRSLSKGDSPVTSPFQNYSSIHSQSRSTSSPSLHSRSPSISNMAALSRAHSPALGVHSFSGVQRFNISSHNQSPKRHSISHSPNSNSNGSFLAPETEPIVPELCIDHLWTETITNIREKNSQASKVFITSDLCGQKFLCFLVESQLQLRCVKFQESNDKTQLIFGSVTNIPAKDAAPVEKIDTMLVLEGSGNLVLYTGVVRVGKVFIPGLPAPSLTMSNTMPRPSTPLDGVSTPKPLSKLLGSLDEVVLLSPVPELRDSSKLHDSLYNEDCTFQQLGTYIHSIRDPVHNRVTLELSNGSMVRITIPEIATSELVQTCLQAIKFILPKEIAVQMLVKWYNVHSAPGGPSYHSEWNLFVTCLMNMMGYNTDRLAWTRNFDFEGSLSPVIAPKKARPSETGSDDDWEYLLNSDYHQNVESHLLNRSLCLSPSEASQMKDEDFSQNLSLDSSTLLFTHIPAIFFVLHLVYEELKLNTLMGEGICSLVELLVQLARDLKLGPYVDHYYRDYPTLVRTTGQVCTIDPGQTGFMHHPSFFTSEPPSIYQWVSSCLKGEGMPPYPYLPGICERSRLVVLSIALYILGDESLVSDESSQYLTRITIAPQKLQVEQEENRFSFRHSTSVSSLAERLVVWMTNVGFTLRDLETLPFGIALPIRDAIYHCREQPASDWPEAVCLLIGRQDLSKQACEGNLPKGKSVLSSDVPSGTETEEEDDGMNDMNHEVMSLIWSEDLRVQDVRRLLQSAHPVRVNVVQYPELSDHEFIEEKENRLLQLCQRTMALPVGRGMFTLFSYHPVPTEPLPIPKLNLTGRAPPRNTTVDLNSGNIDVPPNMTSWASFHNGVAAGLKIAPASQIDSAWIVYNKPKHAELANEYAGFLMALGLNGHLTKLATLNIHDYLTKGHEMTSIGLLLGVSAAKLGTMDMSITRLLSIHIPALLPPTSTELDVPHNVQVAAVVGIGLVYQGTAHRHTAEVLLAEIGRPPGPEMEYCTDRESYSLAAGLALGMVCLGHGSNLIGMSDLNVPEQLYQYMVGGHRRFQTGMHREKHKSPSYQIKEGDTINVDVTCPGATLALAMIYLKTNNRSIADWLRAPDTMYLLDFVKPEFLLLRTLARCLILWDDILPNSKWVDSNVPQIIRENSISLSEIELPCSEDLNLETLSQAHVYIIAGACLSLGFRFAGSENLSAFNCLHKFAKDFMTYLSAPNASVTGPHNLETCLSVVLLSLAMVMAGSGNLKVLQLCRFLHMKTGGEMNYGFHLAHHMALGLLFLGGGRYSLSTSNSSIAALLCALYPHFPAHSTDNRYHLQALRHLYVLAAEPRLLVPVDVDTNTPCYALLEVTYKGTQWYEQTKEELMAPTLLPELHLLKQIKVKGPRYWELLIDLSKGTQHLKSILSKDGVLYVKLRAGQLSYKEDPMGWQSLLAQTVANRNSEARAFKPETISAFTSDPALLSFAEYFCKPTVNMGQKQEILDLFSSVLYECVTQETPEMLPAYIAMDQAIRRLGRREMSETSELWQIKLVLEFFSSRSHQERLQNHPKRGLFMNSEFLPVVKCTIDNTLDQWLQVGGDMCVHAYLSGQPLEESQLSMLACFLVYHSVPAPQHLPPIGLEGSTSFAELLFKFKQLKMPVRALLRLAPLLLGNPQPMVM

SEQ ID NO: 25151 - protein, 24 aa, Artificial Sequence
  Synthetic polypeptide
ANTQPSRESADLRKRHSLIVWHKL

SEQ ID NO: 25152 - protein, 47 aa, Artificial Sequence
  Synthetic polypeptide
TLTHRQPEPIHSPPENLQTSGKDIPSSFGTNYEDPKAKKEHCEIFII

SEQ ID NO: 25153 - protein, 208 aa, Artificial Sequence
  Synthetic polypeptide
LTVSLSQYTALPRICRPQEKTFPHRLAQTMKTLRLRKNTVKFSLYRHFKNTLIFAVLASIVFMGWTTKTFRIAKCQSDWMERWVDDAFWSFLFSLILIVIMFLWRPSANNQRYAFMPLIDDSDDEIEEFMVTSENLTEGIKLRASKSVSNGTAKPATSENFDEDLKWVEENIPSSFTDVALPVLVDSDEEIMTRSEMAEKMFSSEKIM

SEQ ID NO: 25154 - protein, 29 aa, Artificial Sequence
  Synthetic polypeptide
GWARWLTPVISALWEAEAGGSRGLDGTLG

SEQ ID NO: 25155 - protein, 144 aa, Artificial Sequence
  Synthetic polypeptide
SQHSGRPRQADHEDWMERWVDDAFWSFLFSLILIVIMFLWRPSANNQRYAFMPLIDDSDDEIEEFMVTSENLTEGIKLRASKSVSNGTAKPATSENFDEDLKWVEENIPSSFTDVALPVLVDSDEEIMTRSEMAEKMFSSEKIM

SEQ ID NO: 25156 - protein, 43 aa, Artificial Sequence
  Synthetic polypeptide
MGAVAHACNLSTLGGRGRRITRIGWNAGLTMHFGASFFRLSLL

SEQ ID NO: 25157 - protein, 752 aa, Artificial Sequence
  Synthetic polypeptide
DAKEKLEGWLVSIKIAFDKKAQKTSVSMNTDNLMRIFTMGIDLTKPFEYLFATGNLRSKTGLGLLQDSGLCVVADKLNFIRYLSHFRCVHRGADFAKMRTTTVRRLLPESWGFLCPVHTPDGEPCGLMNHLTAVCEVVTQFVYTASIPALLCNLGVTPIDGAPHRSYSECYPVLLDGVMVGWVDKDLAPGIADSLRHFKVLREKRIPPWMEVVLIPMTGKPSLYPGLFLFTTPCRLVRPVQNLALGKEELIGTMEQIFMNVAIFEDEVFAGVTTHQELFPHSLLSVIANFIPFSDHNQSPRNMYQCQMGKQTMGFPLLTYQDRSDNKLYRLQTPQSPLVRPSMYDYYDMDNYPIGTNAIVAVISYTGYDMEDAMIVNKASWERGFAHGSVYKSEFIDLSEKIKQGDSSLVFGIKPGDPRVLQKLDDDGLPFIGAKLQYGDPYYSYLNLNTGESFVMYYKSKENCVVDNIKVCSNDTGSGKFKCVCITMRVPRNPTIGDKFASRHGQKGILSRLWPAEDMPFTESGMVPDILFNPHGFPSRMTIGMLIESMAGKSAALHGLCHDATPFIFSEENSALEYFGEMLKAAGYNFYGTERLYSGISGLELEADIFIGVVYYQRLRHMVSDKFQVRTTGARDRVTNQPIGGRNVQGGIRFGEMERDALLAHGTSFLLHDRLFNCSDRSVAHVCVKCGSLLSPLLEKPPPSWSAMRNRKYNCTLCSRSDTIDTVSVPYVFRYFVAELAAMNIKVKLDVV

SEQ ID NO: 25158 - protein, 14 aa, Artificial Sequence
  Synthetic polypeptide
SQHFEMPRKNWKVG

SEQ ID NO: 25159 - protein, 26 aa, Artificial Sequence
  Synthetic polypeptide
MGVVAHAYNPSTLRCQGKTGRLVSVY

SEQ ID NO: 25160 - protein, 18 aa, Artificial Sequence
  Synthetic polypeptide
CHLSHVELGGSTQILCYS

SEQ ID NO: 25161 - protein, 179 aa, Artificial Sequence
  Synthetic polypeptide
LCSSFIFHHDCDATSAMWNWEAAPKSYAIRDSRQMVWVLSGNSLIAAPLSRSIKPVTLHLIACRDTEFSDKEKGNMVYLGIKGKDLCLFCAEIQGKPTLQLKLQGSQDNIGKDTCWKLVGIHTCINLDVRESCFMGTLDQWGIGVGRKKWKSSFQHHHLRKKDKDFSSMRTNIGMPGRM

SEQ ID NO: 25162 - protein, 59 aa, Artificial Sequence
  Synthetic polypeptide
WFYKGAFPYTSSLPSCHVRCDFALPSSSIMIVMPPQPCGTGRQHPNPMLFVILDRWCGS

SEQ ID NO: 25163 - protein, 172 aa, Artificial Sequence
  Synthetic polypeptide
LCSSFIFHHDCDATSAMWNWEAAPKSYAIRDSRQMVWVLSGNSLIAAPLSRSIKPVTLHLIACRDTEFSDKEKGNMVYLGIKGKDLCLFCAEIQGKPTLQLKEKNIMDLYVEKKAQKPFLFFHNKEGSTSVFQSVSYPGWFIATSTTSGQPIFLTKERGITNNTNFYLDSVE

SEQ ID NO: 25164 - protein, 23 aa, Artificial Sequence
  Synthetic polypeptide
LSPSAMIVRPLQPCGTLFRGCSA

SEQ ID NO: 25165 - protein, 15 aa, Artificial Sequence
  Synthetic polypeptide
GLSSHVELYSEAALL

SEQ ID NO: 25166 - protein, 25 aa, Artificial Sequence
  Synthetic polypeptide
DMTFTFRHDCEASPAMWNFIQRLLC

SEQ ID NO: 25167 - protein, 19 aa, Artificial Sequence
  Synthetic polypeptide
PLELCWEDNTSELYFDRAT

SEQ ID NO: 25168 - protein, 345 aa, Artificial Sequence
  Synthetic polypeptide
NCAGKTTLLNYILTEQHSKRVAVILNEFGEGSALEKSLAVSQGGELYEEWLELRNGCLCCSVKDNGLRAIENLMQKKGKFDYILLETTGLADPGAVASMFWVDAELGSDIYLDGIITIVDSKYGLKHLAEEKPDGLINEATRQVALADAILINKTDLVPEEDVKKLRATIRSINGLGQILETQRSRVDLSNVLDLHAFDSLSGISLQKKLQHVPGTQPHLDQSIVTITFEVPGNAKEEHLNMFIQNLLWEKNVRNKDNHCMEVIRLKGLVSIKDKSQQVIVQGVHELYDLEETPVSWKDDTERTNRLVLLGRNLDKDILKQLFIATVTETEKQWTTHFKEDQVCT

SEQ ID NO: 25169 - protein, 56 aa, Artificial Sequence
  Synthetic polypeptide
SVSFCQVNTQCSSPQEDTAFEVPSWKQRPDLTRHKLPGTLILDFIASRTVLGRQHF

SEQ ID NO: 25170 - protein, 326 aa, Artificial Sequence
  Synthetic polypeptide
NCAGKTTLLNYILTEQHSKRVAVILNEFGEGSALEKSLAVSQGGELYEEWLELRNGCLCCSVKDNGLRAIENLMQKKGKFDYILLETTGLADPGAVASMFWVDAELGSDIYLDGIITIVDSKYGLKHLAEEKPDGLINEATRQVALADAILINKTDLVPEEDVKKLRATIRSINGLGQILETQRSSLQKKLQHVPGTQPHLDQSIVTITFEVPGNAKEEHLNMFIQNLLWEKNVRNKDNHCMEVIRLKGLVSIKDKSQQVIVQGVHELYDLEETPVSWKDDTERTNRLVLLGRNLDKDILKQLFIATVTETEKQWTTHFKEDQVCT

SEQ ID NO: 25171 - protein, 132 aa, Artificial Sequence
  Synthetic polypeptide
NCAGKTTLLNYILTEQHSKRVAVILNEFGEGSALEKSLAVSQGGELYEEWLELRNGCLCCSVKDNGLRAIENLMQKKGKFDYILLETTGLADPGAVASMFWVDAELGSDIYLDGIITIVDSKYGLKAKNWTT

SEQ ID NO: 25172 - protein, 274 aa, Artificial Sequence
  Synthetic polypeptide
VWFLANLSYQEALSDTQVAIVNILSSTSGLFTLILAAVFPSNSGDRFTLSKLLAVILSIGGVVLVNLAGSEKPAGRDTVGSIWSLAGAMLYAVYIVMIKRKVDREDKLDIPMFFGFVGLFNLLLLWPGFFLLHYTGFEDFEFPNKVVLMCIIINGLIGTVLSEFLWLWGCFLTSSLIGTLALSLTIPLSIIADMCMQKVQFSWLFFAGAIPVFFSFFIVTLLCHYNNWDPVMVGIRRIFAFICRKHRIQRVPEDSEQCESLISMHSVSQEDGAS

SEQ ID NO: 25173 - protein, 31 aa, Artificial Sequence
  Synthetic polypeptide
RPFCDDSFPLNESGFWQICHIKKHFQTHKLL

SEQ ID NO: 25174 - protein, 76 aa, Artificial Sequence
  Synthetic polypeptide
TTWVCIAQVCLHTDFHLSLPHLKQQDQSLLFPSLLTQHEDDEDEDLSVMIHFHLMSLVFGKFVISRSTFRHTSCYS

SEQ ID NO: 25175 - protein, 31 aa, Artificial Sequence
  Synthetic polypeptide
CVSLSFVSHFSKLIELKEGVWETHLQAGIQN

SEQ ID NO: 25176 - protein, 36 aa, Artificial Sequence
  Synthetic polypeptide
LNSRREYGKLIFKQVYKTRICWKYRTTVYHPFLYCY

SEQ ID NO: 25177 - protein, 416 aa, Artificial Sequence
  Synthetic polypeptide
TQGGSMGNSSSSRYTKLGYAGNTEPQFIIPSCIAIKESAKVGDQAQRRVMKGVDDLDFFIGDEAIEKPTYATKWPIRHGIVEDWDLMERFMEQVIFKYLRAEPEDHYFLLTEPPLNTPENREYTAEIMFESFNVPGLYIAVQAVLALAASWTSRQVGERTLTGTVIDSGDGVTHVIPVAEGYVIGSCIKHIPIAGRDITYFIQQLLRDREVGIPPEQSLETAKAVKERYSYVCPDLVKEFNKYDTDGSKWIKQYTGINAISKKEFSIDVGYERFLGPEIFFHPEFANPDFTQPISEVVDEVIQNCPIDVRRPLYKNIVLSGGSTMFRDFGRRLQRDLKRTVDARLKLSEELSGGRLKPKPIDVQVITHHMQRYAVWFGGSMLASTPEFYQVCHTKKDYEEIGPSICRHNPVFGVMS

SEQ ID NO: 25178 - protein, 34 aa, Artificial Sequence
  Synthetic polypeptide
LNSRREYGKLIFKQVYKTRICWKYRTTVYHPFLL

SEQ ID NO: 25179 - protein, 32 aa, Artificial Sequence
  Synthetic polypeptide
TQGGSMGNSSSSRYTKLGYAGNTEPQFIIPSY

SEQ ID NO: 25180 - protein, 39 aa, Artificial Sequence
  Synthetic polypeptide
LNSRREYGKLIFKQVYKTRICWKYRTTVYHPFLGQSAMV

SEQ ID NO: 25181 - protein, 39 aa, Artificial Sequence
  Synthetic polypeptide
TQGGSMGNSSSSRYTKLGYAGNTEPQFIIPSLANPPWYS

SEQ ID NO: 25182 - protein, 7 aa, Artificial Sequence
  Synthetic polypeptide
KPVQKLR

SEQ ID NO: 25183 - protein, 69 aa, Artificial Sequence
  Synthetic polypeptide
MDLKGIILSDKSQSKSLDELTNSSETRLSLEDLFRKDFVLHDPEARWINDTDVVYKSENGHVIKLNIET

SEQ ID NO: 25184 - protein, 755 aa, Artificial Sequence
  Synthetic polypeptide
MDLKGIILSDKSQSKSLDELTNSSETRLSLEDLFRKDFVLHDPEARWINDTDVVYKSENGHVIKLNIETNATTLLLENTTFVTFKASRHSVSPDLKYVLLAYDVKQIFHYSYTASYVIYNIHTREVWELNPPEVEDSVLQYAAWGVQGQQLIYIFENNIYYQPDIKSSSLRLTSSGKEEIIFNGIADWLYEEELLHSHIAHWWSPDGERLAFLMINDSLVPTMVIPRFTGALYPKGKQYPYPKAGQVNPTIKLYVVNLYGPTHTLELMPPDSFKSREYYITMVKWVSNTKTVVRWLNRAQNISILTVCETTTGACSKKYEMTSDTWLSQQNEEPVFSRDGSKFFMTVPVKQGGRGEFHHVAMFLIQSKSEQITVRHLTSGNWEVIKILAYDETTQKIYFLSTESSPRGRQLYSASTEGLLNRQCISCNFMKEQCTYFDASFSPMNQHFLLFCEGPRVPVVSLHSTDNPAKYFILESNSMLKEAILKKKIGKPEIKILHIDDYELPLQLSLPKDFMDRNQYALLLIMDEEPGGQLVTDKFHIDWDSVLIDMDNVIVARFDGRGSGFQGLKILQEIHRRLGSVEVKDQITAVKFLLKLPYIDSKRLSIFGKGYGGYIASMILKSDEKLFKCGSVVAPITDLKLYASAFSERYLGMPSKEESTYQAASVLHNVHGLKEENILIIHGTADTKVHFQHSAELIKHLIKAGVNYTMQVYPDEGHNVSEKSKYHLYSTILKFFSDCLKEEISVLPQEPEEDE

SEQ ID NO: 25185 - protein, 221 aa, Artificial Sequence
  Synthetic polypeptide
MDLKGIILSDKSQSKSLDELTNSSETRLSLEDLFRKDFVLHDPEARWINDTDVVYKSENGHVIKLNIETNATTLLLENTTFVTFKASRHSVSPDLKYVLLAYDVKQIFHYSYTASYVIYNIHTREVWELNPPEVEDSVLQYAAWGVQGQQLIYIFENNIYYQPDIKSSSLRLTSSGKEEIIFNGIADWLYEEELLHSHIAHWWSPDGERLAFLMINDSLVP

SEQ ID NO: 25186 - protein, 65 aa, Artificial Sequence
  Synthetic polypeptide
MDLKGIILSDKSQSKSLDELTNSSETRLSLEDLFRKDFVLHDPEARWINDTDVVYKSENGHVIKL

SEQ ID NO: 25187 - protein, 106 aa, Artificial Sequence
  Synthetic polypeptide
MDLKGIILSDKSQSKSLDELTNSSETRLSLEDLFRKDFVLHDPEARWINDTDVVYKSENGHVIKLNIETNATTLLLENTTFVTFKASRHSVSPDLKYVLLAYDVKQ

SEQ ID NO: 25188 - protein, 597 aa, Artificial Sequence
  Synthetic polypeptide
CMAMSQAFTFAHRLLTDSPGTTASPASPVQDLREESDWHYLQLSDPWPDLELFKKLPFDYIIHDPKYEDASLICSHYQGIKSEDRGMSRKPEDLYVRRQTARMRLSKYAAYNTYHHCEQCHQYMGFHPRYQLYESTLHAFAFSYSMLGEEIQLHFIIPKSKEHHFVFSQPGGQLESMRLPLVTDKSHEYIKSPTFTPTTGRHEHGLFNLYHAMDGASHLHVLVVKEYEMAIYKKYWPNHIMLVLPSIFNSAGVGAAHFLIKELSYHNLELERNRQEELGIKPQDIWPFIVISDDSCVMWNVVDVNSAGERSREFSWSERNVSLKHIMQHIEAAPDIMHYALLGLRKWSSKTRASEVQEPFSRCHVHNFIILNVDLTQNVQYNQNRFLCDDVDFNLRVHSAGLLLCRFNRFSVMKKQIVVGGHRSFHITSKVSDNSAAVVPAQYICAPDSKHTFLAAPAQLLLEKFLQHHSHLFFPLSLKNHDHPVLSVDCYLNLGSQISVCYVSSRPHSLNISCSDLLFSGLLLYLCDSFVGASFLKKFHFLKGATLCVICQDRSSLRQTVVRLELEDEWQFRLRDEFQTANAREDRPLFFLTGRHI

SEQ ID NO: 25189 - protein, 85 aa, Artificial Sequence
  Synthetic polypeptide
IECILRGECQVSSSAWPCPRPSHLLTAYSLTHPEQLPVLQAPCKTSEKNLTGIISSLATPGQTWSCSRSCPLTTSFTTRSMKMPA

SEQ ID NO: 25190 - protein, 19 aa, Artificial Sequence
  Synthetic polypeptide
LTRNNCQSCKPRARPQRRI

SEQ ID NO: 25191 - protein, 960 aa, Artificial Sequence
  Synthetic polypeptide
DVLASPSPSAVIIPIMRDPGWIRNVWSSNINVQTMNYVGQLAGQVFVTVKELYKGLNPATLSGCIDIIVIRQPNGNLQCSPFHVRFGKMGVLRSREKVVDIEINGESVDLHMKLGDNGEAFFVQETDNDQEVIPMHLATSPILSEGASRMECQLKRGSVDRMRGLDPSTPAQVIAPSETPSSSSVVKKRRKRRRKSQLDSLKRDDNMNTSEDEDMFPIEMSSDEAMELLESSRTLPNDIPPFQDDIPEENLSLAVIYPQSASYPNSDREWSPTPSSLVDCKRTAPHLAVAAEGGLSSSCPPQSSLFHPSESPSGSRPSTPKSDSELVSKSTERTGQKNPEMLWLWGELPQAAKSSSPHKMKESSPLSSRKICDKSHFQAIHSESSDTFSDQSPTLVGGALLDQNKPQTEMQFVNEEDLETLGAAAPLLPMIEELKPPSASVVQTANKTDSPSRKRDKRSRHLGADGVYLDDLTDMDPEVAALYFPKNGDPSGLAKHASDNGARSANQSPQSVGSSGVDSGVESTSDGLRDLPSIAISLCGGLSDHREITKDAFLEQAVSYQQFVDNPAIIDDPNLVVKIGSKYYNWTTAAPLLLAMQAFQKPLPKATVESIMRDKMPKKGGRWWFSWRGRNTTIKEESKPEQCLAGKAHSTGEQPPQLSLATRVKHESSSSDEERAAAKPSNAGHLPLLPNVSYKKTLRLTSEQLKSLKLKNGPNDVVFSVTTQYQGTCRCEGTIYLWNWDDKVIISDIDGTITRSDTLGHILPTLGKDWTHQGIAKLYHKVSQNGYKFLYCSARAIGMADMTRGYLHWVNERGTVLPQGPLLLSPSSLFSALHREVIEKKPEKFKVQCLTDIKNLFFPNTEPFYAAFGNRPADVYSYKQVGVSLNRIFTVNPKGELVQEHAKTNISSYVRLCEVVDHVFPLLKRSHSSDFPCSDTFSNFTFWREPLPPFENQDIHSASA

SEQ ID NO: 25192 - protein, 33 aa, Artificial Sequence
  Synthetic polypeptide
KYVAPPSIVFLFLLLRPYRTCWLPLRLLPSLFQ

SEQ ID NO: 25193 - protein, 45 aa, Artificial Sequence
  Synthetic polypeptide
HLLLLSSSSSCSGHIGRAGFPFAFCRHYSNNERPWVDSKCMVFKH

SEQ ID NO: 25194 - protein, 490 aa, Artificial Sequence
  Synthetic polypeptide
GLAQWLTPVIPAHWKAETGGSRGQEFKTSLANMEVYKPRRKYKRHQGAEELLDEESRIHATLLEYGRYGFSRQSKMEKAEDKKTALPAGLSATEKADAHEEDELRAAEEQRIQSLMTKMTAMANEESRLTASSVGQIVGLCSAEIKQIVSEYAEKQSELSAEESPEKLGTSQLHRRKVISLNKQIAQKTKHLEELRASHTSLQARYNEAKKTLTELKTYSEKLDKEQAALEKIESKADPSILQNLRALVAMNENLKSQEQEFKAHCREEMTRLQQEIENLKAERAPRGDEKTLSSGEPPGTLTSAMTHDEDLDRRYNMEKEKLYKIRLLQARRNREIAILHRKIDEVPSRAELIQYQKRFIELYRQISAVHKETKQFFTLYNTLDDKKVYLEKEISLLNSIHENFSQAMASPAARDQFLRQMEQIVEGIKQSRMKMEKKKQENKMRRDQLNDQYLELLEKQRLYFKTVKEFKEEGRKNEMLLSKVKAKAS

SEQ ID NO: 25195 - protein, 105 aa, Artificial Sequence
  Synthetic polypeptide
SQHTGRLRRVDHEVRSSRPAWPTWKCTSPVGNTNATREQRSYLMKNLESMLHFWNMADMDLAARAKWRRLRTRKRHFQQGCQLQKKLMPTRKMSFEQLKSSVFSR

SEQ ID NO: 25196 - protein, 35 aa, Artificial Sequence
  Synthetic polypeptide
DGWITRSGVQDQPGQHGSVQAPSEIQTPPGSRGAT

SEQ ID NO: 25197 - protein, 491 aa, Artificial Sequence
  Synthetic polypeptide
GLAQWLTPVIPAHWKAETGGSRGQEFKTSLANMEVYKPRRKYKRHQGAEELLDEESRIHATLLEYGRRYGFSRQSKMEKAEDKKTALPAGLSATEKADAHEEDELRAAEEQRIQSLMTKMTAMANEESRLTASSVGQIVGLCSAEIKQIVSEYAEKQSELSAEESPEKLGTSQLHRRKVISLNKQIAQKTKHLEELRASHTSLQARYNEAKKTLTELKTYSEKLDKEQAALEKIESKADPSILQNLRALVAMNENLKSQEQEFKAHCREEMTRLQQEIENLKAERAPRGDEKTLSSGEPPGTLTSAMTHDEDLDRRYNMEKEKLYKIRLLQARRNREIAILHRKIDEVPSRAELIQYQKRFIELYRQISAVHKETKQFFTLYNTLDDKKVYLEKEISLLNSIHENFSQAMASPAARDQFLRQMEQIVEGIKQSRMKMEKKKQENKMRRDQLNDQYLELLEKQRLYFKTVKEFKEEGRKNEMLLSKVKAKAS

SEQ ID NO: 25198 - protein, 106 aa, Artificial Sequence
  Synthetic polypeptide
SQHTGRLRRVDHEVRSSRPAWPTWKCTSPVGNTNATREQRSYLMKNLESMLHFWNMAGDMDLAARAKWRRLRTRKRHFQQGCQLQKKLMPTRKMSFEQLKSSVFSR

SEQ ID NO: 25199 - protein, 41 aa, Artificial Sequence
  Synthetic polypeptide
GLAQWLTPVIPAHWKAETGGSRGSVQAPSEIQTPPGSRGAT

SEQ ID NO: 25200 - protein, 470 aa, Artificial Sequence
  Synthetic polypeptide
SQHTGRLRRVDHEEVYKPRRKYKRHQGAEELLDEESRIHATLLEYGRYGFSRQSKMEKAEDKKTALPAGLSATEKADAHEEDELRAAEEQRIQSLMTKMTAMANEESRLTASSVGQIVGLCSAEIKQIVSEYAEKQSELSAEESPEKLGTSQLHRRKVISLNKQIAQKTKHLEELRASHTSLQARYNEAKKTLTELKTYSEKLDKEQAALEKIESKADPSILQNLRALVAMNENLKSQEQEFKAHCREEMTRLQQEIENLKAERAPRGDEKTLSSGEPPGTLTSAMTHDEDLDRRYNMEKEKLYKIRLLQARRNREIAILHRKIDEVPSRAELIQYQKRFIELYRQISAVHKETKQFFTLYNTLDDKKVYLEKEISLLNSIHENFSQAMASPAARDQFLRQMEQIVEGIKQSRMKMEKKKQENKMRRDQLNDQYLELLEKQRLYFKTVKEFKEEGRKNEMLLSKVKAKAS

SEQ ID NO: 25201 - protein, 87 aa, Artificial Sequence
  Synthetic polypeptide
DGWITRKCTSPVGNTNATREQRSYLMKNLESMLHFWNMADMDLAARAKWRRLRTRKRHFQQGCQLQKKLMPTRKMSFEQLKSSVFSR

SEQ ID NO: 25202 - protein, 471 aa, Artificial Sequence
  Synthetic polypeptide
SQHTGRLRRVDHEEVYKPRRKYKRHQGAEELLDEESRIHATLLEYGRRYGFSRQSKMEKAEDKKTALPAGLSATEKADAHEEDELRAAEEQRIQSLMTKMTAMANEESRLTASSVGQIVGLCSAEIKQIVSEYAEKQSELSAEESPEKLGTSQLHRRKVISLNKQIAQKTKHLEELRASHTSLQARYNEAKKTLTELKTYSEKLDKEQAALEKIESKADPSILQNLRALVAMNENLKSQEQEFKAHCREEMTRLQQEIENLKAERAPRGDEKTLSSGEPPGTLTSAMTHDEDLDRRYNMEKEKLYKIRLLQARRNREIAILHRKIDEVPSRAELIQYQKRFIELYRQISAVHKETKQFFTLYNTLDDKKVYLEKEISLLNSIHENFSQAMASPAARDQFLRQMEQIVEGIKQSRMKMEKKKQENKMRRDQLNDQYLELLEKQRLYFKTVKEFKEEGRKNEMLLSKVKAKAS

SEQ ID NO: 25203 - protein, 88 aa, Artificial Sequence
  Synthetic polypeptide
DGWITRKCTSPVGNTNATREQRSYLMKNLESMLHFWNMAGDMDLAARAKWRRLRTRKRHFQQGCQLQKKLMPTRKMSFEQLKSSVFSR

SEQ ID NO: 25204 - protein, 86 aa, Artificial Sequence
  Synthetic polypeptide
YALALCPHPNVTLNCNPHNPQVSRVGPVGGNCIMGPFPPCRCSRDREFSRDLMVLQTSGISPACTHSVLLPCEEGTCFSFAFSHDW

SEQ ID NO: 25205 - protein, 36 aa, Artificial Sequence
  Synthetic polypeptide
WFYKHLAFLRLALTPSCCPVKKAPAFPLPSAMIGKA

SEQ ID NO: 25206 - protein, 98 aa, Artificial Sequence
  Synthetic polypeptide
YALALCPHPNVTLNCNPHNPQVSRVGPVGGNCIMGPFPPCRCSRDREFSRDLMVLQTSGISPACTHSVLLPCEEGTCFSFAFSHDCKFPEASPAMWNW

SEQ ID NO: 25207 - protein, 48 aa, Artificial Sequence
  Synthetic polypeptide
WFYKHLAFLRLALTPSCCPVKKAPAFPLPSAMIVSFLRPPQPCGTGKA

SEQ ID NO: 25208 - protein, 305 aa, Artificial Sequence
  Synthetic polypeptide
GLPSHVELVKHESSSSDEERAAAKPSNAGHLPLLPNVSYKKTLRLTSEQLKSLKLKNGPNDVVFSVTTQYQGTCRCEGTIYLWNWDDKVIISDIDGTITRSDTLGHILPTLGKDWTHQGIAKLYHKVSQNGYKFLYCSARAIGMADMTRGYLHWVNERGTVLPQGPLLLSPSSLFSALHREVIEKKPEKFKVQCLTDIKNLFFPNTEPFYAAFGNRPADVYSYKQVGVSLNRIFTVNPKGELVQEHAKTNISSYVRLCEVVDHVFPLLKRSHSSDFPCSDTFSNFTFWREPLPPFENQDIHSASA

SEQ ID NO: 25209 - protein, 82 aa, Artificial Sequence
  Synthetic polypeptide
GLPSHVELVKHESSSSDEERAAAKPSNAGHLPLLPNVSYKKTLRLTSEQLKSLKLKNGPNDVVFSVTTQYQGTCRCEGTIYL

SEQ ID NO: 25210 - protein, 70 aa, Artificial Sequence
  Synthetic polypeptide
KETVMSWTFTFTHSSLMASPRTTSSPEGSIHGGMRSRCSPWTESALGSSGFTQPRMAPTGCGRSQPTSGS

SEQ ID NO: 25211 - protein, 91 aa, Artificial Sequence
  Synthetic polypeptide
CPGPSHSLTPHSWLHPEQLPVLKALFMVECVRGARPGRSQLWDPPVLHSPGWHRLAAGGLSQHQGADTSEHEDGEQMLLSFRPGCAYGVGK

SEQ ID NO: 25212 - protein, 304 aa, Artificial Sequence
  Synthetic polypeptide
RLYSWWNAFEVLALDGVSSGILRFYTAQDGTDWLRAVSANIRELTLQNMKMANKCCSPSDQVVHMGWVNEKLQGADSSQTFRPKFLALKGPSFYVFSTPPVSTFDWVRAERTYHLCEVLFKVHKFWLTEDCWLQANLYLGLQDFDFEDQRPYCFSIVAGHGKSHVFNVELGSELAMWEKSFQRATFMEVQRTGSRTYMCSWQGEMLCFTVDFALGFTCFESKTKNVLWRFKFSQLKGSSDDGKTRVKLLFQNLDTKQIETKELEFQDLRAVLHCIHSFIAAKVASVDPGFMDSQSLARKYMYSS

SEQ ID NO: 25213 - protein, 652 aa, Artificial Sequence
  Synthetic polypeptide
DQRGRRVISAFPTEHWLDGTKSIKKQVKIGSPYCLHLRVKFYSSEPNNLREELTRYLFVLQLKQDILSGKLDCPFDTAVQLAAYNLQAELGDYDLAEHSPELVSEFRFVPIQTEEMELAIFEKWKEYRGQTPAQAETNYLNKAKWLEMYGVDMHVVKARDGNDYSLGLTPTGVLVFEGDTKIGLFFWPKITRLDFKKNKLTLVVVEDDDQGKEQEHTFVFRLDHPKACKHLWKCAVEHHAFFRLRGPVQKSSHRSGFIRLGSRFRYSGKTEYQTTKTNKARRSTSFERRPSKRYSRRTLQMKACATKPEELSVHNNVSTQSNGSQQAWGMRSALPVSPSISSAPVPVEIENLPQSPGTDQHDRKCIPLNIDLLNSPDLLEATIGDVIGASDTMETSQALNDVNVATRLPGLGEPEVEYETLKDTSEKLKQLEMENSPLLSPRSNIDVNINSQEEVVKLTEKCLNNVIESPGLNVMRVPPDFKSNILKAQVEAVHKVTKEDSLLSHKNANVQDAATNSAVLNENNVPLPKESLETLMLITPADSGSVLKEATDELDALLASLTENLIDHTVAPQVSSTSMITPRWIVPQSGAMSNGLAGCEMLLTGKEGHGNKDGISLISPPAPFLVDAVTSSGPILAEEAVLKQKCLLTTEL

SEQ ID NO: 25214 - protein, 19 aa, Artificial Sequence
  Synthetic polypeptide
FLHFQLSIGWMVQKASKSK

SEQ ID NO: 25215 - protein, 606 aa, Artificial Sequence
  Synthetic polypeptide
DQRGRRVISAFPTEHWLDGTKSIKKQVKIGSPYCLHLRVKFYSSEPNNLREELTRYLFVLQLKQDILSGKLDCPFDTAVQLAAYNLQAELGDYDLAEHSPELVSEFRFVPIQTEEMELAIFEKWKEYRGQTPAQAETNYLNKAKWLEMYGVDMHVVKARDGNDYSLGLTPTGVLVFEGDTKIGLFFWPKITRLDFKKNKLTLVVVEDDDQGKEQEHTFVFRLDHPKACKHLWKCAVEHHAFFRLRGPVQKSSHRSGFIRLGSRFRYSGKTEYQTTKTNKARRSTSFERRPSKRYSRRTLQMKACATKPEELSVHNNVSTQSNGSQQAWGMRSALPVSPSISSAPVPVEIENLPQSPGTDQHDRKCIPLNIDLLNSPDLLEATIGDVIGASDTMETSQALNDVNVATRLPGLGEPEVEYETLKDTSEKLKQLEMENSPLLSPRSNIDVNINSQEEVVKLTEKCLNNVIESPGLNVMRVPPDFKSNILKAQVEAVHKVTKEDSLLSHKNANVQDAATNSAVLNENNVPLPKESLETLMLITPADSGSVLKEATDELDALLASLTENLIDHTVAPQVSSTSMITPRWIVPLWSHFGRRSCPEAEVFTDH

SEQ ID NO: 25216 - protein, 424 aa, Artificial Sequence
  Synthetic polypeptide
DQRGRRVISAFPTEHWLDGTKSIKKQVKIGSPYCLHLRVKFYSSEPNNLREELTRYLFVLQLKQDILSGKLDCPFDTAVQLAAYNLQAELGDYDLAEHSPELVSEFRFVPIQTEEMELAIFEKWKEYRGQTPAQAETNYLNKAKWLEMYGVDMHVVKARDGNDYSLGLTPTGVLVFEGDTKIGLFFWPKITRLDFKKNKLTLVVVEDDDQGKEQEHTFVFRLDHPKACKHLWKCAVEHHAFFRLRGPVQKSSHRSGFIRLGSRFRYSGKTEYQTTKTNKARRSTSFERRPSKRYSRRTLQMKACATKPEELSVHNNVSTQSNGSQQAWGMRSALPVSPSISSAPVPVEIENLPQSPGTDQHDRKWLSAASDCCQRGGNQWNTRALPPPQTAHRNYTDFVHEHNVKNAGIRHDVHFPGHTAMTEI

SEQ ID NO: 25217 - protein, 651 aa, Artificial Sequence
  Synthetic polypeptide
DQRGRRVISAFPTEHWLDGTKSIKKQVKIGSPYCLHLRVKFYSSEPNNLREELTRYLFVLQLKQDILSGKLDCPFDTAVQLAAYNLQAELGDYDLAEHSPELVSEFRFVPIQTEEMELAIFEKWKEYRGQTPAQAETNYLNKAKWLEMYGVDMHVVKARDGNDYSLGLTPTGVLVFEGDTKIGLFFWPKITRLDFKKNKLTLVVVEDDDQGKEQEHTFVFRLDHPKACKHLWKCAVEHHAFFRLRGPVQKSSHRSGFIRLGSRFRYSGKTEYQTTKTNKARRSTSFERRPSKRYSRRTLQMKACATKPEELSVHNNVSTQSNGSQQAWGMRSALPVSPSISSAPVPVEIENLPQSPGTDQHDRKCIPLNIDLLNSPDLLEATIGDVIGASDTMETSQALNDVNVATRLPGLGEPEVEYETLKDTSEKLKQLEMENSPLLSPRSNIDVNINSQEEVVKLTEKCLNNVIESPGLNVMRVPPDFKSNILKAQVEAVHKVTKEDSLLSHKNANVQDAATNSAVLNENNVPLPKESLETLMLITPADSGSVLKEATDELDALLASLTENLIDHTVAPQVSSTSMITPRWIVPSGAMSNGLAGCEMLLTGKEGHGNKDGISLISPPAPFLVDAVTSSGPILAEEAVLKQKCLLTTEL

SEQ ID NO: 25218 - protein, 172 aa, Artificial Sequence
  Synthetic polypeptide
SGSFCHDSLQWVICVSQPQKTSEMAANKSKGQSSLALHKVIMVGSGGVGKSALTLQFMYDEFVEDYEPTKADSYRKKVVLDGEEVQIDILDTAGQEDYAAIRDNYFRSGEGFLLVFSITEHESFTATAEFREQILRVKAEEDKIPLLVVGNKSDLEERRQVPVEEARSKAEE

SEQ ID NO: 25219 - protein, 62 aa, Artificial Sequence
  Synthetic polypeptide
SDGFTSVWHFPCWHSFSLLLPCEVVPSAMILFSGSSVCHSLRRPARWLPTRVRARAPWPSTR

SEQ ID NO: 25220 - protein, 229 aa, Artificial Sequence
  Synthetic polypeptide
SGSFCHDSLQWVICVSQPQKTSEMAANKSKGQSSLALHKVIMVGSGGVGKSALTLQFMYDEFVEDYEPTKADSYRKKVVLDGEEVQIDILDTAGQEDYAAIRDNYFRSGEGFLLVFSITEHESFTATAEFREQILRVKAEEDKIPLLVVGNKSDLEERRQVPVEEARSKAEEWGVQYVETSAKTRANVDKVFFDLMREIRTKKMSENKDKNGKKSSKNKKSFKERCCLL

SEQ ID NO: 25221 - protein, 29 aa, Artificial Sequence
  Synthetic polypeptide
GLPSPAELSSVGHLCVTASEDQRDGCQQE

SEQ ID NO: 25222 - protein, 184 aa, Artificial Sequence
  Synthetic polypeptide
SGSFCHDCKFPEASPALRNSLQWVICVSQPQKTSEMAANKSKGQSSLALHKVIMVGSGGVGKSALTLQFMYDEFVEDYEPTKADSYRKKVVLDGEEVQIDILDTAGQEDYAAIRDNYFRSGEGFLLVFSITEHESFTATAEFREQILRVKAEEDKIPLLVVGNKSDLEERRQVPVEEARSKAEE

SEQ ID NO: 25223 - protein, 74 aa, Artificial Sequence
  Synthetic polypeptide
SDGFTSVWHFPCWHSFSLLLPCEVVPSAMIVSFLRPPQPCGTLFSGSSVCHSLRRPARWLPTRVRARAPWPSTR

SEQ ID NO: 25224 - protein, 241 aa, Artificial Sequence
  Synthetic polypeptide
SGSFCHDCKFPEASPALRNSLQWVICVSQPQKTSEMAANKSKGQSSLALHKVIMVGSGGVGKSALTLQFMYDEFVEDYEPTKADSYRKKVVLDGEEVQIDILDTAGQEDYAAIRDNYFRSGEGFLLVFSITEHESFTATAEFREQILRVKAEEDKIPLLVVGNKSDLEERRQVPVEEARSKAEEWGVQYVETSAKTRANVDKVFFDLMREIRTKKMSENKDKNGKKSSKNKKSFKERCCLL

SEQ ID NO: 25225 - protein, 9 aa, Artificial Sequence
  Synthetic polypeptide
GLPSPAELL

SEQ ID NO: 25226 - protein, 24 aa, Artificial Sequence
  Synthetic polypeptide
SGSFCHDCKFPEASPALRNFCRRL

SEQ ID NO: 25227 - protein, 153 aa, Artificial Sequence
  Synthetic polypeptide
SDGFTSVWHFPCWHSFSLLLPCEVVPSAMIVSFLRPPQPCGTFVEDYEPTKADSYRKKVVLDGEEVQIDILDTAGQEDYAAIRDNYFRSGEGFLLVFSITEHESFTATAEFREQILRVKAEEDKIPLLVVGNKSDLEERRQVPVEEARSKAEE

SEQ ID NO: 25228 - protein, 210 aa, Artificial Sequence
  Synthetic polypeptide
SDGFTSVWHFPCWHSFSLLLPCEVVPSAMIVSFLRPPQPCGTFVEDYEPTKADSYRKKVVLDGEEVQIDILDTAGQEDYAAIRDNYFRSGEGFLLVFSITEHESFTATAEFREQILRVKAEEDKIPLLVVGNKSDLEERRQVPVEEARSKAEEWGVQYVETSAKTRANVDKVFFDLMREIRTKKMSENKDKNGKKSSKNKKSFKERCCLL

SEQ ID NO: 25229 - protein, 171 aa, Artificial Sequence
  Synthetic polypeptide
SDGFTSVWHFPCWHSFSLLLPCEVVPSAMIVSFLRPPQPCGTFVEDYEPTKADSYRKKVVLDGEEVQIDILDTAGQEDYAAIRDNYFRSGEGFLLVFSITEHESFTATAEFREQILRVKAEEDKIPLLVVGNKSDLEERRQVPVEEARSKAEEWGVQYVETSAKTRANVDK

SEQ ID NO: 25230 - protein, 116 aa, Artificial Sequence
  Synthetic polypeptide
SDGFTSVWHFPCWHSFSLLLPCEVVPSAMIVSFLRPPQPCGTFVEDYEPTKADSYRKKVVLDGEEVQIDILDTAGQEDYAAIRDNYFRSGEGFLLVFSITEHESFTATAEFREQIL

SEQ ID NO: 25231 - protein, 63 aa, Artificial Sequence
  Synthetic polypeptide
NEGKKGPYLIGIVMWIKPVHIFQDLAHGECWCRSISCHHSMRPYRLTCDTRKEGTITSLILST

SEQ ID NO: 25232 - protein, 32 aa, Artificial Sequence
  Synthetic polypeptide
CGSNQFTFFRTWPMVNAGAAASLATIPCAPTD

SEQ ID NO: 25233 - protein, 35 aa, Artificial Sequence
  Synthetic polypeptide
MLVPQHLLPPFHAPLPIDMRHQEGRYHYEPHSVHG

SEQ ID NO: 25234 - protein, 81 aa, Artificial Sequence
  Synthetic polypeptide
NEGKKGPYLIGIVMWIKPVHIFQDLAHGECWCRSISCHHSMRPYRLTCDTRKEGTITSLILSTVCTGPLPSAAALSSLTSP

SEQ ID NO: 25235 - protein, 1539 aa, Artificial Sequence
  Synthetic polypeptide
MLVPQHLLPPFHAPLPIDMRHQEGRYHYEPHSVHGVHGPPALSGSPVISDISLIRLSPHPAGPGESPFNAPHPYVNPHMEHYLRSVHSSPTLSMISAARGLSPADVAQEHLKERGLFGLPAPGTTPSDYYHQMTLVAGHPAPYGDLLMQSGGAASAPHLHDYLNPVDVSRFSSPRVTPRLSRKRALSISPLSDASLDLQRMIRTSPNSLVAYINNSRSSSAASGSYGHLSAGALSPAFTFPHPINPVAYQQILSQQRGLGSAFGHTPPLIQPSPTFLAQQPMALTSINATPTQLSSSSNCLSDTNQNKQSSESAVSSTVNPVAIHKRSKVKTEPEGLRPASPLALTQGQVSGHGSCGCALPLSQEQLADLKEDLDRDDCKQEAEVVIYETNCHWEDCTKEYDTQEQLVHHINNEHIHGEKKEFVCRWQACTREQKPFKAQYMLVVHMRRHTGEKPHKCTFEGCSKAYSRLENLKTHLRSHTGEKPYVCEHEGCNKAFSNASDRAKHQNRTHSNEKPYICKIPGCTKRYTDPSSLRKHVKTVHGPDAHVTKKQRNDVHLRTPLLKENGDSEAGTEPGGPESTEASSTSQAVEDCLHVRAIKTESSGLCQSSPGAQSSCSSEPSPLGSAPNNDSGVEMPGTGPGSLGDLTALDDTPPGADTSALAAPSAGGLQLRKHMTTMHRFEQLKKEKLKSLKDSCSWAGPTPHTRNTKLPPLPGSGSILENFSGSGGGGPAGLLPNPRLSELSASEVTMLSQLQERRDSSTSTVSSAYTVSRRSSGISPYFSSRRSSEASPLGAGRPHNASSADSYDPISTDASRRSSEASQCSGGSGLLNLTPAQQYSLRAKYAAATGGPPPTPLPGLERMSLRTRLALLDAPERTLPAGCPRPLGPRRGSDGPTYGHGHAGAAPAFPHEAPGGGARRASDPVRRPDALSLPRVQRFHSTHNVNPGPLPPCADRRGLRLQSHPSTDGGLARGAYSPRPPSISENVAMEAVAAGVDGAGPEADLGLPEDDLVLPDDVVQYIKAHASGALDEGTGQVYPTESTGFSDNPRLPSPGLHGQRRMVAADSNVGPSAPMLGGCQLGFGAPSSLNKNNMPVQWNEVSSGTVDALASQVKPPPFPQGNLAVVQQKPAFGQYPGYSPQGLQASPGGLDSTQPHLQPRSGAPSQGIPRVNYMQQLRQPVAGSQCPGMTTTMSPHACYGQVHPQLSPSTISGALNQFPQSCSNMPAKPGHLGHPQQTEVAPDPTTMGNRHRELGVPDSALAGVPPPHPVQSYPQQSHHLAASMSQEGYHQVPSLLPARQPGFMEPQTGPMGVATAGFGLVQPRPPLEPSPTGRHRGVRAVQQQLAYARATGHAMAAMPSSQETAEAVPKGAMGNMGSVPPQPPPQDAGGAPDHSMLYYYGQIHMYEQDGGLENLGSCQVMRSQPPQPQACQDSIQPQPLPSPGVNQVSSTVDSQLLEAPQIDFDAIMDDGDHSSLFSGALSPSLLHSLSQNSSRLTTPRNSLTLPSIPAGISNMAVGDMSSMLTSLAEESKFLNMMT

SEQ ID NO: 25236 - protein, 166 aa, Artificial Sequence
  Synthetic polypeptide
NEGKKGPYLIGIVMWIKPVHIFQDLAHGECWCRSISCHHSMRPYRLTCDTRKEGTITSLILSTVCTVSRFSSPRVTPRLSRKRALSISPLSDASLDLQRMIRTSPNSLVAYINNSRSSSAASGSYGHLSAGALSPAFTFPHPINPVAYQQILSQQRGLGSAFGHTP

SEQ ID NO: 25237 - protein, 137 aa, Artificial Sequence
  Synthetic polypeptide
MLVPQHLLPPFHAPLPIDMRHQEGRYHYEPHSVHGVHGVPFLQPAGDAPPEPQAGAVHLPTLRRQPGPAADDPHLTQLASGLHQQLPKQLGGQRFLRASVSGCPQPSLHLPPPHQPRGLPADSEPAEGSGVSLWTHT

SEQ ID NO: 25238 - protein, 45 aa, Artificial Sequence
  Synthetic polypeptide
TQEAEVAVSQDHTIALQPRSVWAWPARKNTWFCECHESSEHKYRS

SEQ ID NO: 25239 - protein, 744 aa, Artificial Sequence
  Synthetic polypeptide
VKITPLLSSPDRFGLGQPGRIPGSVNAMRVLSTSTDLEAAVADALLLGDSRSKKKPVRRRYEPYGMYSDDDANSDASSVCSERSYGSRNGGIPHYLRQTEDVAEVLNHCASSNWSERKEGLLGLQNLLKSQRTLSRVELKRLCEIFTRMFADPHSKRVFSMFLETLVDFIIIHKDDLQDWLFVLLTQLLKKMGADLLGSVQAKVQKALDVTRDSFPFDQQFNILMRFIVDQTQTPNLKVKVAILKYIESLARQMDPTDFVNSSETRLAVSRIITWTTEPKSSDVRKAAQIVLISLFELNTPEFTMLLGALPKTFQDGATKLLHNHLKNSSNTSVGSPSNTIGRTPSRHTSSRTSPLTSPTNCSHGGLSPSMLDYDTENLNSEEIYSSLRGVTEAIEKFSFRSQEDLNEPIKRDGKKECDIVSRDGGAASPATEGRGGSEVEGGRTALDNKTSLLNTQPPRAFPGPRARDYNPYPYSDAINTYDKTALKEAVFDDDMEQLRDVPIDHSDLVADLLKELSNHNERVEERKGALLELLKITREDSLGVWEEHFKTILLLLLETLGDKDHSIRALALRVLREILRNQPARFKNYAELTIMKTLEAHKDSHKEVVRAAEEAASTLASSIHPEQCIKVLCPIIQTADYPINLAAIKMQTKVVERIAKESLLQLLVDIIPGLLQGYDNTESSVRKASVFCLVAIYSVIGEDLKPHLAQLTGSKMKLLNLYIKRAQTTNSNSSSSSDVSTHS

SEQ ID NO: 25240 - protein, 52 aa, Artificial Sequence
  Synthetic polypeptide
PGMAVCTCNPSYSWDENHLNPGGGGCSESRSHHCSPAQIGLGLASQEEYLVL

SEQ ID NO: 25241 - protein, 759 aa, Artificial Sequence
  Synthetic polypeptide
VKITPLLSSPDRFGLGQPGRIPGSVNAMRVLSTSTDLEAAVADALKKPVRRRYEPYGMYSDDDANSDASSVCSERSYGSRNGGIPHYLRQTEDVAEVLNHCASSNWSERKEGLLGLQNLLKSQRTLSRVELKRLCEIFTRMFADPHSKIADSEAECEDKEGNLFPSEVSCTRVFSMFLETLVDFIIIHKDDLQDWLFVLLTQLLKKMGADLLGSVQAKVQKALDVTRDSFPFDQQFNILMRFIVDQTQTPNLKVKVAILKYIESLARQMDPTDFVNSSETRLAVSRIITWTTEPKSSDVRKAAQIVLISLFELNTPEFTMLLGALPKTFQDGATKLLHNHLKNSSNTSVGSPSNTIGRTPSRHTSSRTSPLTSPTNCSHGGLSPSMLDYDTENLNSEEIYSSLRGVTEAIEKFSFRSQEDLNEPIKRDGKKECDIVSRDGGAASPATEGRGGSEVEGGRTALDNKTSLLNTQPPRAFPGPRARDYNPYPYSDAINTYDKTALKEAVFDDDMEQLRDVPIDHSDLVADLLKELSNHNERVEERKGALLELLKITREDSLGVWEEHFKTILLLLLETLGDKDHSIRALALRVLREILRNQPARFKNYAELTIMKTLEAHKDSHKEVVRAAEEAASTLASSIHPEQCIKVLCPIIQTADYPINLAAIKMQTKVVERIAKESLLQLLVDIIPGLLQGYDNTESSVRKASVFCLVAIYSVIGEDLKPHLAQLTGSKMKLLNLYIKRAQTTNSNSSSSSDVSTHS

SEQ ID NO: 25242 - protein, 775 aa, Artificial Sequence
  Synthetic polypeptide
VKITPLLSSPDRFGLGQPGRIPGSVNAMRVLSTSTDLEAAVADALKKPVRRRYEPYGMYSDDDANSDASSVCSERSYGSRNGGIPHYLRQTEDVAEVLNHCASSNWSERKEGLLGLQNLLKSQRTLSRVELKRLCEIFTRMFADPHSKRVFSMFLETLVDFIIIHKDDLQDWLFVLLTQLLKKMGADLLGSVQAKVQKALDVTRDSFPFDQQFNILMRFIVDQTQTPNLKVKVAILKYIESLARQMDPTDFVNSSETRLAVSRIITWTTEPKSSDVRKAAQIVLISLFELNTPEFTMLLGALPKTFQDGATKLLHNHLKNSSNTSVGSPSNTIGRTPSRHTSSRTSPLTSPTNCSHGGLSPSRLWGWSADGLAKHPPPFSQPNSIPTAPSHKALRRSYSPSMLDYDTENLNSEEIYSSLRGVTEAIEKFSFRSQEDLNEPIKRDGKKECDIVSRDGGAASPATEGRGGSEVEGGRTALDNKTSLLNTQPPRAFPGPRARDYNPYPYSDAINTYDKTALKEAVFDDDMEQLRDVPIDHSDLVADLLKELSNHNERVEERKGALLELLKITREDSLGVWEEHFKTILLLLLETLGDKDHSIRALALRVLREILRNQPARFKNYAELTIMKTLEAHKDSHKEVVRAAEEAASTLASSIHPEQCIKVLCPIIQTADYPINLAAIKMQTKVVERIAKESLLQLLVDIIPGLLQGYDNTESSVRKASVFCLVAIYSVIGEDLKPHLAQLTGSKMKLLNLYIKRAQTTNSNSSSSSDVSTHS

SEQ ID NO: 25243 - protein, 743 aa, Artificial Sequence
  Synthetic polypeptide
VKITPLLSSPDRFGLGQPGRIPGSVNAMRVLSTSTDLEAAVADALLLGDSRSKKKPVRRRYEPYGMYSDDDANSDASSVCSERSYGSRNGGIPHYLRQTEDVAEVLNHCASSNWSERKEGLLGLQNLLKSQRTLSRVELKRLCEIFTRMFADPHSKVFSMFLETLVDFIIIHKDDLQDWLFVLLTQLLKKMGADLLGSVQAKVQKALDVTRDSFPFDQQFNILMRFIVDQTQTPNLKVKVAILKYIESLARQMDPTDFVNSSETRLAVSRIITWTTEPKSSDVRKAAQIVLISLFELNTPEFTMLLGALPKTFQDGATKLLHNHLKNSSNTSVGSPSNTIGRTPSRHTSSRTSPLTSPTNCSHGGLSPSMLDYDTENLNSEEIYSSLRGVTEAIEKFSFRSQEDLNEPIKRDGKKECDIVSRDGGAASPATEGRGGSEVEGGRTALDNKTSLLNTQPPRAFPGPRARDYNPYPYSDAINTYDKTALKEAVFDDDMEQLRDVPIDHSDLVADLLKELSNHNERVEERKGALLELLKITREDSLGVWEEHFKTILLLLLETLGDKDHSIRALALRVLREILRNQPARFKNYAELTIMKTLEAHKDSHKEVVRAAEEAASTLASSIHPEQCIKVLCPIIQTADYPINLAAIKMQTKVVERIAKESLLQLLVDIIPGLLQGYDNTESSVRKASVFCLVAIYSVIGEDLKPHLAQLTGSKMKLLNLYIKRAQTTNSNSSSSSDVSTHS

SEQ ID NO: 25244 - protein, 767 aa, Artificial Sequence
  Synthetic polypeptide
VKITPLLSSPDRFGLGQPGRIPGSVNAMRVLSTSTDLEAAVADALVRGTSTGKKKPVRRRYEPYGMYSDDDANSDASSVCSERSYGSRNGGIPHYLRQTEDVAEVLNHCASSNWSERKEGLLGLQNLLKSQRTLSRVELKRLCEIFTRMFADPHSKIADSEAECEDKEGNLFPSEVSCTRVFSMFLETLVDFIIIHKDDLQDWLFVLLTQLLKKMGADLLGSVQAKVQKALDVTRDSFPFDQQFNILMRFIVDQTQTPNLKVKVAILKYIESLARQMDPTDFVNSSETRLAVSRIITWTTEPKSSDVRKAAQIVLISLFELNTPEFTMLLGALPKTFQDGATKLLHNHLKNSSNTSVGSPSNTIGRTPSRHTSSRTSPLTSPTNCSHGGLSPSMLDYDTENLNSEEIYSSLRGVTEAIEKFSFRSQEDLNEPIKRDGKKECDIVSRDGGAASPATEGRGGSEVEGGRTALDNKTSLLNTQPPRAFPGPRARDYNPYPYSDAINTYDKTALKEAVFDDDMEQLRDVPIDHSDLVADLLKELSNHNERVEERKGALLELLKITREDSLGVWEEHFKTILLLLLETLGDKDHSIRALALRVLREILRNQPARFKNYAELTIMKTLEAHKDSHKEVVRAAEEAASTLASSIHPEQCIKVLCPIIQTADYPINLAAIKMQTKVVERIAKESLLQLLVDIIPGLLQGYDNTESSVRKASVFCLVAIYSVIGEDLKPHLAQLTGSKMKLLNLYIKRAQTTNSNSSSSSDVSTHS

SEQ ID NO: 25245 - protein, 743 aa, Artificial Sequence
  Synthetic polypeptide
VKITPLLSSPDRFGLGQPGRIPGSVNAMRVLSTSTDLEAAVADALLLGDSRSKKPVRRRYEPYGMYSDDDANSDASSVCSERSYGSRNGGIPHYLRQTEDVAEVLNHCASSNWSERKEGLLGLQNLLKSQRTLSRVELKRLCEIFTRMFADPHSKRVFSMFLETLVDFIIIHKDDLQDWLFVLLTQLLKKMGADLLGSVQAKVQKALDVTRDSFPFDQQFNILMRFIVDQTQTPNLKVKVAILKYIESLARQMDPTDFVNSSETRLAVSRIITWTTEPKSSDVRKAAQIVLISLFELNTPEFTMLLGALPKTFQDGATKLLHNHLKNSSNTSVGSPSNTIGRTPSRHTSSRTSPLTSPTNCSHGGLSPSMLDYDTENLNSEEIYSSLRGVTEAIEKFSFRSQEDLNEPIKRDGKKECDIVSRDGGAASPATEGRGGSEVEGGRTALDNKTSLLNTQPPRAFPGPRARDYNPYPYSDAINTYDKTALKEAVFDDDMEQLRDVPIDHSDLVADLLKELSNHNERVEERKGALLELLKITREDSLGVWEEHFKTILLLLLETLGDKDHSIRALALRVLREILRNQPARFKNYAELTIMKTLEAHKDSHKEVVRAAEEAASTLASSIHPEQCIKVLCPIIQTADYPINLAAIKMQTKVVERIAKESLLQLLVDIIPGLLQGYDNTESSVRKASVFCLVAIYSVIGEDLKPHLAQLTGSKMKLLNLYIKRAQTTNSNSSSSSDVSTHS

SEQ ID NO: 25246 - protein, 742 aa, Artificial Sequence
  Synthetic polypeptide
VKITPLLSSPDRFGLGQPGRIPGSVNAMRVLSTSTDLEAAVADALLLGDSRSKKPVRRRYEPYGMYSDDDANSDASSVCSERSYGSRNGGIPHYLRQTEDVAEVLNHCASSNWSERKEGLLGLQNLLKSQRTLSRVELKRLCEIFTRMFADPHSKVFSMFLETLVDFIIIHKDDLQDWLFVLLTQLLKKMGADLLGSVQAKVQKALDVTRDSFPFDQQFNILMRFIVDQTQTPNLKVKVAILKYIESLARQMDPTDFVNSSETRLAVSRIITWTTEPKSSDVRKAAQIVLISLFELNTPEFTMLLGALPKTFQDGATKLLHNHLKNSSNTSVGSPSNTIGRTPSRHTSSRTSPLTSPTNCSHGGLSPSMLDYDTENLNSEEIYSSLRGVTEAIEKFSFRSQEDLNEPIKRDGKKECDIVSRDGGAASPATEGRGGSEVEGGRTALDNKTSLLNTQPPRAFPGPRARDYNPYPYSDAINTYDKTALKEAVFDDDMEQLRDVPIDHSDLVADLLKELSNHNERVEERKGALLELLKITREDSLGVWEEHFKTILLLLLETLGDKDHSIRALALRVLREILRNQPARFKNYAELTIMKTLEAHKDSHKEVVRAAEEAASTLASSIHPEQCIKVLCPIIQTADYPINLAAIKMQTKVVERIAKESLLQLLVDIIPGLLQGYDNTESSVRKASVFCLVAIYSVIGEDLKPHLAQLTGSKMKLLNLYIKRAQTTNSNSSSSSDVSTHS

SEQ ID NO: 25247 - protein, 196 aa, Artificial Sequence
  Synthetic polypeptide
VKITPLLSSPDRFGLGQPGRIPGSVNAMRVLSTSTDLEAAVADALLLGDSRSKKKPVRRRYEPYGMYSDDDANSDASSVCSERSYGSRNGGIPHYLRQTEDVAEVLNHCASSNWSERKEGLLGLQNLLKSQRTLSRVELKRLCEIFTRMFADPHSKIADSEAECEDKEGNLFPSEVSCTVSFQYVFGDSCGFYNNS

SEQ ID NO: 25248 - protein, 110 aa, Artificial Sequence
  Synthetic polypeptide
VKITPLLSSPDRFGLGQPGRIPGSVNAMRVLSTSTDLEAAVADALKKPVRRRYEPYGMYSDDDANSDASSVCSERSYGSRNGGIPHYLRQTEDVAEVLNHCASSNWSERK

SEQ ID NO: 25249 - protein, 1110 aa, Artificial Sequence
  Synthetic polypeptide
QVGWYVPGVPATWKAKVGGLIEPRSSSSTWARHLSSVLGNKFDHGAEAIMPTIFNLIPNSAKIMATSGVVAVRLIIRHTHIPRLIPVITSNCTSKSVAVRRRCFEFLDLLLQEWQTHSLERHISVLAETIKKGIHDADSEARIEARKCYWGFHSHFSREAEHLYHTLESSYQKALQSHLKNSDSIVSLPQSDRSSSSSQESLNRPLSAKRSPTGSTTSRASTVSTKSVSTTGSLQRSRSDIDVNAAASAKSKVSSSSGTTPFSSAAALPPGSYASLGRIRTRRQSSGSATNVASTPDNRGRSRAKVVSQSQRSRSANPAGAGSRSSSPGKLLGSGYGGLTGGSSRGPPVTPSSEKRSKIPRSQGCSRETSPNRIGLDRFGLGQPGRIPGSVNAMRVLSTSTDLEAAVADALLLGDSRSKKKPVRRRYEPYGMYSDDDANSDASSVCSERSYGSRNGGIPHYLRQTEDVAEVLNHCASSNWSERKEGLLGLQNLLKSQRTLSRVELKRLCEIFTRMFADPHSKRVFSMFLETLVDFIIIHKDDLQDWLFVLLTQLLKKMGADLLGSVQAKVQKALDVTRDSFPFDQQFNILMRFIVDQTQTPNLKVKVAILKYIESLARQMDPTDFVNSSETRLAVSRIITWTTEPKSSDVRKAAQIVLISLFELNTPEFTMLLGALPKTFQDGATKLLHNHLKNSSNTSVGSPSNTIGRTPSRHTSSRTSPLTSPTNCSHGGLSPSMLDYDTENLNSEEIYSSLRGVTEAIEKFSFRSQEDLNEPIKRDGKKECDIVSRDGGAASPATEGRGGSEVEGGRTALDNKTSLLNTQPPRAFPGPRARDYNPYPYSDAINTYDKTALKEAVFDDDMEQLRDVPIDHSDLVADLLKELSNHNERVEERKGALLELLKITREDSLGVWEEHFKTILLLLLETLGDKDHSIRALALRVLREILRNQPARFKNYAELTIMKTLEAHKDSHKEVVRAAEEAASTLASSIHPEQCIKVLCPIIQTADYPINLAAIKMQTKVVERIAKESLLQLLVDIIPGLLQGYDNTESSVRKASVFCLVAIYSVIGEDLKPHLAQLTGSKMKLLNLYIKRAQTTNSNSSSSSDVSTHS

SEQ ID NO: 25250 - protein, 35 aa, Artificial Sequence
  Synthetic polypeptide
LSPGVQVQRGQGICHQFWGISLTMELKPLCQLSLI

SEQ ID NO: 25251 - protein, 18 aa, Artificial Sequence
  Synthetic polypeptide
AQEFKFNVGKASVISSGE

SEQ ID NO: 25252 - protein, 1125 aa, Artificial Sequence
  Synthetic polypeptide
QVGWYVPGVPATWKAKVGGLIEPRSSSSTWARHLSSVLGNKFDHGAEAIMPTIFNLIPNSAKIMATSGVVAVRLIIRHTHIPRLIPVITSNCTSKSVAVRRRCFEFLDLLLQEWQTHSLERHISVLAETIKKGIHDADSEARIEARKCYWGFHSHFSREAEHLYHTLESSYQKALQSHLKNSDSIVSLPQSDRSSSSSQESLNRPLSAKRSPTGSTTSRASTVSTKSVSTTGSLQRSRSDIDVNAAASAKSKVSSSSGTTPFSSAAALPPGSYASLGRIRTRRQSSGSATNVASTPDNRGRSRAKVVSQSQRSRSANPAGAGSRSSSPGKLLGSGYGGLTGGSSRGPPVTPSSEKRSKIPRSQGCSRETSPNRIGLDRFGLGQPGRIPGSVNAMRVLSTSTDLEAAVADALKKPVRRRYEPYGMYSDDDANSDASSVCSERSYGSRNGGIPHYLRQTEDVAEVLNHCASSNWSERKEGLLGLQNLLKSQRTLSRVELKRLCEIFTRMFADPHSKIADSEAECEDKEGNLFPSEVSCTRVFSMFLETLVDFIIIHKDDLQDWLFVLLTQLLKKMGADLLGSVQAKVQKALDVTRDSFPFDQQFNILMRFIVDQTQTPNLKVKVAILKYIESLARQMDPTDFVNSSETRLAVSRIITWTTEPKSSDVRKAAQIVLISLFELNTPEFTMLLGALPKTFQDGATKLLHNHLKNSSNTSVGSPSNTIGRTPSRHTSSRTSPLTSPTNCSHGGLSPSMLDYDTENLNSEEIYSSLRGVTEAIEKFSFRSQEDLNEPIKRDGKKECDIVSRDGGAASPATEGRGGSEVEGGRTALDNKTSLLNTQPPRAFPGPRARDYNPYPYSDAINTYDKTALKEAVFDDDMEQLRDVPIDHSDLVADLLKELSNHNERVEERKGALLELLKITREDSLGVWEEHFKTILLLLLETLGDKDHSIRALALRVLREILRNQPARFKNYAELTIMKTLEAHKDSHKEVVRAAEEAASTLASSIHPEQCIKVLCPIIQTADYPINLAAIKMQTKVVERIAKESLLQLLVDIIPGLLQGYDNTESSVRKASVFCLVAIYSVIGEDLKPHLAQLTGSKMKLLNLYIKRAQTTNSNSSSSSDVSTHS

SEQ ID NO: 25253 - protein, 1177 aa, Artificial Sequence
  Synthetic polypeptide
QVGWYVPGVPATWKAKVGGLIEPRSSSSTWARHLSSVLGNKFDHGAEAIMPTIFNLIPNSAKIMATSGVVAVRLIIRHTHIPRLIPVITSNCTSKSVAVRRRCFEFLDLLLQEWQTHSLERHISVLAETIKKGIHDADSEARIEARKCYWGFHSHFSREAEHLYHTLESSYQKALQSHLKNSDSIVSLPQSDRSSSSSQESLNRPLSAKRSPTGSTTSRASTVSTKSVSTTGSLQRSRSDIDVNAAASAKSKVSSSSGTTPFSSAAALPPGSYASLGRIRTRRQSSGSATNVASTPDNRGRSRAKVVSQSQRSRSANPAGAGSRSSSPGKLLGSGYGGLTGGSSRGPPVTPSSEKRSKIPRSQGCSRETSPNRIGLARSSRIPRPSMSQGCSRDTSRESSRDTSPARGFPPLDRFGLGQPGRIPGSVNAMRVLSTSTDLEAAVADALKKPVRRRYEPYGMYSDDDANSDASSVCSERSYGSRNGGIPHYLRQTEDVAEVLNHCASSNWSERKEGLLGLQNLLKSQRTLSRVELKRLCEIFTRMFADPHSKRVFSMFLETLVDFIIIHKDDLQDWLFVLLTQLLKKMGADLLGSVQAKVQKALDVTRDSFPFDQQFNILMRFIVDQTQTPNLKVKVAILKYIESLARQMDPTDFVNSSETRLAVSRIITWTTEPKSSDVRKAAQIVLISLFELNTPEFTMLLGALPKTFQDGATKLLHNHLKNSSNTSVGSPSNTIGRTPSRHTSSRTSPLTSPTNCSHGGLSPSRLWGWSADGLAKHPPPFSQPNSIPTAPSHKALRRSYSPSMLDYDTENLNSEEIYSSLRGVTEAIEKFSFRSQEDLNEPIKRDGKKECDIVSRDGGAASPATEGRGGSEVEGGRTALDNKTSLLNTQPPRAFPGPRARDYNPYPYSDAINTYDKTALKEAVFDDDMEQLRDVPIDHSDLVADLLKELSNHNERVEERKGALLELLKITREDSLGVWEEHFKTILLLLLETLGDKDHSIRALALRVLREILRNQPARFKNYAELTIMKTLEAHKDSHKEVVRAAEEAASTLASSIHPEQCIKVLCPIIQTADYPINLAAIKMQTKVVERIAKESLLQLLVDIIPGLLQGYDNTESSVRKASVFCLVAIYSVIGEDLKPHLAQLTGSKMKLLNLYIKRAQTTNSNSSSSSDVSTHS

SEQ ID NO: 25254 - protein, 1117 aa, Artificial Sequence
  Synthetic polypeptide
QVGWYVPGVPATWKAKVGGLIEPRSSSSTWARHLSSVLGNKFDHGAEAIMPTIFNLIPNSAKIMATSGVVAVRLIIRHTHIPRLIPVITSNCTSKSVAVRRRCFEFLDLLLQEWQTHSLERHISVLAETIKKGIHDADSEARIEARKCYWGFHSHFSREAEHLYHTLESSYQKALQSHLKNSDSIVSLPQSDRSSSSSQESLNRPLSAKRSPTGSTTSRASTVSTKSVSTTGSLQRSRSDIDVNAAASAKSKVSSSSGTTPFSSAAALPPGSYASLDGTTTKAEGRIRTRRQSSGSATNVASTPDNRGRSRAKVVSQSQRSRSANPAGAGSRSSSPGKLLGSGYGGLTGGSSRGPPVTPSSEKRSKIPRSQGCSRETSPNRIGLDRFGLGQPGRIPGSVNAMRVLSTSTDLEAAVADALLLGDSRSKKKPVRRRYEPYGMYSDDDANSDASSVCSERSYGSRNGGIPHYLRQTEDVAEVLNHCASSNWSERKEGLLGLQNLLKSQRTLSRVELKRLCEIFTRMFADPHSKVFSMFLETLVDFIIIHKDDLQDWLFVLLTQLLKKMGADLLGSVQAKVQKALDVTRDSFPFDQQFNILMRFIVDQTQTPNLKVKVAILKYIESLARQMDPTDFVNSSETRLAVSRIITWTTEPKSSDVRKAAQIVLISLFELNTPEFTMLLGALPKTFQDGATKLLHNHLKNSSNTSVGSPSNTIGRTPSRHTSSRTSPLTSPTNCSHGGLSPSMLDYDTENLNSEEIYSSLRGVTEAIEKFSFRSQEDLNEPIKRDGKKECDIVSRDGGAASPATEGRGGSEVEGGRTALDNKTSLLNTQPPRAFPGPRARDYNPYPYSDAINTYDKTALKEAVFDDDMEQLRDVPIDHSDLVADLLKELSNHNERVEERKGALLELLKITREDSLGVWEEHFKTILLLLLETLGDKDHSIRALALRVLREILRNQPARFKNYAELTIMKTLEAHKDSHKEVVRAAEEAASTLASSIHPEQCIKVLCPIIQTADYPINLAAIKMQTKVVERIAKESLLQLLVDIIPGLLQGYDNTESSVRKASVFCLVAIYSVIGEDLKPHLAQLTGSKMKLLNLYIKRAQTTNSNSSSSSDVSTHS

SEQ ID NO: 25255 - protein, 1133 aa, Artificial Sequence
  Synthetic polypeptide
QVGWYVPGVPATWKAKVGGLIEPRSSSSTWARHLSSVLGNKFDHGAEAIMPTIFNLIPNSAKIMATSGVVAVRLIIRHTHIPRLIPVITSNCTSKSVAVRRRCFEFLDLLLQEWQTHSLERHISVLAETIKKGIHDADSEARIEARKCYWGFHSHFSREAEHLYHTLESSYQKALQSHLKNSDSIVSLPQSDRSSSSSQESLNRPLSAKRSPTGSTTSRASTVSTKSVSTTGSLQRSRSDIDVNAAASAKSKVSSSSGTTPFSSAAALPPGSYASLGRIRTRRQSSGSATNVASTPDNRGRSRAKVVSQSQRSRSANPAGAGSRSSSPGKLLGSGYGGLTGGSSRGPPVTPSSEKRSKIPRSQGCSRETSPNRIGLDRFGLGQPGRIPGSVNAMRVLSTSTDLEAAVADALVRGTSTGKKKPVRRRYEPYGMYSDDDANSDASSVCSERSYGSRNGGIPHYLRQTEDVAEVLNHCASSNWSERKEGLLGLQNLLKSQRTLSRVELKRLCEIFTRMFADPHSKIADSEAECEDKEGNLFPSEVSCTRVFSMFLETLVDFIIIHKDDLQDWLFVLLTQLLKKMGADLLGSVQAKVQKALDVTRDSFPFDQQFNILMRFIVDQTQTPNLKVKVAILKYIESLARQMDPTDFVNSSETRLAVSRIITWTTEPKSSDVRKAAQIVLISLFELNTPEFTMLLGALPKTFQDGATKLLHNHLKNSSNTSVGSPSNTIGRTPSRHTSSRTSPLTSPTNCSHGGLSPSMLDYDTENLNSEEIYSSLRGVTEAIEKFSFRSQEDLNEPIKRDGKKECDIVSRDGGAASPATEGRGGSEVEGGRTALDNKTSLLNTQPPRAFPGPRARDYNPYPYSDAINTYDKTALKEAVFDDDMEQLRDVPIDHSDLVADLLKELSNHNERVEERKGALLELLKITREDSLGVWEEHFKTILLLLLETLGDKDHSIRALALRVLREILRNQPARFKNYAELTIMKTLEAHKDSHKEVVRAAEEAASTLASSIHPEQCIKVLCPIIQTADYPINLAAIKMQTKVVERIAKESLLQLLVDIIPGLLQGYDNTESSVRKASVFCLVAIYSVIGEDLKPHLAQLTGSKMKLLNLYIKRAQTTNSNSSSSSDVSTHS

SEQ ID NO: 25256 - protein, 1116 aa, Artificial Sequence
  Synthetic polypeptide
QVGWYVPGVPATWKAKVGGLIEPRSSSSTWARHLSSVLGNKFDHGAEAIMPTIFNLIPNSAKIMATSGVVAVRLIIRHTHIPRLIPVITSNCTSKSVAVRRRCFEFLDLLLQEWQTHSLERHISVLAETIKKGIHDADSEARIEARKCYWGFHSHFSREAEHLYHTLESSYQKALQSHLKNSDSIVSLPQSDRSSSSSQESLNRPLSAKRSPTGSTTSRASTVSTKSVSTTGSLQRSRSDIDVNAAASAKSKVSSSSGTTPFSSAAALPPGSYASLESRHMREDMEYIGLDSGRIRTRRQSSGSATNVASTPDNRGRSRAKVVSQSQPGSRSSSPGKLLGSGYGGLTGGSSRGPPVTPSSEKRSKIPRSQGCSRETSPNRIGLDRFGLGQPGRIPGSVNAMRVLSTSTDLEAAVADALLLGDSRSKKPVRRRYEPYGMYSDDDANSDASSVCSERSYGSRNGGIPHYLRQTEDVAEVLNHCASSNWSERKEGLLGLQNLLKSQRTLSRVELKRLCEIFTRMFADPHSKRVFSMFLETLVDFIIIHKDDLQDWLFVLLTQLLKKMGADLLGSVQAKVQKALDVTRDSFPFDQQFNILMRFIVDQTQTPNLKVKVAILKYIESLARQMDPTDFVNSSETRLAVSRIITWTTEPKSSDVRKAAQIVLISLFELNTPEFTMLLGALPKTFQDGATKLLHNHLKNSSNTSVGSPSNTIGRTPSRHTSSRTSPLTSPTNCSHGGLSPSMLDYDTENLNSEEIYSSLRGVTEAIEKFSFRSQEDLNEPIKRDGKKECDIVSRDGGAASPATEGRGGSEVEGGRTALDNKTSLLNTQPPRAFPGPRARDYNPYPYSDAINTYDKTALKEAVFDDDMEQLRDVPIDHSDLVADLLKELSNHNERVEERKGALLELLKITREDSLGVWEEHFKTILLLLLETLGDKDHSIRALALRVLREILRNQPARFKNYAELTIMKTLEAHKDSHKEVVRAAEEAASTLASSIHPEQCIKVLCPIIQTADYPINLAAIKMQTKVVERIAKESLLQLLVDIIPGLLQGYDNTESSVRKASVFCLVAIYSVIGEDLKPHLAQLTGSKMKLLNLYIKRAQTTNSNSSSSSDVSTHS

SEQ ID NO: 25257 - protein, 1116 aa, Artificial Sequence
  Synthetic polypeptide
QVGWYVPGVPATWKAKVGGLIEPRSSSSTWARHLSSVLGNKFDHGAEAIMPTIFNLIPNSAKIMATSGVVAVRLIIRHTHIPRLIPVITSNCTSKSVAVRRRCFEFLDLLLQEWQTHSLERHISVLAETIKKGIHDADSEARIEARKCYWGFHSHFSREAEHLYHTLESSYQKALQSHLKNSDSIVSLPQSDRSSSSSQESLNRPLSAKRSPTGSTTSRASTVSTKSVSTTGSLQRSRSDIDVNAAASAKSKVSSSSGTTPFSSAAALPPGSYASLDGTTTKAEGRIRTRRQSSGSATNVASTPDNRGRSRAKVVSQSQRSRSANPAGAGSRSSSPGKLLGSGYGGLTGGSSRGPPVTPSSEKRSKIPRSQGCSRETSPNRIGLDRFGLGQPGRIPGSVNAMRVLSTSTDLEAAVADALLLGDSRSKKPVRRRYEPYGMYSDDDANSDASSVCSERSYGSRNGGIPHYLRQTEDVAEVLNHCASSNWSERKEGLLGLQNLLKSQRTLSRVELKRLCEIFTRMFADPHSKVFSMFLETLVDFIIIHKDDLQDWLFVLLTQLLKKMGADLLGSVQAKVQKALDVTRDSFPFDQQFNILMRFIVDQTQTPNLKVKVAILKYIESLARQMDPTDFVNSSETRLAVSRIITWTTEPKSSDVRKAAQIVLISLFELNTPEFTMLLGALPKTFQDGATKLLHNHLKNSSNTSVGSPSNTIGRTPSRHTSSRTSPLTSPTNCSHGGLSPSMLDYDTENLNSEEIYSSLRGVTEAIEKFSFRSQEDLNEPIKRDGKKECDIVSRDGGAASPATEGRGGSEVEGGRTALDNKTSLLNTQPPRAFPGPRARDYNPYPYSDAINTYDKTALKEAVFDDDMEQLRDVPIDHSDLVADLLKELSNHNERVEERKGALLELLKITREDSLGVWEEHFKTILLLLLETLGDKDHSIRALALRVLREILRNQPARFKNYAELTIMKTLEAHKDSHKEVVRAAEEAASTLASSIHPEQCIKVLCPIIQTADYPINLAAIKMQTKVVERIAKESLLQLLVDIIPGLLQGYDNTESSVRKASVFCLVAIYSVIGEDLKPHLAQLTGSKMKLLNLYIKRAQTTNSNSSSSSDVSTHS

SEQ ID NO: 25258 - protein, 562 aa, Artificial Sequence
  Synthetic polypeptide
QVGWYVPGVPATWKAKVGGLIEPRSSSSTWARHLSSVLGNKFDHGAEAIMPTIFNLIPNSAKIMATSGVVAVRLIIRHTHIPRLIPVITSNCTSKSVAVRRRCFEFLDLLLQEWQTHSLERHISVLAETIKKGIHDADSEARIEARKCYWGFHSHFSREAEHLYHTLESSYQKALQSHLKNSDSIVSLPQSDRSSSSSQESLNRPLSAKRSPTGSTTSRASTVSTKSVSTTGSLQRSRSDIDVNAAASAKSKVSSSSGTTPFSSAAALPPGSYASLGRIRTRRQSSGSATNVASTPDNRGRSRAKVVSQSQRSRSANPAGAGSRSSSPGKLLGSGYGGLTGGSSRGPPVTPSSEKRSKIPRSQGCSRETSPNRIGLDRFGLGQPGRIPGSVNAMRVLSTSTDLEAAVADALLLGDSRSKKKPVRRRYEPYGMYSDDDANSDASSVCSERSYGSRNGGIPHYLRQTEDVAEVLNHCASSNWSERKEGLLGLQNLLKSQRTLSRVELKRLCEIFTRMFADPHSKIADSEAECEDKEGNLFPSEVSCTVSFQYVFGDSCGFYNNS

SEQ ID NO: 25259 - protein, 87 aa, Artificial Sequence
  Synthetic polypeptide
IQRLEESLACDRCAIKISTMKILWMVTDLPLLVLHHPRLHQVLGETLEWEPPAGLVHPPLDPSLQLQKKELVLLMKRILLKHLMMYL

SEQ ID NO: 25260 - protein, 65 aa, Artificial Sequence
  Synthetic polypeptide
HVQGSEGTLCALTLFEFSLHVSLEKYVFTHESRTFTLFPLLFFIFFLNEHKFNALKSPWLVIGVQ

SEQ ID NO: 25261 - protein, 1236 aa, Artificial Sequence
  Synthetic polypeptide
VCNKNFDDEDSVDGNRPSSASSTSSKAPPSSRRNVGMGTTRRLGSSTLGSKSSAAKEGAGAVDEEDFIKAFDDVPVVQIYSSRDLEESINKIREILSDDKHDWEQRVNALKKIRSLLLAGAAEYDNFFQHLRLLDGAFKLSAKDLRSQVVREACITLGHLSSVLGNKFDHGAEAIMPTIFNLIPNSAKIMATSGVVAVRLIIRHTHIPRLIPVITSNCTSKSVAVRRRCFEFLDLLLQEWQTHSLERHISVLAETIKKGIHDADSEARIEARKCYWGFHSHFSREAEHLYHTLESSYQKALQSHLKNSDSIVSLPQSDRSSSSSQESLNRPLSAKRSPTGSTTSRASTVSTKSVSTTGSLQRSRSDIDVNAAASAKSKVSSSSGTTPFSSAAALPPGSYASLGRIRTRRQSSGSATNVASTPDNRGRSRAKVVSQSQRSRSANPAGAGSRSSSPGKLLGSGYGGLTGGSSRGPPVTPSSEKRSKIPRSQGCSRETSPNRIGLDRFGLGQPGRIPGSVNAMRVLSTSTDLEAAVADALLLGDSRSKKKPVRRRYEPYGMYSDDDANSDASSVCSERSYGSRNGGIPHYLRQTEDVAEVLNHCASSNWSERKEGLLGLQNLLKSQRTLSRVELKRLCEIFTRMFADPHSKRVFSMFLETLVDFIIIHKDDLQDWLFVLLTQLLKKMGADLLGSVQAKVQKALDVTRDSFPFDQQFNILMRFIVDQTQTPNLKVKVAILKYIESLARQMDPTDFVNSSETRLAVSRIITWTTEPKSSDVRKAAQIVLISLFELNTPEFTMLLGALPKTFQDGATKLLHNHLKNSSNTSVGSPSNTIGRTPSRHTSSRTSPLTSPTNCSHGGLSPSMLDYDTENLNSEEIYSSLRGVTEAIEKFSFRSQEDLNEPIKRDGKKECDIVSRDGGAASPATEGRGGSEVEGGRTALDNKTSLLNTQPPRAFPGPRARDYNPYPYSDAINTYDKTALKEAVFDDDMEQLRDVPIDHSDLVADLLKELSNHNERVEERKGALLELLKITREDSLGVWEEHFKTILLLLLETLGDKDHSIRALALRVLREILRNQPARFKNYAELTIMKTLEAHKDSHKEVVRAAEEAASTLASSIHPEQCIKVLCPIIQTADYPINLAAIKMQTKVVERIAKESLLQLLVDIIPGLLQGYDNTESSVRKASVFCLVAIYSVIGEDLKPHLAQLTGSKMKLLNLYIKRAQTTNSNSSSSSDVSTHS

SEQ ID NO: 25262 - protein, 1251 aa, Artificial Sequence
  Synthetic polypeptide
VCNKNFDDEDSVDGNRPSSASSTSSKAPPSSRRNVGMGTTRRLGSSTLGSKSSAAKEGAGAVDEEDFIKAFDDVPVVQIYSSRDLEESINKIREILSDDKHDWEQRVNALKKIRSLLLAGAAEYDNFFQHLRLLDGAFKLSAKDLRSQVVREACITLGHLSSVLGNKFDHGAEAIMPTIFNLIPNSAKIMATSGVVAVRLIIRHTHIPRLIPVITSNCTSKSVAVRRRCFEFLDLLLQEWQTHSLERHISVLAETIKKGIHDADSEARIEARKCYWGFHSHFSREAEHLYHTLESSYQKALQSHLKNSDSIVSLPQSDRSSSSSQESLNRPLSAKRSPTGSTTSRASTVSTKSVSTTGSLQRSRSDIDVNAAASAKSKVSSSSGTTPFSSAAALPPGSYASLGRIRTRRQSSGSATNVASTPDNRGRSRAKVVSQSQRSRSANPAGAGSRSSSPGKLLGSGYGGLTGGSSRGPPVTPSSEKRSKIPRSQGCSRETSPNRIGLDRFGLGQPGRIPGSVNAMRVLSTSTDLEAAVADALKKPVRRRYEPYGMYSDDDANSDASSVCSERSYGSRNGGIPHYLRQTEDVAEVLNHCASSNWSERKEGLLGLQNLLKSQRTLSRVELKRLCEIFTRMFADPHSKIADSEAECEDKEGNLFPSEVSCTRVFSMFLETLVDFIIIHKDDLQDWLFVLLTQLLKKMGADLLGSVQAKVQKALDVTRDSFPFDQQFNILMRFIVDQTQTPNLKVKVAILKYIESLARQMDPTDFVNSSETRLAVSRIITWTTEPKSSDVRKAAQIVLISLFELNTPEFTMLLGALPKTFQDGATKLLHNHLKNSSNTSVGSPSNTIGRTPSRHTSSRTSPLTSPTNCSHGGLSPSMLDYDTENLNSEEIYSSLRGVTEAIEKFSFRSQEDLNEPIKRDGKKECDIVSRDGGAASPATEGRGGSEVEGGRTALDNKTSLLNTQPPRAFPGPRARDYNPYPYSDAINTYDKTALKEAVFDDDMEQLRDVPIDHSDLVADLLKELSNHNERVEERKGALLELLKITREDSLGVWEEHFKTILLLLLETLGDKDHSIRALALRVLREILRNQPARFKNYAELTIMKTLEAHKDSHKEVVRAAEEAASTLASSIHPEQCIKVLCPIIQTADYPINLAAIKMQTKVVERIAKESLLQLLVDIIPGLLQGYDNTESSVRKASVFCLVAIYSVIGEDLKPHLAQLTGSKMKLLNLYIKRAQTTNSNSSSSSDVSTHS
